(19) United States
(12) Patent Application Publication
(10) Pub. No.: US 2004/0166490 A1
(43) Pub. Date: Aug. 26, 2004

(54) Novel therapeutic targets in cancer

(76) Inventors: David W. Morris, Davis, CA (US); Marc S. Malandro, Davis, CA (US)

Correspondence Address: Shantanu Basu, Morrison & Foerster LLP, 755 Page Mill Road, Palo Alto, CA, 94304-1018, US

(21) Appl. No.: 10/322,696

(22) Filed: Dec. 17, 2002

(51) Int. Cl. C12Q 1/68; G01N 33/574; C07H 21/04; C07K 14/705

(52) U.S. Cl. 435/6; 435/7.23; 435/69.1; 435/320.1; 435/325; 530/350; 536/23.2

(57) ABSTRACT

The present invention relates to novel sequences for use in detection, diagnosis and treatment of cancers, especially lymphomas. The invention provides cancer-associated (CA) polynucleotide sequences whose expression is associated with cancer. The present invention provides CA polypeptides associated with cancer that are present on the cell surface and present novel therapeutic targets against cancer. The present invention further provides diagnostic compositions and methods for the detection of cancer. The present invention provides monoclonal and polyclonal antibodies specific for the CA polypeptides. The present invention also provides diagnostic tools and therapeutic compositions and methods for screening, prevention and treatment of cancer.

### CROSS-REFERENCE TO RELATED APPLICATIONS

[0001] This application is related to U.S. applications entitled “Novel Compositions and Methods in Cancer,” U.S. Ser. No. 10/034,650, filed Dec. 20, 2001; U.S. Ser. No. 10/035,832, filed Dec. 26, 2001; U.S. Ser. No. 10/004,113, filed Oct. 23, 2001; U.S. Ser. No. 09/997,722, filed Nov. 30, 2001; U.S. Ser. No. 10/085,117, filed Feb. 27, 2002; and U.S. Ser. No. 10/0387,192, filed Mar. 1, 2002, all of which are expressly incorporated herein by reference in their entirety.

### DESCRIPTION OF ACCOMPANYING CD-ROMS

[0002] Tables 1-28 are filed herewith in CD-ROM in accordance with 37 C.F.R. §§ 1.52 and 1.58. Two identical copies (marked “Copy 1” and “Copy 2”) of this CD-ROM are submitted.

[0003] Contents of the CD-ROM disks submitted herewith are hereby incorporated by reference into the Specification.

### TECHNICAL FIELD OF THE INVENTION

[0004] This invention relates generally to the field of cancer-associated genes. Specifically, it relates to novel sequences for use in diagnosis and treatment of cancer and tumors, as well as the use of the novel compositions in screening methods. The present invention provides methods of using cancer associated polynucleotides, their corresponding gene products and antibodies specific for the gene products in the detection, diagnosis, prevention and/or treatment of associated cancers.

### BACKGROUND OF THE INVENTION

[0005] Oncogenes are genes that can cause cancer. Carcinogenesis can occur by a wide variety of mechanisms, including infection of cells by viruses containing oncogenes, activation of protooncogenes in the host genome, and mutations of protooncogenes and tumor suppressor genes. Carcinogenesis is fundamentally driven by somatic cell evolution (i.e. mutation and natural selection of variants with progressive loss of growth control). The genes that serve as targets for these somatic mutations are classified as either protooncogenes or tumor suppressor genes, depending on whether their mutant phenotypes are dominant or recessive, respectively.

[0006] There are a number of viruses known to be involved in human cancer as well as in animal cancer. Of particular interest here are viruses that do not contain oncogenes themselves; these are slow-transforming retroviruses. They induce tumors by integrating into the host genome and affecting neighboring protooncogenes in a variety of ways. Provirus insertion mutation is a normal consequence of the retroviral life cycle. In infected cells, a DNA copy of the retrovirus genome (called a provirus) is integrated into the host genome. A newly integrated provirus can affect gene expression in cis at or near the integration site by one of two mechanisms. Type I insertion mutations up-regulate transcription of proximal genes as a consequence of regulatory sequences (enhancers and/or promoters) within the proviral long terminal repeats (LTRs). Type II insertion mutations cause truncation of coding regions due to either integration directly within an open reading frame or integration within an intron flanked on both sides by coding sequences. The analysis of sequences at or near the insertion sites has led to the identification of a number of new protooncogenes.

[0007] With respect to lymphoma and leukemia, retroviruses such as AKV murine leukemia virus (MLV) or SL3-3 MLV, are potent inducers of tumors when inoculated into susceptible newborn mice, or when carried in the germ-line. A number of sequences have been identified as relevant in the induction of lymphoma and leukemia by analyzing the insertion sites; see Sorensen et al., J. of Virology 74:2161 (2000); Hansen et al., Genome Res. 10(2):237-43 (2000); Sorensen et al., J. Virology 70:4063 (1996); Sorensen et al., J. Virology 67:7118 (1993); Joosten et al., Virology 268:308 (2000); and Li et al., Nature Genetics 23:348 (1999); all of which are expressly incorporated by reference herein. With respect to cancers, especially breast cancer, prostate cancer and cancers with epithelial origin, the mammalian retrovirus, mouse mammary tumor virus (MMTV) is a potent inducer of tumors when inoculated into susceptible newborn mice, or when carried in the germ line. Mammary Tumors in the Mouse, edited by J. Hilgers and M. Sluyser; Elsevier/North-Holland Biomedical Press; New York, N.Y.

[0008] The pattern of gene expression in a particular living cell is characteristic of its current state. Nearly all differences in the state or type of a cell are reflected in the differences in RNA levels of one or more genes. Comparing expression patterns of uncharacterized genes may provide clues to their function. High throughput analysis of expression of hundreds or thousands of genes can help in (a) identification of complex genetic diseases, (b) analysis of differential gene expression over time, between tissues and disease states, and (c) drug discovery and toxicology studies. Increase or decrease in the levels of expression of certain genes correlate with cancer biology. For example, oncogenes are positive regulators of tumorigenesis, while tumor suppressor genes are negative regulators of tumorigenesis. (Marshall, Cell, 64: 313-326 (1991); Weinberg, Science, 254: 1138-1146 (1991)).

[0009] Accordingly, it is an object of the invention to provide polynucleotide and polypeptide sequences involved in cancer and, in particular, in oncogenesis.

[0010] Immunotherapy, or the use of antibodies for therapeutic purposes has been used in recent years to treat cancer. Passive immunotherapy involves the use of monoclonal antibodies in cancer treatments. See for example, Cancer: Principles and Practice of Oncology, 6^{th} Edition (2001) Chapt. 20 pp. 495-508. Inherent therapeutic biological activity of these antibodies include direct inhibition of tumor cell growth or survival, and the ability to recruit the natural cell killing activity of the body's immune system. These agents are administered alone or in conjunction with radiation or chemotherapeutic agents. Rituxan® and Herceptin®, approved for treatment of lymphoma and breast cancer, respectively, are two examples of such therapeutics. Alternatively, antibodies are used to make antibody conjugates where the antibody is linked to a toxic agent and directs that agent to the tumor by specifically binding to the tumor. Mylotarg® is an example of an approved antibody conjugate used for the treatment of leukemia.

[0011] Accordingly, it is another object of this invention to provide antigens (cancer-associated polypeptides) associated with a variety of cancers as targets for diagnostic and/or therapeutic antibodies. These antigens are also useful for drug discovery (e.g., small molecules) and for further characterization of cellular regulation, growth, and differentiation.

### SUMMARY OF THE INVENTION

[0012] In accordance with the objects outlined above, the present invention provides methods for screening for compositions that modulate cancer, especially lymphoma and leukemia. The present invention also provides methods for screening for compositions which modulate carcinomas, especially mammary adenocarcinomas. Also provided herein are methods of inhibiting proliferation of a cell, preferably a lymphoma cell or a breast cancer cell. Methods of treatment of cancer, including diagnosis, are also provided herein.

[0013] In one aspect, a method of screening drug candidates comprises providing a cell that expresses a cancer-associated (CA) gene or fragments thereof. Preferred embodiments of CA genes are genes that are differentially expressed in cancer cells, preferably lymphatic, breast, prostate or epithelial cells, compared to other cells. Preferred embodiments of CA genes used in the methods herein include, but are not limited to the nucleic acids selected from Tables 1-28 (human genomic sequences of SEQ ID NOS: 4, 10, 16, 22, 28, 34, 40, 46, 52, 58, 64, 70, 76, 82, 88, 94, 100, 106, 112, 118, 124, 130, 136, 142, 148, 154, 160, and 166, and sequences of SEQ ID NOS: 5, 11, 17, 23, 29, 35, 41, 47, 53, 59, 65, 71, 77, 83, 89, 95, 101, 107, 113, 119, 125, 131, 137, 143, 149, 155, 161, 167, 169, 171, 173, 175, 177, 179, 181, 183, and 185 corresponding to the human mRNAs generated therefrom). The methods further include adding a drug candidate to the cell and determining the effect of the drug candidate on the expression of the CA gene.

[0014] In one embodiment, the method of screening drug candidates includes comparing the level of expression in the absence of the drug candidate to the level of expression in the presence of the drug candidate.

[0015] Also provided herein is a method of screening for a bioactive agent capable of binding to a CA protein (CAP), the method comprising combining the CAP and a candidate bioactive agent, and determining the binding of the candidate agent to the CAP.

[0016] Further provided herein is a method for screening for a bioactive agent capable of modulating the activity of a CAP. In one embodiment, the method comprises combining the CAP and a candidate bioactive agent, and determining the effect of the candidate agent on the bioactivity of the CAP.

[0017] Also provided is a method of evaluating the effect of a candidate cancer drug comprising administering the drug to a patient and removing a cell sample from the patient. The expression profile of the cell is then determined. This method may further comprise comparing the expression profile of the patient to an expression profile of a healthy individual.

[0018] In a further aspect, a method for inhibiting the activity of a CA protein is provided. In one embodiment, the method comprises administering to a patient an inhibitor of a CA protein preferably selected from the group consisting of the sequences outlined in Tables 1-28 (SEQ ID NOS: 6, 12, 18, 24, 30, 36, 42, 48, 54, 60, 66, 72, 78, 84, 90, 96, 102, 108, 114, 120, 126, 132, 138, 144, 150, 156, 162, 168, 170, 172, 174, 176, 178, 180, 182, 184, and 186) or their complements.

[0019] A method of neutralizing the effect of a CA protein, preferably a protein encoded by a nucleic acid selected from the group of sequences outlined in Tables 1-28 (human genomic sequences of SEQ ID NOS: 4, 10, 16, 22, 28, 34, 40, 46, 52, 58, 64, 70, 76, 82, 88, 94, 100, 106, 112, 118, 124, 130, 136, 142, 148, 154, 160, and 166, and sequences of SEQ ID NOS: 5, 11, 17, 23, 29, 35, 41, 47, 53, 59, 65, 71, 77, 83, 89, 95, 101, 107, 113, 119, 125, 131, 137, 143, 149, 155, 161, 167, 169, 171, 173, 175, 177, 179, 181, 183, and 185 corresponding to the human mRNAs generated therefrom), is also provided. Preferably, the method comprises contacting an agent specific for said protein with said protein in an amount sufficient to effect neutralization.

[0020] Moreover, provided herein is a biochip comprising a nucleic acid segment which encodes a CA protein, preferably selected from the sequences outlined in Tables 1-28 (SEQ ID NOS: 5, 11, 17, 23, 29, 35, 41, 47, 53, 59, 65, 71, 77, 83, 89, 95, 101, 107, 113, 119, 125, 131, 137, 143, 149, 155, 161, 167, 169, 171, 173, 175, 177, 179, 181, 183, and 185).

[0021] Also provided herein is a method for diagnosing or determining the propensity to cancers, especially lymphoma or leukemia or carcinoma by sequencing at least one carcinoma or lymphoma gene of an individual. In yet another aspect of the invention, a method is provided for determining cancer including lymphoma and leukemia gene copy numbers in an individual.

[0022] The invention provides an isolated nucleic acid comprising at least 10, 12, 15, 20 or 30 contiguous nucleotides of a sequence selected from the group consisting of the polynucleotide sequences SEQ ID NOS: 5, 11, 17, 23, 29, 35, 41, 47, 53, 59, 65, 71, 77, 83, 89, 95, 101, 107, 113, 119, 125, 131, 137, 143, 149, 155, 161, 167, 169, 171, 173, 175, 177, 179, 181, 183, and 185 shown in Tables 1-28, or its complement, or an expression vector comprising the isolated nucleic acids and host cells comprising them.

[0023] In some embodiments, the polynucleotide, or its complement or a fragment thereof, further comprises a detectable label, is attached to a solid support, is prepared at least in part by chemical synthesis, is an antisense fragment, is single stranded, is double stranded or comprises a microarray.

[0024] The invention provides an isolated polypeptide, encoded within an open reading frame of a CA sequence selected from the group consisting of the polynucleotide sequences of SEQ ID NOS: 4, 10, 16, 22, 28, 34, 40, 46, 52, 58, 64, 70, 76, 82, 88, 94, 100, 106, 112, 118, 124, 130, 136, 142, 148, 154, 160, and 166 shown in Tables 1-28, or its complement. The invention provides an isolated polypeptide, wherein said polypeptide comprises the amino acid sequence encoded by a polynucleotide selected from the group consisting of SEQ ID NOS: 5, 11, 17, 23, 29, 35, 41, 47, 53, 59, 65, 71, 77, 83, 89, 95, 101, 107, 113, 119, 125, 131, 137, 143, 149, 155, 161, 167, 169, 171, 173, 175, 177, 179, 181, 183, and 185 shown in Tables 1-28. The invention provides an isolated polypeptide, wherein said polypeptide comprises the amino acid sequence encoded by a polypeptide selected from the group consisting of SEQ ID NOS: 6, 12, 18, 24, 30, 36, 42, 48, 54, 60, 66, 72, 78, 84, 90, 96, 102, 108, 114, 120, 126, 132, 138, 144, 150, 156, 162, 168, 170, 172, 174, 176, 178, 180, 182, 184, and 186 shown in Tables 1-28.

[0025] The invention further provides an isolated polypeptide, comprising the amino acid sequence of an epitope of the amino acid sequence of a CA polypeptide selected from the group consisting of SEQ ID NOS: 6, 12, 18, 24, 30, 36, 42, 48, 54, 60, 66, 72, 78, 84, 90, 96, 102, 108, 114, 120, 126, 132, 138, 144, 150, 156, 162, 168, 170, 172, 174, 176, 178, 180, 182, 184, and 186 shown in Tables 1-28, wherein the polypeptide or fragment thereof may be attached to a solid support. In one embodiment the invention provides an isolated antibody (monoclonal or polyclonal) or antigen binding fragment thereof, that binds to such a polypeptide. The isolated antibody or antigen binding fragment thereof may be attached to a solid support, or further comprises a detectable label.

[0026] In one embodiment, the invention provides a kit for diagnosing the presence of cancer in a test sample, said kit comprising at least one polynucleotide that selectively hybridizes to a CA polynucleotide sequence shown in Tables 1-28, or its complement. In another embodiment. the invention provides an electronic library comprising a CA polynucleotide, a CA polypeptide, or fragment thereof, shown in Tables 1-28.

[0027] In one embodiment, the invention provides a method of screening for anticancer activity comprising: (a) providing a cell that expresses a cancer associated (CA) gene encoded by a nucleic acid sequence selected from the group consisting of the CA sequences shown in Tables 1-28, or fragment thereof; (b) contacting a tissue sample derived from a cancer cell with an anticancer drug candidate; (c) monitoring an effect of the anticancer drug candidate on an expression of the CA polynucleotide in the tissue sample, and optionally (d) comparing the level of expression in the absence of said drug candidate to the level of expression in the presence of the drug candidate. The drug candidate may be an inhibitor of transcription, a G-protein coupled receptor antagonist, a growth factor antagonist, a serine-threonine kinase antagonist, a tyrosine kinase antagonist.

[0028] In one embodiment, the invention provides a method for detecting cancer associated with expression of a polypeptide in a test cell sample, comprising the steps of: (i) detecting a level of expression of at least one polypeptide selected from the group consisting of SEQ ID NOS: 6, 12, 18, 24, 30, 36, 42, 48, 54, 60, 66, 72, 78, 84, 90, 96, 102, 108, 114, 120, 126, 132, 138, 144, 150, 156, 162, 168, 170, 172, 174, 176, 178, 180, 182, 184, and 186 shown in Tables 1-28, or a fragment thereof, and (ii) comparing the level of expression of the polypeptide in the test sample with a level of expression of polypeptide in a normal cell sample, wherein an altered level of expression of the polypeptide in the test cell sample relative to the level of polypeptide expression in the normal cell sample is indicative of the presence of cancer in the test cell sample.

[0029] In another embodiment, the invention provides a method for detecting cancer associated with expression of a polypeptide in a test cell sample, comprising the steps of: (i) detecting a level of activity of at least one polypeptide selected from the group consisting of SEQ ID NOS: 6, 12, 18, 24, 30, 36, 42, 48, 54, 60, 66, 72, 78, 84, 90, 96, 102, 108, 114, 120, 126, 132, 138, 144, 150, 156, 162, 168, 170, 172, 174, 176, 178, 180, 182, 184, and 186 shown in Tables 1-28, or a fragment thereof, wherein said activity corresponds to at least one activity for the polypeptide listed in Table 29; and (ii) comparing the level of activity of the polypeptide in the test sample with a level of activity of polypeptide in a normal cell sample, wherein an altered level of activity of the polypeptide in the test cell sample relative to the level of polypeptide activity in the normal cell sample is indicative of the presence of cancer in the test cell sample.

[0030] In another embodiment, the invention provides a method for detecting cancer associated with the presence of an antibody in a test serum sample, comprising the steps of: (i) detecting a level of an antibody against an antigenic polypeptide selected from the group consisting of SEQ ID NOS: 6, 12, 18, 24, 30, 36, 42, 48, 54, 60, 66, 72, 78, 84, 90, 96, 102, 108, 114, 120, 126, 132, 138, 144, 150, 156, 162, 168, 170, 172, 174, 176, 178, 180, 182, 184, and 186 shown in Tables 1-28, or antigenic fragment thereof; and (ii) comparing said level of said antibody in the test sample with a level of said antibody in the control sample, wherein an altered level of antibody in said test sample relative to the level of antibody in the control sample is indicative of the presence of cancer in the test serum sample.

[0031] The invention provides a method for screening for a bioactive agent capable of modulating the activity of a CA protein (CAP), wherein said CAP is encoded by a nucleic acid comprising a nucleic acid sequence selected from the group consisting of the polynucleotide sequences SEQ ID NOS: 5, 11, 17, 23, 29, 35, 41, 47, 53, 59, 65, 71, 77, 83, 89, 95, 101, 107, 113, 119, 125, 131, 137, 143, 149, 155, 161, 167, 169, 171, 173, 175, 177, 179, 181, 183, and 185 shown in Tables 1-28, said method comprising: a) combining said CAP and a candidate bioactive agent; and b) determining the effect of the candidate agent on the bioactivity of said CAP. According to the method the bioactive agent: affects the expression of the CA protein (CAP); affects the activity of the CA protein (CAP), wherein such activity is selected from the activities listed in Table 29; is a modulator of ion transport and further wherein the nucleic acid sequence is selected from the group consisting of SEQ ID NOS: 41, 83, 113, 181, 183 and 119 shown in Tables 1-28; is a modulator of amino acid transport and further wherein the nucleic acid sequence is selected from the group consisting of SEQ ID NOS: 41, 53, 59, 175, 177, and 119; is a stimulator of apoptosis and further wherein the nucleic acid sequence is selected from the group consisting of SEQ ID NOS: 149, 155 and 161; is an inhibitor of cell adhesion and further wherein the nucleic acid sequence is selected from the group consisting of SEQ ID NOS: 17, 77, 95, 179, 101, and 125; is a modulator of signalling and further wherein the nucleic acid sequence is selected from the group consisting of SEQ ID NOS: 35, 47, 107, 143, 149, 167 and 185; and/or is a tyrosine kinase antagonist and further wherein the nucleic acid sequence is selected from the group consisting of SEQ ID NOS: 89, and 137.

[0032] In one embodiment, the invention provides a method for diagnosing cancer comprising: a) determining the expression of one or more genes comprising a nucleic acid sequence selected from the group consisting of the human genomic and mRNA sequences outlined in Tables 1-28, in a first tissue type of a first individual; and b) comparing said expression of said gene(s) from a second normal tissue type from said first individual or a second unaffected individual; wherein a difference in said expression indicates that the first individual has cancer.

[0033] In another embodiment the invention provides a method for treating cancers comprising administering to a patient a bioactive agent modulating the activity of a CA protein (CAP), wherein said CAP is encoded by a nucleic acid comprising a nucleic acid sequence selected from the group consisting of the human nucleic acid sequences in Tables 1-28 and further wherein the bioactive agent: binds to the CA protein; is a modulator of ion transport and further wherein the CAP sequence is selected from the group consisting of SEQ ID NOS: 42, 84, 114, 182, 184 and 120; is a G-protein coupled receptor antagonist and further wherein the CAP sequence is SEQ ID NO: 12; is a modulator of amino acid transport and further wherein the CAP sequence is selected from the group consisting of SEQ ID NOS: 42, 54, 60, 176, 178, and 120; is a stimulator of apoptosis and further wherein the CAP sequence is selected from the group consisting of SEQ ID NOS: 150, 156 and 162; and/or is an inhibitor of cell adhesion and further wherein the CAP sequence is selected from the group consisting of SEQ ID NOS: 18, 78, 96, 180, 102, and 126, as shown in Tables 1-28.

[0034] The invention provides monoclonal antibodies that preferentially binds to a CA protein (CAP) that is expressed on a cell surface, wherein the CA protein selected from the group consisting of SEQ ID NOS: 6, 12, 18, 24, 30, 36, 42, 48, 54, 60, 66, 72, 78, 84, 90, 96, 102, 108, 114, 120, 126, 132, 138, 144, 150, 156, 162, 168, 170, 172, 174, 176, 178, 180, 182, 184, and 186; preferably to the extracellular domain of the CA protein; preferably to a CA protein differentially expressed on a cancer cell surface relative to a normal cell surface or preferably to at least one human cancer cell line; preferably linked to a therapeutic agent; or preferably humanized. Kits and pharmaceutical compositions for detecting a presence or an absence of cancer cells in an individual, and comprising such antibodies are also provided.

[0035] The invention also provides a method for detecting a presence or an absence of cancer cells in an individual, the method comprising: contacting cells from the individual with the antibody according to the invention; and detecting a complex of a CAP from the cancer cells and the antibody, wherein detection of the complex correlates with the presence of cancer cells in the individual. In one embodiment the invention provides a method for inhibiting growth of cancer cells in an individual, the method comprising: administering to the individual an effective amount of a pharmaceutical composition according to the invention. In another embodiment the invention provides a method for delivering a therapeutic agent to cancer cells in an individual, the method comprising: administering to the individual an effective amount of a pharmaceutical composition according to according to the invention.

[0036] Novel sequences associated with cancer are also provided herein. Other aspects of the invention will become apparent to the skilled artisan by the following description of the invention.

### BRIEF DESCRIPTION OF THE FIGURES

[0037] FIG. 1 depicts PCR amplification of host-provirus junction fragments.

[0038] FIG. 2 shows an example of average threshold cycle (C_{T}) values for a housekeeper gene and target gene.

[0039] FIG. 3 shows an example of the calculated difference (ΔΔC_{T}) between the C_{T} values of target and housekeeper genes (ΔC_{T}) for various samples.

[0040] FIG. 4 shows the ΔΔC_{T} and comparative expression level for each sample from FIG. 3.

### DETAILED DESCRIPTION OF PREFERRED EMBODIMENTS

[0041] The present invention is directed to a number of sequences associated with cancers, especially lymphoma, breast cancer or prostate cancer. The relatively tight linkage between clonally-integrated proviruses and protooncogenes forms “provirus tagging”, in which slow-transforming retroviruses that act by an insertion mutation mechanism are used to isolate protooncogenes. In some models, uninfected animals have low cancer rates, and infected animals have high cancer rates. It is known that many of the retroviruses involved do not carry transduced host protooncogenes or pathogenic trans-acting viral genes, and thus the cancer incidence must therefore be a direct consequence of proviral integration effects into host protooncogenes. Since proviral integration is random, rare integrants will “activate” host protooncogenes that provide a selective growth advantage, and these rare events result in new proviruses at clonal stoichiometries in tumors. In contrast to mutations caused by chemicals, radiation, or spontaneous errors, protooncogene insertion mutations can be easily located by virtue of the fact that a convenient-sized genetic marker of known sequence (the provirus) is present at the site of mutation. Host sequences that flank clonally integrated proviruses can be cloned using a variety of strategies. Once these sequences are in hand, the tagged protooncogenes can be subsequently identified. The presence of provirus at the same locus in two or more independent tumors is prima facie evidence that a protooncogene is present at or very near the provirus integration sites. This is because the genome is too large for random integrations to result in observable clustering. Any clustering that is detected is unequivocal evidence for biological selection (i.e. the tumor phenotype). Moreover, the pattern of proviral integrants (including orientations) provides compelling positional information that makes localization of the target gene at each cluster relatively simple. The three mammalian retroviruses that are known to cause cancer by an insertion mutation mechanism are FeLV (leukemia/lymphoma in cats), MLV (leukemia/lymphoma in mice and rats), and MMTV (mammary cancer in mice).

[0042] Thus, the use of oncogenic retroviruses, whose sequences insert into the genome of the host organism resulting in cancer, allows the identification of host sequences involved in cancer. These sequences may then be used in a number of different ways, including diagnosis, prognosis, screening for modulators (including both agonists and antagonists), antibody generation (for immunotherapy and imaging), etc. However, as will be appreciated by those in the art, oncogenes that are identified in one type of cancer such as lymphoma or leukemia have a strong likelihood of being involved in other types of cancers as well. Thus, while the sequences outlined herein are initially identified as correlated with lymphoma, they can also be found in other types of cancers as well, outlined below.

[0043] Definitions

[0044] Accordingly, the present invention provides nucleic acid and protein sequences that are associated with cancer, herein termed “cancer associated” or “CA” sequences. In one embodiment, the present invention provides nucleic acid and protein sequences that are associated with cancers that originate in lymphatic tissue, herein termed “lymphoma associated,” “leukemia associated” or “LA” sequences. In another embodiment, the present invention provides nucleic acid and protein sequences that are associated with carcinomas which originate in breast tissue, herein termed “breast cancer associated” or “BC” sequences.

[0045] Suitable cancers that can be diagnosed or screened for using the methods of the present invention include cancers classified by site or by histological type. Cancers classified by site include cancer of the oral cavity and pharynx (lip, tongue, salivary gland, floor of mouth, gum and other mouth, nasopharynx, tonsil, oropharynx, hypopharynx, other oral/pharynx); cancers of the digestive system (esophagus; stomach; small intestine; colon and rectum; anus, anal canal, and anorectum; liver; intrahepatic bile duct; gallbladder; other biliary; pancreas; retroperitoneum; peritoneum, omentum, and mesentery; other digestive); cancers of the respiratory system (nasal cavity, middle ear, and sinuses; larynx; lung and bronchus; pleura; trachea, mediastinum, and other respiratory); cancers of the mesothelioma; bones and joints; and soft tissue, including heart; skin cancers, including melanomas and other non-epithelial skin cancers; Kaposi's sarcoma and breast cancer; cancer of the female genital system (cervix uteri; corpus uteri; uterus, nos; ovary; vagina; vulva; and other female genital); cancers of the male genital system (prostate gland; testis; penis; and other male genital); cancers of the urinary system (urinary bladder; kidney and renal pelvis; ureter; and other urinary); cancers of the eye and orbit; cancers of the brain and nervous system (brain; and other nervous system); cancers of the endocrine system (thyroid gland and other endocrine, including thymus); lymphomas (Hodgkin's disease and non-Hodgkin's lymphoma), multiple myeloma, and leukemias (lymphocytic leukemia; myeloid leukemia; monocytic leukemia; and other leukemias).

[0046] Other cancers, classified by histological type, that may be associated with the sequences of the invention include, but are not limited to, Neoplasm, malignant; Carcinoma, NOS; Carcinoma, undifferentiated, NOS; Giant and spindle cell carcinoma; Small cell carcinoma, NOS; Papillary carcinoma, NOS; Squamous cell carcinoma, NOS; Lymphoepithelial carcinoma; Basal cell carcinoma, NOS; Pilomatrix carcinoma; Transitional cell carcinoma, NOS; Papillary transitional cell carcinoma; Adenocarcinoma, NOS; Gastrinoma, malignant; Cholangiocarcinoma; Hepatocellular carcinoma, NOS; Combined hepatocellular carcinoma and cholangiocarcinoma; Trabecular adenocarcinoma; Adenoid cystic carcinoma; Adenocarcinoma in adenomatous polyp; Adenocarcinoma, familial polyposis coli; Solid carcinoma, NOS; Carcinoid tumor, malignant; Bronchiolo-alveolar adenocarcinoma; Papillary adenocarcinoma, NOS; Chromophobe carcinoma; Acidophil carcinoma; Oxyphilic adenocarcinoma; Basophil carcinoma; Clear cell adenocarcinoma, NOS; Granular cell carcinoma; Follicular adenocarcinoma, NOS; Papillary and follicular adenocarcinoma; Nonencapsulating sclerosing carcinoma; Adrenal cortical carcinoma; Endometroid carcinoma; Skin appendage carcinoma; Apocrine adenocarcinoma; Sebaceous adenocarcinoma; Ceruminous adenocarcinoma; Mucoepidermoid carcinoma; Cystadenocarcinoma, NOS; Papillary cystadenocarcinoma, NOS; Papillary serous cystadenocarcinoma; Mucinous cystadenocarcinoma, NOS; Mucinous adenocarcinoma; Signet ring cell carcinoma; Infiltrating duct carcinoma; Medullary carcinoma, NOS; Lobular carcinoma; Inflammatory carcinoma; Paget's disease, mammary; Acinar cell carcinoma; Adenosquamous carcinoma; Adenocarcinoma w/squamous metaplasia; Thymoma, malignant; Ovarian stromal tumor, malignant; Thecoma, malignant; Granulosa cell tumor, malignant; Androblastoma, malignant; Sertoli cell carcinoma; Leydig cell tumor, malignant; Lipid cell tumor, malignant; Paraganglioma, malignant; Extra-mammary paraganglioma, malignant; Pheochromocytoma; Glomangiosarcoma; Malignant melanoma, NOS; Amelanotic melanoma; Superficial spreading melanoma; Malig melanoma in giant pigmented nevus; Epithelioid cell melanoma; Blue nevus, malignant; Sarcoma, NOS; Fibrosarcoma, NOS; Fibrous histiocytoma, malignant; Myxosarcoma; Liposarcoma, NOS; Leiomyosarcoma, NOS; Rhabdomyosarcoma, NOS; Embryonal rhabdomyosarcoma; Alveolar rhabdomyosarcoma; Stromal sarcoma, NOS; Mixed tumor, malignant, NOS; Mullerian mixed tumor; Nephroblastoma; Hepatoblastoma; Carcinosarcoma, NOS; Mesenchymoma, malignant; Brenner tumor, malignant; Phyllodes tumor, malignant; Synovial sarcoma, NOS; Mesothelioma, malignant; Dysgerminoma; Embryonal carcinoma, NOS; Teratoma, malignant, NOS; Struma ovarii, malignant; Choriocarcinoma; Mesonephroma, malignant; Hemangiosarcoma; Hemangioendothelioma, malignant; Kaposi's sarcoma; Hemangiopericytoma, malignant; Lymphangiosarcoma; Osteosarcoma, NOS; Juxtacortical osteosarcoma; Chondrosarcoma, NOS; Chondroblastoma, malignant; Mesenchymal chondrosarcoma; Giant cell tumor of bone; Ewing's sarcoma; Odontogenic tumor, malignant; Ameloblastic odontosarcoma; Ameloblastoma, malignant; Ameloblastic fibrosarcoma; Pinealoma, malignant; Chordoma; Glioma, malignant; Ependymoma, NOS; Astrocytoma, NOS; Protoplasmic astrocytoma; Fibrillary astrocytoma; Astroblastoma; Glioblastoma, NOS; Oligodendroglioma, NOS; Oligodendroblastoma; Primitive neuroectodermal; Cerebellar sarcoma, NOS; Ganglioneuroblastoma; Neuroblastoma, NOS; Retinoblastoma, NOS; Olfactory neurogenic tumor; Meningioma, malignant; Neurofibrosarcoma; Neurilemmoma, malignant; Granular cell tumor, malignant; Malignant lymphoma, NOS; Hodgkin's disease, NOS; Hodgkin's; paragranuloma, NOS; Malignant lymphoma, small lymphocytic; Malignant lymphoma, large cell, diffuse; Malignant lymphoma, follicular, NOS; Mycosis fungoides; Other specified non-Hodgkin's lymphomas; Malignant histiocytosis; Multiple myeloma; Mast cell sarcoma; Immunoproliferative small intestinal disease; Leukemia, NOS; Lymphoid leukemia, NOS; Plasma cell leukemia; Erythroleukemia; Lymphosarcoma cell leukemia; Myeloid leukemia, NOS; Basophilic leukemia; Eosinophilic leukemia; Monocytic leukemia, NOS; Mast cell leukemia; Megakaryoblastic leukemia; Myeloid sarcoma; and Hairy cell leukemia.

[0047] In addition, the CA genes may be involved in other diseases such as, but not limited to, diseases associated with aging or neurodegeneration.

[0048] “Association” in this context means that the nucleotide or protein sequences are either differentially expressed, activated, inactivated or altered in cancers as compared to normal tissue. As outlined below, CA sequences include those that are up-regulated (i.e. expressed at a higher level), as well as those that are down-regulated (i.e. expressed at a lower level), in cancers. CA sequences also include sequences that have been altered (i.e., truncated sequences or sequences with substitutions, deletions or insertions, including point mutations) and show either the same expression profile or an altered profile. In a preferred embodiment, the CA sequences are from humans; however, as will be appreciated by those in the art, CA sequences from other organisms may be useful in animal models of disease and drug evaluation; thus, other CA sequences are provided, from vertebrates, including mammals, including rodents (rats, mice, hamsters, guinea pigs, etc.), primates, and farm animals (including sheep, goats, pigs, cows, horses, etc). In some cases, prokaryotic CA sequences may be useful. CA sequences from other organisms may be obtained using the techniques outlined below.

[0049] CA sequences include both nucleic acid and amino acid sequences. In a preferred embodiment, the CA sequences are recombinant nucleic acids. By the term “recombinant nucleic acid” herein is meant nucleic acid, originally formed in vitro, in general, by the manipulation of nucleic acid by polymerases and endonucleases, in a form not normally found in nature. Thus a recombinant nucleic acid is also an isolated nucleic acid, in a linear form, or cloned in a vector formed in vitro by ligating DNA molecules that are not normally joined, are both considered recombinant for the purposes of this invention. It is understood that once a recombinant nucleic acid is made and reintroduced into a host cell or organism, it will replicate using the in vivo cellular machinery of the host cell rather than in vitro manipulations; however, such nucleic acids, once produced recombinantly, although subsequently replicated in vivo, are still considered recombinant or isolated for the purposes of the invention. As used herein a “polynucleotide” or “nucleic acid” is a polymeric form of nucleotides of any length, either ribonucleotides or deoxyribonucleotides. This term refers only to the primary structure of the molecule. Thus, this term includes double- and single-stranded DNA and RNA. It also includes known types of modifications, for example, labels which are known in the art, methylation, “caps”, substitution of one or more of the naturally occurring nucleotides with an analog, internucleotide modifications such as, for example, those with uncharged linkages (e.g., phosphorothioates, phosphorodithioates, etc.), those containing pendant moieties, such as, for example proteins (including e.g., nucleases, toxins, antibodies, signal peptides, poly-L-lysine, etc.),those with intercalators (e.g., acridine, psoralen, etc.), those containing chelators (e.g., metals, radioactive metals, etc.), those containing alkylators, those with modified linkages (e.g., alpha anomeric nucleic acids, etc.), as well as unmodified forms of the polynucleotide.

[0050] As used herein, a polynucleotide “derived from” a designated sequence refers to a polynucleotide sequence which is comprised of a sequence of approximately at least about 6 nucleotides, preferably at least about 8 nucleotides, more preferably at least about 10-12 nucleotides, and even more preferably at least about 15-20 nucleotides corresponding to a region of the designated nucleotide sequence. “Corresponding” means homologous to or complementary to the designated sequence. Preferably, the sequence of the region from which the polynucleotide is derived is homologous to or complementary to a sequence that is unique to a CA gene.

[0051] Similarly, a “recombinant protein” is a protein made using recombinant techniques, i.e. through the expression of a recombinant nucleic acid as depicted above. A recombinant protein is distinguished from naturally occurring protein by at least one or more characteristics. For example, the protein may be isolated or purified away from some or all of the proteins and compounds with which it is normally associated in its wild type host, and thus may be substantially pure. For example, an isolated protein is unaccompanied by at least some of the material with which it is normally associated in its natural state, preferably constituting at least about 0.5%, more preferably at least about 5% by weight of the total protein in a given sample. A substantially pure protein comprises about 50-75% by weight of the total protein, with about 80% being preferred, and about 90% being particularly preferred. The definition includes the production of a CA protein from one organism in a different organism or host cell. Alternatively, the protein may be made at a significantly higher concentration than is normally seen, through the use of an inducible promoter or high expression promoter, such that the protein is made at increased concentration levels. Alternatively, the protein may be in a form not normally found in nature, as in the addition of an epitope tag or amino acid substitutions, insertions and deletions, as discussed below.

[0052] In a preferred embodiment, the CA sequences are nucleic acids. As will be appreciated by those in the art and is more fully outlined below, CA sequences are useful in a variety of applications, including diagnostic applications, which will detect naturally occurring nucleic acids, as well as screening applications; for example, biochips comprising nucleic acid probes to the CA sequences can be generated. In the broadest sense, use of “nucleic acid,” “polynucleotide” or “oligonucleotide” or equivalents herein means at least two nucleotides covalently linked together. In some embodiments, an oligonucleotide is an oligomer of 6, 8, 10, 12, 20, 30 or up to 100 nucleotides. A “polynucleotide” or “oligonucleotide” may comprise DNA, RNA, PNA or a polymer of nucleotides linked by phosphodiester and/or any alternate bonds.

[0053] A nucleic acid of the present invention generally contains phosphodiester bonds, although in some cases, as outlined below (for example, in antisense applications or when a nucleic acid is a candidate drug agent), nucleic acid analogs may have alternate backbones, comprising, for example, phosphoramidate (Beaucage et al., Tetrahedron 49(10):1925 (1993) and references therein; Letsinger, J. Org. Chem. 35:3800 (1970); Sprinzl et al., Eur. J. Biochem. 81:579 (1977); Letsinger et al., Nucl. Acids Res. 14:3487 (1986); Sawai et al, Chem. Lett. 805 (1984), Letsinger et al., J. Am. Chem. Soc. 110:4470 (1988); and Pauwels et al., Chemica Scripta 26:141 91986)), phosphorothioate (Mag et al., Nucleic Acids Res. 19:1437 (1991); and U.S. Pat. No. 5,644,048), phosphorodithioate (Briu et al., J. Am. Chem. Soc. 111:2321 (1989), O-methylphosphoroamidite linkages (see Eckstein, Oligonucleotides and Analogues: A Practical Approach, Oxford University Press), and peptide nucleic acid backbones and linkages (see Egholm, J. Am. Chem. Soc. 114:1895 (1992); Meier et al., Chem. Int. Ed. Engl. 31:1008 (1992); Nielsen, Nature, 365:566 (1993); Carlsson et al., Nature 380:207 (1996), all of which are incorporated by reference). Other analog nucleic acids include those with positive backbones (Denpcy et al., Proc. Natl. Acad. Sci. USA 92:6097 (1995); non-ionic backbones (U.S. Pat. Nos. 5,386,023, 5,637,684, 5,602,240, 5,216,141 and 4,469,863; Kiedrowshi et al., Angew. Chem. Intl. Ed. English 30:423 (1991); Letsinger et al., J. Am. Chem. Soc. 110:4470 (1988); Letsinger et al., Nucleoside & Nucleotide 13:1597 (1994); Chapters 2 and 3, ASC Symposium Series 580, “Carbohydrate Modifications in Antisense Research”, Ed. Y. S. Sanghui and P. Dan Cook; Mesmaeker et al., Bioorganic & Medicinal Chem. Lett. 4:395 (1994); Jeffs et al., J. Biomolecular NMR 34:17 (1994); Tetrahedron Lett. 37:743 (1996)) and non-ribose backbones, including those described in U.S. Pat. Nos. 5,235,033 and 5,034,506, and Chapters 6 and 7, ASC Symposium Series 580, “Carbohydrate Modifications in Antisense Research”, Ed. Y. S. Sanghui and P. Dan Cook. Nucleic acids containing one or more carbocyclic sugars are also included within one definition of nucleic acids (see Jenkins et al., Chem. Soc. Rev. (1995) pp169-176). Several nucleic acid analogs are described in Rawls, C & E News Jun. 2, 1997 page 35. All of these references are hereby expressly incorporated by reference. These modifications of the ribose-phosphate backbone may be done for a variety of reasons, for example to increase the stability and half-life of such molecules in physiological environments for use in anti-sense applications or as probes on a biochip.

[0054] As will be appreciated by those in the art, all of these nucleic acid analogs may find use in the present invention. In addition, mixtures of naturally occurring nucleic acids and analogs can be made; alternatively, mixtures of different nucleic acid analogs, and mixtures of naturally occurring nucleic acids and analogs may be made.

[0055] The nucleic acids may be single stranded or double stranded, as specified, or contain portions of both double stranded or single stranded sequence. As will be appreciated by those in the art, the depiction of a single strand “Watson” also defines the sequence of the other strand “Crick”; thus the sequences described herein also includes the complement of the sequence. The nucleic acid may be DNA, both genomic and cDNA, RNA, or a hybrid, where the nucleic acid contains any combination of deoxyribo- and ribo-nucleotides, and any combination of bases, including uracil, adenine, thymine, cytosine, guanine, inosine, xanthine, hypoxanthine, isocytosine, isoguanine, etc. As used herein, the term “nucleoside” includes nucleotides and nucleoside and nucleotide analogs, and modified nucleosides such as amino modified nucleosides. In addition, “nucleoside” includes non-naturally occurring analog structures. Thus for example the individual units of a peptide nucleic acid, each containing a base, are referred to herein as a nucleoside.

[0056] As used herein, the term “tag,” “sequence tag” or “primer tag sequence” refers to an oligonucleotide with specific nucleic acid sequence that serves to identify a batch of polynucleotides bearing such tags therein. Polynucleotides from the same biological source are covalently tagged with a specific sequence tag so that in subsequent analysis the polynucleotide can be identified according to its source of origin. The sequence tags also serve as primers for nucleic acid amplification reactions.

[0057] A “microarray” is a linear or two-dimensional array of preferably discrete regions, each having a defined area, formed on the surface of a solid support. The density of the discrete regions on a microarray is determined by the total numbers of target polynucleotides to be detected on the surface of a single solid phase support, preferably at least about 50/cm², more preferably at least about 100/cm², even more preferably at least about 500/cm², and still more preferably at least about 1,000/cm². As used herein, a DNA microarray is an array of oligonucleotide primers placed on a chip or other surfaces used to amplify or clone target polynucleotides. Since the position of each particular group of primers in the array is known, the identities of the target polynucleotides can be determined based on their binding to a particular position in the microarray.

[0058] A “linker” is a synthetic oligodeoxyribonucleotide that contains a restriction site. A linker may be blunt end-ligated onto the ends of DNA fragments to create restriction sites that can be used in the subsequent cloning of the fragment into a vector molecule.

[0059] The term “label” refers to a composition capable of producing a detectable signal indicative of the presence of the target polynucleotide in an assay sample. Suitable labels include radioisotopes, nucleotide chromophores, enzymes, substrates, fluorescent molecules, chemiluminescent moieties, magnetic particles, bioluminescent moieties, and the like. As such, a label is any composition detectable by spectroscopic, photochemical, biochemical, immunochemical, electrical, optical, chemical, or any other appropriate means. The term “label” is used to refer to any chemical group or moiety having a detectable physical property or any compound capable of causing a chemical group or moiety to exhibit a detectable physical property, such as an enzyme that catalyzes conversion of a substrate into a detectable product. The term “label” also encompasses compounds that inhibit the expression of a particular physical property. The label may also be a compound that is a member of a binding pair, the other member of which bears a detectable physical property.

[0060] The term “support” refers to conventional supports such as beads, particles, dipsticks, fibers, filters, membranes, and silane or silicate supports such as glass slides.

[0061] The term “amplify” is used in the broad sense to mean creating an amplification product which may include, for example, additional target molecules, or target-like molecules or molecules complementary to the target molecule, which molecules are created by virtue of the presence of the target molecule in the sample. In the situation where the target is a nucleic acid, an amplification product can be made enzymatically with DNA or RNA polymerases or reverse transcriptases.

[0062] As used herein, a “biological sample” refers to a sample of tissue or fluid isolated from an individual, including but not limited to, for example, blood, plasma, serum, spinal fluid, lymph fluid, skin, respiratory, intestinal and genitourinary tracts, tears, saliva, milk, cells (including but not limited to blood cells), tumors, organs, and also samples of in vitro cell culture constituents.

[0063] The term “biological sources” as used herein refers to the sources from which the target polynucleotides are derived. The source can be of any form of “sample” as described above, including but not limited to, cell, tissue or fluid. “Different biological sources” can refer to different cells/tissues/organs of the same individual, or cells/tissues/organs from different individuals of the same species, or cells/tissues/organs from different species.

[0064] Cancer-associated Sequences

[0065] The CA sequences of the invention were initially identified by infection of mice with a retrovirus such as murine leukemia virus (MLV) resulting in lymphoma. Retroviruses have a genome that is made out of RNA. After a retrovirus infects a host cell, a double stranded DNA copy of the retrovirus genome (a “provirus”) is inserted into the genomic DNA of the host cell. The integrated provirus may affect the expression of host genes at or near the site of integration—a phenomenon known as retroviral insertional mutagenesis. Possible changes in the expression of host cell genes include: (i) increased expression of genes near the site of integration resulting from the proximity of elements in the provirus that act as transcriptional promoters and enhancers, (ii) functional inactivation of a gene caused by the integration of a provirus into the gene itself thus preventing the synthesis of a functional gene product, or (iii) expression of a mutated protein that has a different activity to the normal protein. Typically such a protein would be prematurely truncated and lack a regulatory domain near the C terminus. Such a protein might be constitutively active, or act as a dominant negative inhibitor of the normal protein. For example, retrovirus enhancers, including that of SL3-3, are known to act on genes up to approximately 200 kilobases from the insertion site. Moreover, many of these sequences are also involved in other cancers and disease states. Sequences of mouse genes according to this invention, that are identified in this manner are shown as mDxx-yyy in Tables 1-28.

[0066] A CA sequence can be initially identified by substantial nucleic acid and/or amino acid sequence homology to the CA sequences outlined herein. Such homology can be based upon the overall nucleic acid or amino acid sequence, and is generally determined as outlined below, using either homology programs or hybridization conditions.

[0067] In one embodiment, CA sequences are those that are up-regulated in cancers; that is, the expression of these genes is higher in cancer tissue as compared to normal tissue of the same differentiation stage. “Up-regulation” as used herein means increased expression by about 50%, preferably about 100%, more preferably about 150% to about 200%, with up-regulation from 300% to 1000% being preferred.

[0068] In another embodiment, CA sequences are those that are down-regulated in cancers; that is, the expression of these genes is lower in cancer tissue as compared to normal tissue of the same differentiation stage. “Down-regulation” as used herein means decreased expression by about 50%, preferably about 100%, more preferably about 150% to about 200%, with down-regulation from 300% to 1000% to no expression being preferred.

[0069] In yet another embodiment, CA sequences are those that have altered sequences but show either the same or an altered expression profile as compared to normal lymphoid tissue of the same differentiation stage. “Altered CA sequences” as used herein also refers to sequences that are truncated, contain insertions or contain point mutations.

[0070] CA proteins of the present invention may be classified as secreted proteins, transmembrane proteins or intracellular proteins. In a preferred embodiment the CA protein is an intracellular protein. Intracellular proteins may be found in the cytoplasm and/or in the nucleus. Intracellular proteins are involved in all aspects of cellular function and replication (including, for example, signaling pathways); aberrant expression of such proteins results in unregulated or disregulated cellular processes. For example, many intracellular proteins have enzymatic activity such as protein kinase activity, protein phosphatase activity, protease activity, nucleotide cyclase activity, polymerase activity and the like. Intracellular proteins also serve as docking proteins that are involved in organizing complexes of proteins, or targeting proteins to various subcellular localizations, and are involved in maintaining the structural integrity of organelles.

[0071] An increasingly appreciated concept in characterizing intracellular proteins is the presence in the proteins of one or more motifs for which defined functions have been attributed. In addition to the highly conserved sequences found in the enzymatic domain of proteins, highly conserved sequences have been identified in proteins that are involved in protein-protein interaction. For example, Src-homology-2 (SH2) domains bind tyrosine-phosphorylated targets in a sequence dependent manner. PTB domains, which are distinct from SH2 domains, also bind tyrosine phosphorylated targets. SH3 domains bind to proline-rich targets. In addition, PH domains, tetratricopeptide repeats and WD domains to name only a few, have been shown to mediate protein-protein interactions. Some of these may also be involved in binding to phospholipids or other second messengers. As will be appreciated by one of ordinary skill in the art, these motifs can be identified on the basis of primary sequence; thus, an analysis of the sequence of proteins may provide insight into both the enzymatic potential of the molecule and/or molecules with which the protein may associate.

[0072] In a preferred embodiment, the CA sequences are transmembrane proteins. Transmembrane proteins are molecules that span the phospholipid bilayer of a cell. They may have an intracellular domain, an extracellular domain, or both. The intracellular domains of such proteins may have a number of functions including those already described for intracellular proteins. For example, the intracellular domain may have enzymatic activity and/or may serve as a binding site for additional proteins. Frequently the intracellular domain of transmembrane proteins serves both roles. For example certain receptor tyrosine kinases have both protein kinase activity and SH2 domains. In addition, autophosphorylation of tyrosines on the receptor molecule itself creates binding sites for additional SH2 domain containing proteins.

[0073] Transmembrane proteins may contain from one to many transmembrane domains. For example, receptor tyrosine kinases, certain cytokine receptors, receptor guanylyl cyclases and receptor serine/threonine protein kinases contain a single transmembrane domain. However, various other proteins including channels and adenylyl cyclases contain numerous transmembrane domains. Many important cell surface receptors are classified as “seven transmembrane domain” proteins, as they contain 7 membrane spanning regions. Important transmembrane protein receptors include, but are not limited to insulin receptor, insulin-like growth factor receptor, human growth hormone receptor, glucose transporters, transferrin receptor, epidermal growth factor receptor, low density lipoprotein receptor, leptin receptor, interleukin receptors, e.g. IL-1 receptor, IL-2 receptor, etc. CA proteins may be derived from genes that regulate apoptosis (IL-3, GM-CSF and Bcl-x) or are shown to have a role in the regulation of apoptosis.

[0074] Characteristics of transmembrane domains include approximately 20 consecutive hydrophobic amino acids that may be followed by charged amino acids. Therefore, upon analysis of the amino acid sequence of a particular protein, the localization and number of transmembrane domains within the protein may be predicted.

[0075] The extracellular domains of transmembrane proteins are diverse; however, conserved motifs are found repeatedly among various extracellular domains. Conserved structure and/or functions have been ascribed to different extracellular motifs. For example, cytokine receptors are characterized by a cluster of cysteines and a WSXWS (W=tryptophan, S=serine, X=any amino acid) motif. Immunoglobulin-like domains are highly conserved. Mucin-like domains may be involved in cell adhesion and leucine-rich repeats participate in protein-protein interactions.

[0076] Many extracellular domains are involved in binding to other molecules. In one aspect, extracellular domains are receptors. Factors that bind the receptor domain include circulating ligands, which may be peptides, proteins, or small molecules such as adenosine and the like. For example, growth factors such as EGF, FGF and PDGF are circulating growth factors that bind to their cognate receptors to initiate a variety of cellular responses. Other factors include cytokines, mitogenic factors, neurotrophic factors and the like. Extracellular domains also bind to cell-associated molecules. In this respect, they mediate cell-cell interactions. Cell-associated ligands can be tethered to the cell for example via a glycosylphosphatidylinositol (GPI) anchor, or may themselves be transmembrane proteins. Extracellular domains also associate with the extracellular matrix and contribute to the maintenance of the cell structure.

[0077] CA proteins that are transmembrane are particularly preferred in the present invention as they are good targets for immunotherapeutics, as are described herein. In addition, as outlined below, transmembrane proteins can be also useful in imaging modalities.

[0078] It will also be appreciated by those in the art that a transmembrane protein can be made soluble by removing transmembrane sequences, for example through recombinant methods. Furthermore, transmembrane proteins that have been made soluble can be made to be secreted through recombinant means by adding an appropriate signal sequence.

[0079] In a preferred embodiment, the CA proteins are secreted proteins; the secretion of which can be either constitutive or regulated. These proteins have a signal peptide or signal sequence that targets the molecule to the secretory pathway. Secreted proteins are involved in numerous physiological events; by virtue of their circulating nature, they serve to transmit signals to various other cell types. The secreted protein may function in an autocrine manner (acting on the cell that secreted the factor), a paracrine manner (acting on cells in close proximity to the cell that secreted the factor) or an endocrine manner (acting on cells at a distance). Thus secreted molecules find use in modulating or altering numerous aspects of physiology. CA proteins that are secreted proteins are particularly preferred in the present invention as they serve as good targets for diagnostic markers, for example for blood tests.

[0080] CA Sequences and Homologs

[0081] A CA sequence is initially identified by substantial nucleic acid and/or amino acid sequence homology to the CA sequences outlined herein. Such homology can be based upon the overall nucleic acid or amino acid sequence, and is generally determined as outlined below, using either homology programs or hybridization conditions.

[0082] As used herein, a nucleic acid is a “CA nucleic acid” if the overall homology of the nucleic acid sequence to one of the nucleic acids of Tables 1-28 is preferably greater than about 75%, more preferably greater than about 80%, even more preferably greater than about 85% and most preferably greater than 90%. In some embodiments the homology will be as high as about 93 to 95 or 98%. In a preferred embodiment, the sequences that are used to determine sequence identity or similarity are selected from those of the nucleic acids of Tables 1-28. In another embodiment, the sequences are naturally occurring allelic variants of the sequences of the nucleic acids of Tables 1-28. In another embodiment, the sequences are sequence variants as further described herein.

[0083] Homology in this context means sequence similarity or identity, with identity being preferred. A preferred comparison for homology purposes is to compare the sequence containing sequencing errors to the correct sequence. This homology will be determined using standard techniques known in the art, including, but not limited to, the local homology algorithm of Smith & Waterman, Adv. Appl. Math. 2:482 (1981), by the homology alignment algorithm of Needleman & Wunsch, J. Mol. Biol. 48:443 (1970), by the search for similarity method of Pearson & Lipman, PNAS USA 85:2444 (1988), by computerized implementations of these algorithms (GAP, BESTFIT, FASTA, and TFASTA in the Wisconsin Genetics Software Package, Genetics Computer Group, 575 Science Drive, Madison, Wis.), the Best Fit sequence program described by Devereux et al., Nucl. Acid Res. 12:387-395 (1984), preferably using the default settings, or by inspection.

[0084] One example of a useful algorithm is PILEUP. PILEUP creates a multiple sequence alignment from a group of related sequences using progressive, pairwise alignments. It can also plot a tree showing the clustering relationships used to create the alignment. PILEUP uses a simplification of the progressive alignment method of Feng & Doolittle, J. Mol. Evol. 35:351-360 (1987); the method is similar to that described by Higgins & Sharp CABIOS 5:151-153 (1989). Useful PILEUP parameters include a default gap weight of 3.00, a default gap length weight of 0.10, and weighted end gaps.

[0085] Another example of a useful algorithm is the BLAST (Basic Local Alignment Search Tool) algorithm, described in Altschul et al., J. Mol. Biol. 215, 403-410, (1990) and Karlin et al., PNAS USA 90:5873-5787 (1993). A particularly useful BLAST program is the WU-BLAST-2 program which was obtained from Altschul et al., Methods in Enzymology, 266: 460-480 (1996); http://blast.wustl.edu/]. WU-BLAST-2 uses several search parameters, most of which are set to the default values. The adjustable parameters are set with the following values: overlap span=1, overlap fraction=0.125, word threshold (T)=11. The HSP S and HSP S2 parameters are dynamic values and are established by the program itself depending upon the composition of the particular sequence and composition of the particular database against which the sequence of interest is being searched; however, the values may be adjusted to increase sensitivity. A percent amino acid sequence identity value is determined by the number of matching identical residues divided by the total number of residues of the “longer” sequence in the aligned region. The “longer” sequence is the one having the most actual residues in the aligned region (gaps introduced by WU-Blast-2 to maximize the alignment score are ignored).

[0086] Thus, “percent (%) nucleic acid sequence identity” is defined as the percentage of nucleotide residues in a candidate sequence that are identical with the nucleotide residues of the nucleic acids of Tables 1-28. A preferred method utilizes the BLASTN module of WU-BLAST-2 set to the default parameters, with overlap span and overlap fraction set to 1 and 0.125, respectively.

[0087] The alignment may include the introduction of gaps in the sequences to be aligned. In addition, for sequences which contain either more or fewer nucleotides than those of the nucleic acids of Tables 1-28, it is understood that the percentage of homology will be determined based on the number of homologous nucleosides in relation to the total number of nucleosides. Thus homology of sequences shorter than those of the sequences identified herein will be determined using the number of nucleosides in the shorter sequence.

[0088] In another embodiment of the invention, polynucleotide compositions are provided that are capable of hybridizing under moderate to high stringency conditions to a polynucleotide sequence provided herein, or a fragment thereof, or a complementary sequence thereof. Hybridization techniques are well known in the art of molecular biology. For purposes of illustration, suitable moderately stringent conditions for testing the hybridization of a polynucleotide of this invention with other polynucleotides include prewashing in a solution of 5×SSC (“saline sodium citrate”; 9 mM NaCl, 0.9 mM sodium citrate), 0.5% SDS, 1.0 mM EDTA (pH 8.0); hybridizing at 50-60° C., 5×SSC, overnight; followed by washing twice at 65° C. for 20 minutes with each of 2×, 0.533 and 0.2×SSC containing 0.1% SDS. One skilled in the art will understand that the stringency of hybridization can be readily manipulated, such as by altering the salt content of the hybridization solution and/or the temperature at which the hybridization is performed. For example, in another embodiment, suitable highly stringent hybridization conditions include those described above, with the exception that the temperature of hybridization is increased, e.g., to 60-65° C., or 65-70° C. Stringent conditions may also be achieved with the addition of destabilizing agents such as formamide.

[0089] Thus nucleic acids that hybridize under high stringency to the nucleic acids identified in the figures, or their complements, are considered CA sequences. High stringency conditions are known in the art; see for example Maniatis et al., Molecular Cloning: A Laboratory Manual, 2d Edition, 1989, and Short Protocols in Molecular Biology, ed. Ausubel, et al., both of which are hereby incorporated by reference. Stringent conditions are sequence-dependent and will be different in different circumstances. Longer sequences hybridize specifically at higher temperatures. An extensive guide to the hybridization of nucleic acids is found in Tijssen, Techniques in Biochemistry and Molecular Biology—Hybridization with Nucleic Acid Probes, “Overview of principles of hybridization and the strategy of nucleic acid assays” (1993). Generally, stringent conditions are selected to be about 5-10° C. lower than the thermal melting point (Tₘ) for the specific sequence at a defined ionic strength pH. The Tₘ is the temperature (under defined ionic strength, pH and nucleic acid concentration) at which 50% of the probes complementary to the target hybridize to the target sequence at equilibrium (as the target sequences are present in excess, at Tₘ, 50% of the probes are occupied at equilibrium). Stringent conditions will be those in which the salt concentration is less than about 1.0 M sodium ion, typically about 0.01 to 1.0 M sodium ion concentration (or other salts) at pH 7.0 to 8.3 and the temperature is at least about 30° C. for short probes (e.g. 10 to 50 nucleotides) and at least about 60° C. for longer probes (e.g. greater than 50 nucleotides). In another embodiment, less stringent hybridization conditions are used; for example, moderate or low stringency conditions may be used, as are known in the art; see Maniatis and Ausubel, supra, and Tijssen, supra.

[0090] In addition, the CA nucleic acid sequences of the invention are fragments of larger genes, i.e. they are nucleic acid segments. Alternatively, the CA nucleic acid sequences can serve as indicators of oncogene position, for example, the CA sequence may be an enhancer that activates a protooncogene. “Genes” in this context includes coding regions, non-coding regions, and mixtures of coding and non-coding regions. Accordingly, as will be appreciated by those in the art, using the sequences provided herein, additional sequences of the CA genes can be obtained, using techniques well known in the art for cloning either longer sequences or the full-length sequences; see Maniatis et al., and Ausubel, et al., supra, hereby expressly incorporated by reference. In general, this is done using PCR, for example, kinetic PCR.

[0091] Detection of CA Expression

[0092] Once the CA nucleic acid is identified, it can be cloned and, if necessary, its constituent parts recombined to form the entire CA nucleic acid. Once isolated from its natural source, e.g., contained within a plasmid or other vector or excised therefrom as a linear nucleic acid segment, the recombinant CA nucleic acid can be further used as a probe to identify and isolate other CA nucleic acids, for example additional coding regions. It can also be used as a “precursor” nucleic acid to make modified or variant CA nucleic acids and proteins. In a preferred embodiment, once a CA gene is identified its nucleotide sequence is used to design probes specific for the CA gene.

[0093] The CA nucleic acids of the present invention are used in several ways. In a first embodiment, nucleic acid probes hybridizable to CA nucleic acids are made and attached to biochips to be used in screening and diagnostic methods, or for gene therapy and/or antisense applications. Alternatively, the CA nucleic acids that include coding regions of CA proteins can be put into expression vectors for the expression of CA proteins, again either for screening purposes or for administration to a patient.

[0094] Recent developments in DNA microarray technology make it possible to conduct a large scale assay of a plurality of target CA nucleic acid molecules on a single solid phase support. U.S. Pat. No. 5,837,832 (Chee et al.) and related patent applications describe immobilizing an array of oligonucleotide probes for hybridization and detection of specific nucleic acid sequences in a sample. Target polynucleotides of interest isolated from a tissue of interest are hybridized to the DNA chip and the specific sequences detected based on the target polynucleotides' preference and degree of hybridization at discrete probe locations. One important use of arrays is in the analysis of differential gene expression, where the profile of expression of genes in different cells, often a cell of interest and a control cell, is compared and any differences in gene expression among the respective cells are identified. Such information is useful for the identification of the types of genes expressed in a particular cell or tissue type and diagnosis of cancer conditions based on the expression profile.

[0095] Typically, RNA from the sample of interest is subjected to reverse transcription to obtain labeled cDNA. See U.S. Pat. No. 6,410,229 (Lockhart et al.) The cDNA is then hybridized to oligonucleotides or cDNAs of known sequence arrayed on a chip or other surface in a known order. The location of the oligonucleotide to which the labeled cDNA hybridizes provides sequence information on the cDNA, while the amount of labeled hybridized RNA or cDNA provides an estimate of the relative representation of the RNA or cDNA of interest. See Schena, et al. Science 270:467-470 (1995). For example, use of a cDNA microarray to analyze gene expression patterns in human cancer is described by DeRisi, et al. (Nature Genetics 14:457-460 (1996)).

[0096] In a preferred embodiment, nucleic acid probes corresponding to CA nucleic acids (both the nucleic acid sequences outlined in the figures and/or the complements thereof) are made. Typically, these probes are synthesized based on the disclosed sequences of this invention. The nucleic acid probes attached to the biochip are designed to be substantially complementary to the CA nucleic acids, i.e. the target sequence (either the target sequence of the sample or to other probe sequences, for example in sandwich assays), such that specific hybridization of the target sequence and the probes of the present invention occurs. As outlined below, this complementarity need not be perfect, in that there may be any number of base pair mismatches that will interfere with hybridization between the target sequence and the single stranded nucleic acids of the present invention. It is expected that the overall homology of the genes at the nucleotide level probably will be about 40% or greater, probably about 60% or greater, and even more probably about 80% or greater; and in addition that there will be corresponding contiguous sequences of about 8-12 nucleotides or longer. However, if the number of mutations is so great that no hybridization can occur under even the least stringent of hybridization conditions, the sequence is not a complementary target sequence. Thus, by “substantially complementary” herein is meant that the probes are sufficiently complementary to the target sequences to hybridize under normal reaction conditions, particularly high stringency conditions, as outlined herein. Whether or not a sequence is unique to a CA gene according to this invention can be determined by techniques known to those of skill in the art. For example, the sequence can be compared to sequences in databanks, e.g., GeneBank, to determine whether it is present in the uninfected host or other organisms. The sequence can also be compared to the known sequences of other viral agents, including those that are known to induce cancer.

[0097] A nucleic acid probe is generally single stranded but can be partly single and partly double stranded. The strandedness of the probe is dictated by the structure, composition, and properties of the target sequence. In general, the oligonucleotide probes range from about 6, 8, 10, 12, 15, 20, 30 to about 100 bases long, with from about 10 to about 80 bases being preferred, and from about 30 to about 50 bases being particularly preferred. That is, generally entire genes are rarely used as probes. In some embodiments, much longer nucleic acids can be used, up to hundreds of bases. The probes are sufficiently specific to hybridize to complementary template sequence under conditions known by those of skill in the art. The number of mismatches between the probes sequences and their complementary template (target) sequences to which they hybridize during hybridization generally do not exceed 15%, usually do not exceed 10% and preferably do not exceed 5%, as determined by FASTA (default settings).

[0098] Oligonucleotide probes can include the naturally-occurring heterocyclic bases normally found in nucleic acids (uracil, cytosine, thymine, adenine and guanine), as well as modified bases and base analogues. Any modified base or base analogue compatible with hybridization of the probe to a target sequence is useful in the practice of the invention. The sugar or glycoside portion of the probe can comprise deoxyribose, ribose, and/or modified forms of these sugars, such as, for example, 2′-O-alkyl ribose. In a preferred embodiment, the sugar moiety is 2′-deoxyribose; however, any sugar moiety that is compatible with the ability of the probe to hybridize to a target sequence can be used.

[0099] In one embodiment, the nucleoside units of the probe are linked by a phosphodiester backbone, as is well known in the art. In additional embodiments, internucleotide linkages can include any linkage known to one of skill in the art that is compatible with specific hybridization of the probe including, but not limited to phosphorothioate, methylphosphonate, sulfamate (e.g., U.S. Pat. No. 5,470,967) and polyamide (i.e., peptide nucleic acids). Peptide nucleic acids are described in Nielsen et al. (1991) Science 254: 1497-1500, U.S. Pat. No. 5,714,331, and Nielsen (1999) Curr. Opin. Biotechnol. 10:71-75.

[0100] In certain embodiments, the probe can be a chimeric molecule; i.e., can comprise more than one type of base or sugar subunit, and/or the linkages can be of more than one type within the same primer. The probe can comprise a moiety to facilitate hybridization to its target sequence, as are known in the art, for example, intercalators and/or minor groove binders. Variations of the bases, sugars, and internucleoside backbone, as well as the presence of any pendant group on the probe, will be compatible with the ability of the probe to bind, in a sequence-specific fashion, with its target sequence. A large number of structural modifications, both known and to be developed, are possible within these bounds. Advantageously, the probes according to the present invention may have structural characteristics such that they allow the signal amplification, such structural characteristics being, for example, branched DNA probes as those described by Urdea et al. (Nucleic Acids Symp. Ser., 24:197-200 (1991)) or in the European Patent No. EP-0225,807. Moreover, synthetic methods for preparing the various heterocyclic bases, sugars, nucleosides and nucleotides that form the probe, and preparation of oligonucleotides of specific predetermined sequence, are well-developed and known in the art. A preferred method for oligonucleotide synthesis incorporates the teaching of U.S. Pat. No. 5,419,966.

[0101] Multiple probes may be designed for a particular target nucleic acid to account for polymorphism and/or secondary structure in the target nucleic acid, redundancy of data and the like. In some embodiments, where more than one probe per sequence is used, either overlapping probes or probes to different sections of a single target CA gene are used. That is, two, three, four or more probes, with three being preferred, are used to build in a redundancy for a particular target. The probes can be overlapping (i.e. have some sequence in common), or specific for distinct sequences of a CA gene. When multiple target polynucleotides are to be detected according to the present invention, each probe or probe group corresponding to a particular target polynucleotide is situated in a discrete area of the microarray.

[0102] Probes may be in solution, such as in wells or on the surface of a micro-array, or attached to a solid support. Examples of solid support materials that can be used include a plastic, a ceramic, a metal, a resin, a gel and a membrane. Useful types of solid supports include plates, beads, magnetic material, microbeads, hybridization chips, membranes, crystals, ceramics and self-assembling monolayers. A preferred embodiment comprises a two-dimensional or three-dimensional matrix, such as a gel or hybridization chip with multiple probe binding sites (Pevzner et al., J. Biomol. Struc. & Dyn. 9:399-410, 1991; Maskos and Southern, Nuc. Acids Res. 20:1679-84, 1992). Hybridization chips can be used to construct very large probe arrays that are subsequently hybridized with a target nucleic acid. Analysis of the hybridization pattern of the chip can assist in the identification of the target nucleotide sequence. Patterns can be manually or computer analyzed, but it is clear that positional sequencing by hybridization lends itself to computer analysis and automation. Algorithms and software, which have been developed for sequence reconstruction, are applicable to the methods described herein (R. Drmanac et al., J. Biomol. Struc. & Dyn. 5:1085-1102, 1991; P. A. Pevzner, J. Biomol. Struc. & Dyn. 7:63-73, 1989).

[0103] As will be appreciated by those in the art, nucleic acids can be attached or immobilized to a solid support in a wide variety of ways. By “immobilized” herein is meant the association or binding between the nucleic acid probe and the solid support is sufficient to be stable under the conditions of binding, washing, analysis, and removal as outlined below. The binding can be covalent or non-covalent. By “non-covalent binding” and grammatical equivalents herein is meant one or more of either electrostatic, hydrophilic, and hydrophobic interactions. Included in non-covalent binding is the covalent attachment of a molecule, such as streptavidin, to the support and the non-covalent binding of the biotinylated probe to the streptavidin. By “covalent binding” and grammatical equivalents herein is meant that the two moieties, the solid support and the probe, are attached by at least one bond, including sigma bonds, pi bonds and coordination bonds. Covalent bonds can be formed directly between the probe and the solid support or can be formed by a cross linker or by inclusion of a specific reactive group on either the solid support or the probe or both molecules. Immobilization may also involve a combination of covalent and non-covalent interactions.

[0104] Nucleic acid probes may be attached to the solid support by covalent binding such as by conjugation with a coupling agent or by, covalent or non-covalent binding such as electrostatic interactions, hydrogen bonds or antibody-antigen coupling, or by combinations thereof. Typical coupling agents include biotin/avidin, biotin/streptavidin, Staphylococcus aureus protein A/IgG antibody F_{c} fragment, and streptavidin/protein A chimeras (T. Sano and C. R. Cantor, Bio/Technology 9:1378-81 (1991)), or derivatives or combinations of these agents. Nucleic acids may be attached to the solid support by a photocleavable bond, an electrostatic bond, a disulfide bond, a peptide bond, a diester bond or a combination of these sorts of bonds. The array may also be attached to the solid support by a selectively releasable bond such as 4,4′-dimethoxytrityl or its derivative. Derivatives which have been found to be useful include 3 or 4[bis-(4-methoxyphenyl)]-methyl-benzoic acid, N-succinimidyl-3 or 4[bis-(4-methoxyphenyl)]-methyl-benzoic acid, N-succinimidyl-3 or 4[bis-(4-methoxyphenyl)]-hydroxymethyl-benzoic acid, N-succinimidyl-3 or 4[bis-(4-methoxyphenyl)]-chloromethyl-benzoic acid, and salts of these acids.

[0105] In general, the probes are attached to the biochip in a wide variety of ways, as will be appreciated by those in the art. As described herein, the nucleic acids can either be synthesized first, with subsequent attachment to the biochip, or can be directly synthesized on the biochip.

[0106] The biochip comprises a suitable solid substrate. By “substrate” or “solid support” or other grammatical equivalents herein is meant any material that can be modified to contain discrete individual sites appropriate for the attachment or association of the nucleic acid probes and is amenable to at least one detection method. The solid phase support of the present invention can be of any solid materials and structures suitable for supporting nucleotide hybridization and synthesis. Preferably, the solid phase support comprises at least one substantially rigid surface on which the primers can be immobilized and the reverse transcriptase reaction performed. The substrates with which the polynucleotide microarray elements are stably associated may be fabricated from a variety of materials, including plastics, ceramics, metals, acrylamide, cellulose, nitrocellulose, glass, polystyrene, polyethylene vinyl acetate, polypropylene, polymethacrylate, polyethylene, polyethylene oxide, polysilicates, polycarbonates, Teflon®, fluorocarbons, nylon, silicon rubber, polyanhydrides, polyglycolic acid, polylactic acid, polyorthoesters, polypropylfumerate, collagen, glycosaminoglycans, and polyamino acids. Substrates may be two-dimensional or three-dimensional in form, such as gels, membranes, thin films, glasses, plates, cylinders, beads, magnetic beads, optical fibers, woven fibers, etc. A preferred form of array is a three-dimensional array. A preferred three-dimensional array is a collection of tagged beads. Each tagged bead has different primers attached to it. Tags are detectable by signaling means such as color (Luminex, Illumina) and electromagnetic field (Pharmaseq) and signals on tagged beads can even be remotely detected (e.g., using optical fibers). The size of the solid support can be any of the standard microarray sizes, useful for DNA microarray technology, and the size may be tailored to fit the particular machine being used to conduct a reaction of the invention. In general, the substrates allow optical detection and do not appreciably fluoresce.

[0107] In a preferred embodiment, the surface of the biochip and the probe may be derivatized with chemical functional groups for subsequent attachment of the two. Thus, for example, the biochip is derivatized with a chemical functional group including, but not limited to, amino groups, carboxy groups, oxo groups and thiol groups, with amino groups being particularly preferred. Using these functional groups, the probes can be attached using functional groups on the probes. For example, nucleic acids containing amino groups can be attached to surfaces comprising amino groups, for example using linkers as are known in the art; for example, homo-or hetero-bifunctional linkers as are well known (see 1994 Pierce Chemical Company catalog, technical section on cross-linkers, pages 155-200, incorporated herein by reference). In addition, in some cases, additional linkers, such as alkyl groups (including substituted and heteroalkyl groups) may be used.

[0108] In this embodiment, the oligonucleotides are synthesized as is known in the art, and then attached to the surface of the solid support. As will be appreciated by those skilled in the art, either the 5′ or 3′ terminus may be attached to the solid support, or attachment may be via an internal nucleoside. In an additional embodiment, the immobilization to the solid support may be very strong, yet non-covalent. For example, biotinylated oligonucleotides can be made, which bind to surfaces covalently coated with streptavidin, resulting in attachment.

[0109] The arrays may be produced according to any convenient methodology, such as preforming the polynucleotide microarray elements and then stably associating them with the surface. Alternatively, the oligonucleotides may be synthesized on the surface, as is known in the art. A number of different array configurations and methods for their production are known to those of skill in the art and disclosed in WO 95/25116 and WO 95/35505 (photolithographic techniques), U.S. Pat. No. 5,445,934 (in situ synthesis by photolithography), U.S. Pat. No. 5,384,261 (in situ synthesis by mechanically directed flow paths); and U.S. Pat. No. 5,700,637 (synthesis by spotting, printing or coupling); the disclosure of which are herein incorporated in their entirety by reference. Another method for coupling DNA to beads uses specific ligands attached to the end of the DNA to link to ligand-binding molecules attached to a bead. Possible ligand-binding partner pairs include biotin-avidin/streptavidin, or various antibody/antigen pairs such as digoxygenin-antidigoxygenin antibody (Smith et al., “Direct Mechanical Measurements of the Elasticity of Single DNA Molecules by Using Magnetic Beads,” Science 258:1122-1126 (1992)). Covalent chemical attachment of DNA to the support can be accomplished by using standard coupling agents to link the 5′-phosphate on the DNA to coated microspheres through a phosphoamidate bond. Methods for immobilization of oligonucleotides to solid-state substrates are well established. See Pease et al., Proc. Natl. Acad. Sci. USA 91(11):5022-5026 (1994). A preferred method of attaching oligonucleotides to solid-state substrates is described by Guo et al., Nucleic Acids Res. 22:5456-5465 (1994). Immobilization can be accomplished either by in situ DNA synthesis (Maskos and Southern, Nucleic Acids Research, 20:1679-1684 (1992) or by covalent attachment of chemically synthesized oligonucleotides (Guo et al., supra) in combination with robotic arraying technologies.

[0110] In addition to the solid-phase technology represented by biochip arrays, gene expression can also be quantified using liquid-phase arrays. One such system is kinetic polymerase chain reaction (PCR). Kinetic PCR allows for the simultaneous amplification and quantification of specific nucleic acid sequences. The specificity is derived from synthetic oligonucleotide primers designed to preferentially adhere to single-stranded nucleic acid sequences bracketing the target site. This pair of oligonucleotide primers form specific, non-covalently bound complexes on each strand of the target sequence. These complexes facilitate in vitro transcription of double-stranded DNA in opposite orientations. Temperature cycling of the reaction mixture creates a continuous cycle of primer binding, transcription, and re-melting of the nucleic acid to individual strands. The result is an exponential increase of the target dsDNA product. This product can be quantified in real time either through the use of an intercalating dye or a sequence specific probe. SYBR® Greene I, is an example of an intercalating dye, that preferentially binds to dsDNA resulting in a concomitant increase in the fluorescent signal. Sequence specific probes, such as used with TaqMan® technology, consist of a fluorochrome and a quenching molecule covalently bound to opposite ends of an oligonucleotide. The probe is designed to selectively bind the target DNA sequence between the two primers. When the DNA strands are synthesized during the PCR reaction, the fluorochrome is cleaved from the probe by the exonuclease activity of the polymerase resulting in signal dequenching. The probe signaling method can be more specific than the intercalating dye method, but in each case, signal strength is proportional to the dsDNA product produced. Each type of quantification method can be used in multi-well liquid phase arrays with each well representing primers and/or probes specific to nucleic acid sequences of interest. When used with messenger RNA preparations of tissues or cell lines, an array of probe/primer reactions can simultaneously quantify the expression of multiple gene products of interest. See Germer, S., et al., Genome Res. 10:258-266 (2000); Heid, C. A., et al., Genome Res. 6, 986-994 (1996).

[0111] Expression of CA Proteins

[0112] In a preferred embodiment, CA nucleic acids encoding CA proteins are used to make a variety of expression vectors to express CA proteins which can then be used in screening assays, as described below. The expression vectors may be either self-replicating extrachromosomal vectors or vectors which integrate into a host genome. Generally, these expression vectors include transcriptional and translational regulatory nucleic acid operably linked to the nucleic acid encoding the CA protein. The term “control sequences” refers to DNA sequences necessary for the expression of an operably linked coding sequence in a particular host organism. The control sequences that are suitable for prokaryotes, for example, include a promoter, optionally an operator sequence, and a ribosome binding site. Eukaryotic cells are known to utilize promoters, polyadenylation signals, and enhancers.

[0113] Nucleic acid is “operably linked” when it is placed into a functional relationship with another nucleic acid sequence. For example, DNA for a presequence or secretory leader is operably linked to DNA for a polypeptide if it is expressed as a preprotein that participates in the secretion of the polypeptide; a promoter or enhancer is operably linked to a coding sequence if it affects the transcription of the sequence; or a ribosome binding site is operably linked to a coding sequence if it is positioned so as to facilitate translation. Generally, “operably linked” means that the DNA sequences being linked are contiguous, and, in the case of a secretory leader, contiguous and in reading phase. However, enhancers do not have to be contiguous. Linking is accomplished by ligation at convenient restriction sites. If such sites do not exist, synthetic oligonucleotide adaptors or linkers are used in accordance with conventional practice. The transcriptional and translational regulatory nucleic acid will generally be appropriate to the host cell used to express the CA protein; for example, transcriptional and translational regulatory nucleic acid sequences from Bacillus are preferably used to express the CA protein in Bacillus. Numerous types of appropriate expression vectors, and suitable regulatory sequences are known in the art for a variety of host cells.

[0114] In general, the transcriptional and translational regulatory sequences may include, but are not limited to, promoter sequences, ribosomal binding sites, transcriptional start and stop sequences, translational start and stop sequences, and enhancer or activator sequences. In a preferred embodiment, the regulatory sequences include a promoter and transcriptional start and stop sequences.

[0115] Promoter sequences encode either constitutive or inducible promoters. The promoters may be either naturally occurring promoters or hybrid promoters. Hybrid promoters, which combine elements of more than one promoter, are also known in the art, and are useful in the present invention.

[0116] In addition, the expression vector may comprise additional elements. For example, the expression vector may have two replication systems, thus allowing it to be maintained in two organisms, for example in mammalian or insect cells for expression and in a prokaryotic host for cloning and amplification. Furthermore, for integrating expression vectors, the expression vector contains at least one sequence homologous to the host cell genome, and preferably two homologous sequences that flank the expression construct. The integrating vector may be directed to a specific locus in the host cell by selecting the appropriate homologous sequence for inclusion in the vector. Constructs for integrating vectors are well known in the art.

[0117] In addition, in a preferred embodiment, the expression vector contains a selectable marker gene to allow the selection of transformed host cells. Selection genes are well known in the art and will vary with the host cell used.

[0118] The CA proteins of the present invention are produced by culturing a host cell transformed with an expression vector containing nucleic acid encoding a CA protein, under the appropriate conditions to induce or cause expression of the CA protein. The conditions appropriate for CA protein expression will vary with the choice of the expression vector and the host cell, and will be easily ascertained by one skilled in the art through routine experimentation. For example, the use of constitutive promoters in the expression vector will require optimizing the growth and proliferation of the host cell, while the use of an inducible promoter requires the appropriate growth conditions for induction. In addition, in some embodiments, the timing of the harvest is important. For example, the baculoviral systems used in insect cell expression are lytic viruses, and thus harvest time selection can be crucial for product yield.

[0119] Appropriate host cells include yeast, bacteria, archaebacteria, fungi, and insect, plant and animal cells, including mammalian cells. Of particular interest are Drosophila melanogaster cells, Saccharomyces cerevisiae and other yeasts, E. coli, Bacillus subtilis, Sf9 cells, C129 cells, 293 cells, Neurospora, BHK, CHO, COS, HeLa cells, THP1 cell line (a macrophage cell line) and human cells and cell lines.

[0120] In a preferred embodiment, the CA proteins are expressed in mammalian cells. Mammalian expression systems are also known in the art, and include retroviral systems. A preferred expression vector system is a retroviral vector system such as is generally described in PCT/US97/01019 and PCT/US97/01048, both of which are hereby expressly incorporated by reference. Of particular use as mammalian promoters are the promoters from mammalian viral genes, since the viral genes are often highly expressed and have a broad host range. Examples include the SV40 early promoter, mouse mammary tumor virus LTR promoter, adenovirus major late promoter, herpes simplex virus promoter, and the CMV promoter. Typically, transcription termination and polyadenylation sequences recognized by mammalian cells are regulatory regions located 3′ to the translation stop codon and thus, together with the promoter elements, flank the coding sequence. Examples of transcription terminator and polyadenylation signals include those derived form SV40.

[0121] The methods of introducing exogenous nucleic acid into mammalian hosts, as well as other hosts, are well known in the art, and will vary with the host cell used. Techniques include dextran-mediated transfection, calcium phosphate precipitation, polybrene mediated transfection, protoplast fusion, electroporation, viral infection, encapsulation of the polynucleotide(s) in liposomes, and direct microinjection of the DNA into nuclei.

[0122] In a preferred embodiment, CA proteins are expressed in bacterial systems. Bacterial expression systems are well known in the art. Promoters from bacteriophage may also be used and are known in the art. In addition, synthetic promoters and hybrid promoters are also useful; for example, the tac promoter is a hybrid of the trp and lac promoter sequences. Furthermore, a bacterial promoter can include naturally occurring promoters of non-bacterial origin that have the ability to bind bacterial RNA polymerase and initiate transcription. In addition to a functioning promoter sequence, an efficient ribosome binding site is desirable. The expression vector may also include a signal peptide sequence that provides for secretion of the CA protein in bacteria. The protein is either secreted into the growth media (gram-positive bacteria) or into the periplasmic space, located between the inner and outer membrane of the cell (gram-negative bacteria). The bacterial expression vector may also include a selectable marker gene to allow for the selection of bacterial strains that have been transformed. Suitable selection genes include genes that render the bacteria resistant to drugs such as ampicillin, chloramphenicol, erythromycin, kanamycin, neomycin and tetracycline. Selectable markers also include biosynthetic genes, such as those in the histidine, tryptophan and leucine biosynthetic pathways. These components are assembled into expression vectors. Expression vectors for bacteria are well known in the art, and include vectors for Bacillus subtilis, E. coli, Streptococcus cremoris, and Streptococcus lividans, among others. The bacterial expression vectors are transformed into bacterial host cells using techniques well known in the art, such as calcium chloride treatment, electroporation, and others.

[0123] In one embodiment, CA proteins are produced in insect cells. Expression vectors for the transformation of insect cells, and in particular, baculovirus-based expression vectors, are well known in the art.

[0124] In a preferred embodiment, CA protein is produced in yeast cells. Yeast expression systems are well known in the art, and include expression vectors for Saccharomyces cerevisiae, Candida albicans and C. maltosa, Hansenula polymorpha, Kluyveromyces fragilis and K. lactis, Pichia guillerimondii and P. pastoris, Schizosaccharomyces pombe, and Yarrowia lipolytica.

[0125] The CA protein may also be made as a fusion protein, using techniques well known in the art. Thus, for example, for the creation of monoclonal antibodies. If the desired epitope is small, the CA protein may be fused to a carrier protein to form an immunogen. Alternatively, the CA protein may be made as a fusion protein to increase expression, or for other reasons. For example, when the CA protein is a CA peptide, the nucleic acid encoding the peptide may be linked to other nucleic acid for expression purposes.

[0126] In one embodiment, the CA nucleic acids, proteins and antibodies of the invention are labeled. By “labeled” herein is meant that a compound has at least one element, isotope or chemical compound attached to enable the detection of the compound. In general, labels fall into three classes: a) isotopic labels, which may be radioactive or heavy isotopes; b) immune labels, which may be antibodies or antigens; and c) colored or fluorescent dyes. The labels may be incorporated into the CA nucleic acids, proteins and antibodies at any position. For example, the label should be capable of producing, either directly or indirectly, a detectable signal. The detectable moiety may be a radioisotope, such as ³H, ¹⁴C, ³²P, ³⁵S, or ¹²⁵I, a fluorescent or chemiluminescent compound, such as fluorescein isothiocyanate, rhodamine, or luciferin, or an enzyme, such as alkaline phosphatase, beta-galactosidase or horseradish peroxidase. Any method known in the art for conjugating the antibody to the label may be employed, including those methods described by Hunter et al., Nature, 144:945 (1962); David et al., Biochemistry, 13:1014 (1974); Pain et al., J. Immunol. Meth., 40:219 (1981); and Nygren, J. Histochem. and Cytochem., 30:407 (1982).

[0127] Accordingly, the present invention also provides CA protein sequences. A CA protein of the present invention may be identified in several ways. “Protein” in this sense includes proteins, polypeptides, and peptides. As will be appreciated by those in the art, the nucleic acid sequences of the invention can be used to generate protein sequences. There are a variety of ways to do this, including cloning the entire gene and verifying its frame and amino acid sequence, or by comparing it to known sequences to search for homology to provide a frame, assuming the CA protein has homology to some protein in the database being used. Generally, the nucleic acid sequences are input into a program that will search all three frames for homology. This is done in a preferred embodiment using the following NCBI Advanced BLAST parameters. The program is blastx or blastn. The database is nr. The input data is as “Sequence in FASTA format”. The organism list is “none”. The “expect” is 10; the filter is default. The “descriptions” is 500, the “alignments” is 500, and the “alignment view” is pairwise. The “query Genetic Codes” is standard (1). The matrix is BLOSUM 62; gap existence cost is 11, per residue gap cost is 1; and the lambda ratio is 0.85 default. This results in the generation of a putative protein sequence.

[0128] In general, the term “polypeptide” as used herein refers to both the full-length polypeptide encoded by the recited polynucleotide, the polypeptide encoded by the gene represented by the recited polynucleotide, as well as portions or fragments thereof. The present invention encompasses variants of the naturally occurring proteins, wherein such variants are homologous or substantially similar to the naturally occurring protein, and can be of an origin of the same or different species as the naturally occurring protein (e.g., human, murine, or some other species that naturally expresses the recited polypeptide, usually a mammalian species). In general, variant polypeptides have a sequence that has at least about 80%, at least about 81%, at least about 82%, at least about 83%, at least about 84%, at least about 85%, at least about 86%, at least about 87%, at least about 88%, at least about 89%, usually at least about 90%, at least 91%, at least 92%, at least 93%, at least 94%, at least 95%, at least 96%, at least 97%, at least 98% and more usually at least about 99% sequence identity with a differentially expressed polypeptide described herein, as determined by the Smith-Waterman homology search algorithm using an affine gap search with a gap open penalty of 12 and a gap extension penalty of 2, BLOSUM matrix of 62. The Smith-Waterman homology search algorithm is taught in Smith and Waterman, Adv. Appl. Math. (1981) 2: 482-489. The variant polypeptides can be naturally or non-naturally glycosylated, i.e., the polypeptide has a glycosylation pattern that differs from the glycosylation pattern found in the corresponding naturally occurring protein.

[0129] Also within the scope of the invention are variants. Variants of polypeptides include mutants, fragments, and fusions. Mutants can include amino acid substitutions, additions or deletions. The amino acid substitutions can be conservative amino acid substitutions or substitutions to eliminate non-essential amino acids, such as to alter a glycosylation site, a phosphorylation site or an acetylation site, or to minimize misfolding by substitution or deletion of one or more cysteine residues that are not necessary for function. Conservative amino acid substitutions are those that preserve the general charge, hydrophobicity/hydrophilicity, and/or steric bulk of the amino acid substituted. Variants can be designed so as to retain or have enhanced biological activity of a particular region of the protein (e.g., a functional domain and/or, where the polypeptide is a member of a protein family, a region associated with a consensus sequence). Selection of amino acid alterations for production of variants can be based upon the accessibility (interior vs. exterior) of the amino acid (see, e.g., Go et al, Int. J. Peptide Protein Res. (1980) 15:211), the thermostability of the variant polypeptide (see, e.g., Querol et al., Prot. Eng. (1996) 9:265), desired glycosylation sites (see, e.g., Olsen and Thomsen, J. Gen. Microbiol. (1991) 137:579), desired disulfide bridges (see, e.g., Clarke et al., Biochemistry (1993) 32:4322; and Wakarchuk et al., Protein Eng. (1994) 7:1379), desired metal binding sites (see, e.g., Toma et al., Biochemistry (1991) 30:97, and Haezerbrouck et al., Protein Eng. (1993) 6:643), and desired substitutions within proline loops (see, e.g., Masul et al., Appl. Env. Microbiol. (1994) 60:3579). Cysteine-depleted muteins can be produced as disclosed in U.S. Pat. No. 4,959,314.

[0130] Variants also include fragments of the polypeptides disclosed herein, particularly biologically active fragments and/or fragments corresponding to functional domains. Fragments of interest will typically be at least about 8 amino acids (aa) 10 aa, 15 aa, 20 aa, 25 aa, 30 aa, 35 aa, 40 aa, to at least about 45 aa in length, usually at least about 50 aa in length, at least about 75 aa, at least about 100 aa, at least about 125 aa, at least about 150 aa in length, at least about 200 aa, at least about 300 aa, at least about 400 aa and can be as long as 500 aa in length or longer, but will usually not exceed about 1000 aa in length, where the fragment will have a stretch of amino acids that is identical to a polypeptide encoded by a polynucleotide having a sequence of any one of the polynucleotide sequences provided herein, or a homolog thereof. The protein variants described herein are encoded by polynucleotides that are within the scope of the invention. The genetic code can be used to select the appropriate codons to construct the corresponding variants.

[0131] While altered expression of the polynucleotides associated with cancer is observed, altered levels of expression of the polypeptides encoded by these polynucleotides may likely play a role in cancers.

[0132] Also included within one embodiment of CA proteins are amino acid variants of the naturally occurring sequences, as determined herein. Preferably, the variants are preferably greater than about 75% homologous to the wild-type sequence, more preferably greater than about 80%, even more preferably greater than about 85% and most preferably greater than 90%. The present application is also directed to proteins containing polypeptides at least 80%, 85%, 90%, 95%, 96%, 97%, 98% or 99% identical to a CA polypeptide sequence set forth herein. As for nucleic acids, homology in this context means sequence similarity or identity, with identity being preferred. This homology will be determined using standard techniques known in the art as are outlined above for the nucleic acid homologies.

[0133] CA proteins of the present invention may be shorter or longer than the wild type amino acid sequences. Thus, in a preferred embodiment, included within the definition of CA proteins are portions or fragments of the wild type sequences herein. In addition, as outlined above, the CA nucleic acids of the invention may be used to obtain additional coding regions, and thus additional protein sequence, using techniques known in the art.

[0134] In a preferred embodiment, the CA proteins are derivative or variant CA proteins as compared to the wild-type sequence. That is, as outlined more fully below, the derivative CA peptide will contain at least one amino acid substitution, deletion or insertion, with amino acid substitutions being particularly preferred. The amino acid substitution, insertion or deletion may occur at any residue within the CA peptide.

[0135] Also included in an embodiment of CA proteins of the present invention are amino acid sequence variants. These variants fall into one or more of three classes: substitutional, insertional or deletional variants. These variants ordinarily are prepared by site-specific mutagenesis of nucleotides in the DNA encoding the CA protein, using cassette or PCR mutagenesis or other techniques well known in the art, to produce DNA encoding the variant, and thereafter expressing the DNA in recombinant cell culture as outlined above. However, variant CA protein fragments having up to about 100-150 residues may be prepared by in vitro synthesis using established techniques. Amino acid sequence variants are characterized by the predetermined nature of the variation, a feature that sets them apart from naturally occurring allelic or interspecies variation of the CA protein amino acid sequence. The variants typically exhibit the same qualitative biological activity as the naturally occurring analogue, although variants can also be selected which have modified characteristics as will be more fully outlined below.

[0136] While the site or region for introducing an amino acid sequence variation is predetermined, the mutation per se need not be predetermined. For example, in order to optimize the performance of a mutation at a given site, random mutagenesis may be conducted at the target codon or region and the expressed CA variants screened for the optimal combination of desired activity. Techniques for making substitution mutations at predetermined sites in DNA having a known sequence are well known, for example, M13 primer mutagenesis and LAR mutagenesis. Screening of the mutants is done using assays of CA protein activities.

[0137] Amino acid substitutions are typically of single residues; insertions usually will be on the order of from about 1 to 20 amino acids, although considerably larger insertions may be tolerated. Deletions range from about 1 to about 20 residues, although in some cases deletions may be much larger.

[0138] Substitutions, deletions, insertions or any combination thereof may be used to arrive at a final derivative. Generally these changes are done on a few amino acids to minimize the alteration of the molecule. However, larger changes may be tolerated in certain circumstances. When small alterations in the characteristics of the CA protein are desired, substitutions are generally made in accordance with the following chart:

CHART 1

| Original Residue | Exemplary Substitutions |
|---|---|
| Ala | Ser |
| Arg | Lys |
| Asn | Gln, His |
| Asp | Glu |
| Cys | Ser |
| Gln | Asn |
| Glu | Asp |
| Gly | Pro |
| His | Asn, Gln |
| Ile | Leu, Val |
| Leu | Ile, Val |
| Lys | Arg, Gln, Glu |
| Met | Leu, Ile |
| Phe | Met, Leu, Tyr |
| Ser | Thr |
| Thr | Ser |
| Trp | Tyr |
| Tyr | Trp, Phe |
| Val | Ile, Leu |

[0139] Substantial changes in function or immunological identity are made by selecting substitutions that are less conservative than those shown in Chart I. For example, substitutions may be made full length to more significantly affect one or more of the following: the structure of the polypeptide backbone in the area of the alteration (e.g., the alpha-helical or beta-sheet structure); the charge or hydrophobicity of the molecule at the target site; and the bulk of the side chain. The substitutions which in general are expected to produce the greatest changes in the polypeptide's properties are those in which (a) a hydrophilic residue, e.g. seryl or threonyl is substituted for (or by) a hydrophobic residue, e.g. leucyl, isoleucyl, phenylalanyl, valyl or alanyl; (b) a cysteine or proline is substituted for (or by) any other residue; (c) a residue having an electropositive side chain, e.g. lysyl, arginyl, or histidyl, is substituted for (or by) an electronegative residue, e.g. glutamyl or aspartyl; or (d) a residue having a bulky side chain, e.g. phenylalanine, is substituted for (or by) one not having a side chain, e.g. glycine.

[0140] The variants typically exhibit the same qualitative biological activity and will elicit the same immune response as the naturally-occurring analogue, although variants also are selected to modify the characteristics of the CA proteins as needed. Alternatively, the variant may be designed such that the biological activity of the CA protein is altered. For example, glycosylation sites may be altered or removed, dominant negative mutations created, etc.

[0141] Covalent modifications of CA polypeptides are included within the scope of this invention, for example for use in screening. One type of covalent modification includes reacting targeted amino acid residues of a CA polypeptide with an organic derivatizing agent that is capable of reacting with selected side chains or the N-or C-terminal residues of a CA polypeptide. Derivatization with bifunctional agents is useful, for instance, for crosslinking CA polypeptides to a water-insoluble support matrix or surface for use in the method for purifying anti-CA antibodies or screening assays, as is more fully described below. Commonly used crosslinking agents include, e.g., 1,1-bis(diazoacetyl)-2-phenylethane, glutaraldehyde, N-hydroxysuccinimide esters, for example, esters with 4-azidosalicylic acid, homobifunctional imidoesters, including disuccinimidyl esters such as 3,3′-dithiobis(succinimidylpropionate), bifunctional maleimides such as bis-N-maleimido-1,8-octane and agents such as methyl-3-[(p-azidophenyl)dithio]propioimidate.

[0142] Other modifications include deamidation of glutaminyl and asparaginyl residues to the corresponding glutamyl and aspartyl residues, respectively, hydroxylation of proline and lysine, phosphorylation of hydroxyl groups of seryl, threonyl or tyrosyl residues, methylation of the a-amino groups of lysine, arginine, and histidine side chains [T. E. Creighton, Proteins: Structure and Molecular Properties, W.H. Freeman & Co., San Francisco, pp. 79-86 (1983)], acetylation of the N-terminal amine, and amidation of any C-terminal carboxyl group.

[0143] Another type of covalent modification of the CA polypeptide included within the scope of this invention comprises altering the native glycosylation pattern of the polypeptide. “Altering the native glycosylation pattern” is intended for purposes herein to mean deleting one or more carbohydrate moieties found in native sequence CA polypeptide, and/or adding one or more glycosylation sites that are not present in the native sequence CA polypeptide.

[0144] Addition of glycosylation sites to CA polypeptides may be accomplished by altering the amino acid sequence thereof. The alteration may be made, for example, by the addition of, or substitution by, one or more serine or threonine residues to the native sequence CA polypeptide (for O-linked glycosylation sites). The CA amino acid sequence may optionally be altered through changes at the DNA level, particularly by mutating the DNA encoding the CA polypeptide at preselected bases such that codons are generated that will translate into the desired amino acids.

[0145] Another means of increasing the number of carbohydrate moieties on the CA polypeptide is by chemical or enzymatic coupling of glycosides to the polypeptide. Such methods are described in the art, e.g., in WO 87/05330 published 11 Sep. 1987, and in Aplin and Wriston, LA Crit. Rev. Biochem., pp. 259-306 (1981).

[0146] Removal of carbohydrate moieties present on the CA polypeptide may be accomplished chemically or enzymatically or by mutational substitution of codons encoding for amino acid residues that serve as targets for glycosylation. Chemical deglycosylation techniques are known in the art and described, for instance, by Hakimuddin, et al., Arch. Biochem. Biophys., 259:52 (1987) and by Edge et al., Anal. Biochem., 118:131 (1981). Enzymatic cleavage of carbohydrate moieties on polypeptides can be achieved by the use of a variety of endo-and exo-glycosidases as described by Thotakura et al., Meth. Enzymol., 138:350 (1987).

[0147] Another type of covalent modification of CA comprises linking the CA polypeptide to one of a variety of nonproteinaceous polymers, e.g., polyethylene glycol, polypropylene glycol, or polyoxyalkylenes, in the manner set forth in U.S. Pat. Nos. 4,640,835; 4,496,689; 4,301,144; 4,670,417; 4,791,192 or 4,179,337.

[0148] CA polypeptides of the present invention may also be modified in a way to form chimeric molecules comprising a CA polypeptide fused to another, heterologous polypeptide or amino acid sequence. In one embodiment, such a chimeric molecule comprises a fusion of a CA polypeptide with a tag polypeptide that provides an epitope to which an anti-tag antibody can selectively bind. The epitope tag is generally placed at the amino-or carboxyl-terminus of the CA polypeptide, although internal fusions may also be tolerated in some instances. The presence of such epitope-tagged forms of a CA polypeptide can be detected using an antibody against the tag polypeptide. Also, provision of the epitope tag enables the CA polypeptide to be readily purified by affinity purification using an anti-tag antibody or another type of affinity matrix that binds to the epitope tag. In an alternative embodiment, the chimeric molecule may comprise a fusion of a CA polypeptide with an immunoglobulin or a particular region of an immunoglobulin. For a bivalent form of the chimeric molecule, such a fusion could be to the Fc region of an IgG molecule.

[0149] Various tag polypeptides and their respective antibodies are well known in the art. Examples include poly-histidine (poly-his) or poly-histidine-glycine (poly-his-gly) tags; the flu HA tag polypeptide and its antibody 12CA5 [Field et al., Mol. Cell. Biol., 8:2159-2165 (1988)]; the c-myc tag and the 8F9, 3C7, 6E10, G4, B7 and 9E10 antibodies thereto [Evan et al., Molecular and Cellular Biology, 5:3610-3616 (1985)]; and the Herpes Simplex virus glycoprotein D (gD) tag and its antibody [Paborsky et al., Protein Engineering, 3(6):547-553 (1990)]. Other tag polypeptides include the Flag-peptide [Hopp et al., BioTechnology, 6:1204-1210 (1988)]; the KT3 epitope peptide [Martin et al., Science, 255:192-194 (1992)]; tubulin epitope peptide [Skinner et al., J. Biol. Chem., 266:15163-15166 (1991)]; and the T7 gene 10 protein peptide tag [Lutz-Freyermuth et al., Proc. Natl. Acad. Sci. USA, 87:6393-6397 (1990)].

[0150] Also included with the definition of CA protein in one embodiment are other CA proteins of the CA family, and CA proteins from other organisms, which are cloned and expressed as outlined below. Thus, probe or degenerate polymerase chain reaction (PCR) primer sequences may be used to find other related CA proteins from humans or other organisms. As will be appreciated by those in the art, particularly useful probe and/or PCR primer sequences include the unique areas of the CA nucleic acid sequence. As is generally known in the art, preferred PCR primers are from about 15 to about 35 nucleotides in length, with from about 20 to about 30 being preferred, and may contain inosine as needed. The conditions for the PCR reaction are well known in the art.

[0151] In addition, as is outlined herein, CA proteins can be made that are longer than those encoded by the nucleic acids of the figures, for example, by the elucidation of additional sequences, the addition of epitope or purification tags, the addition of other fusion sequences, etc.

[0152] CA proteins may also be identified as being encoded by CA nucleic acids. Thus, CA proteins are encoded by nucleic acids that will hybridize to the sequences of the sequence listings, or their complements, as outlined herein.

[0153] CA Antigens and Antibodies Thereto

[0154] In one embodiment, the invention provides CA specific antibodies. In a preferred embodiment, when the CA protein is to be used to generate antibodies, for example for immunotherapy, the CA protein should share at least one epitope or determinant with the full-length protein. By “epitope” or “determinant” herein is meant a portion of a protein that will generate and/or bind an antibody or T-cell receptor in the context of MHC. Thus, in most instances, antibodies made to a smaller CA protein will be able to bind to the full-length protein. In a preferred embodiment, the epitope is unique; that is, antibodies generated to a unique epitope show little or no cross-reactivity.

[0155] Any polypeptide sequence encoded by the CA polynucleotide sequences may be analyzed to determine certain preferred regions of the polypeptide. Regions of high antigenicity are determined from data by DNASTAR analysis by choosing values that represent regions of the polypeptide that are likely to be exposed on the surface of the polypeptide in an environment in which antigen recognition may occur in the process of initiation of an immune response. For example, the amino acid sequence of a polypeptide encoded by a CA polynucleotide sequence may be analyzed using the default parameters of the DNASTAR computer algorithm (DNASTAR, Inc., Madison, Wis.; http://www.dnastar.com/).

[0156] Polypeptide features that may be routinely obtained using the DNASTAR computer algorithm include, but are not limited to, Garnier-Robson alpha-regions, beta-regions, turn-regions, and coil-regions (Garnier et al. J. Mol. Biol., 120: 97 (1978)); Chou-Fasman alpha-regions, beta-regions, and turn-regions (Adv. in Enzymol., 47:45-148 (1978)); Kyte-Doolittle hydrophilic regions and hydrophobic regions (J. Mol. Biol., 157:105-132 (1982)); Eisenberg alpha- and beta-amphipathic regions; Karplus-Schulz flexible regions; Emini surface-forming regions (J. Virol., 55(3):836-839 (1985)); and Jameson-Wolf regions of high antigenic index (CABIOS, 4(1):181-186 (1988)). Kyte-Doolittle hydrophilic regions and hydrophobic regions, Emini surface-forming regions, and Jameson-Wolf regions of high antigenic index (i.e., containing four or more contiguous amino acids having an antigenic index of greater than or equal to 1.5, as identified using the default parameters of the Jameson-Wolf program) can routinely be used to determine polypeptide regions that exhibit a high degree of potential for antigenicity. One approach for preparing antibodies to a protein is the selection and preparation of an amino acid sequence of all or part of the protein, chemically synthesizing the sequence and injecting it into an appropriate animal, typically a rabbit, hamster or a mouse. Oligopeptides can be selected as candidates for the production of an antibody to the CA protein based upon the oligopeptides lying in hydrophilic regions, which are thus likely to be exposed in the mature protein. Additional oligopeptides can be determined using, for example, the Antigenicity Index, Welling, G. W. et al., FEBS Lett. 188:215-218 (1985), incorporated herein by reference.

[0157] In one embodiment, the term “antibody” includes antibody fragments, as are known in the art, including Fab, Fab₂, single chain antibodies (Fv for example), chimeric antibodies, etc., either produced by the modification of whole antibodies or those synthesized de novo using recombinant DNA technologies.

[0158] Methods of preparing polyclonal antibodies are known to the skilled artisan. Polyclonal antibodies can be raised in a mammal, for example, by one or more injections of an immunizing agent and, if desired, an adjuvant. Typically, the immunizing agent and/or adjuvant will be injected in the mammal by multiple subcutaneous or intraperitoneal injections. The immunizing agent may include a protein encoded by a nucleic acid of the figures or fragment thereof or a fusion protein thereof. It may be useful to conjugate the immunizing agent to a protein known to be immunogenic in the mammal being immunized. Examples of such immunogenic proteins include but are not limited to keyhole limpet hemocyanin, serum albumin, bovine thyroglobulin, and soybean trypsin inhibitor. Examples of adjuvants that may be employed include Freund's complete adjuvant and MPL-TDM adjuvant (monophosphoryl Lipid A, synthetic trehalose dicorynomycolate). The immunization protocol may be selected by one skilled in the art without undue experimentation.

[0159] The antibodies may, alternatively, be monoclonal antibodies. Monoclonal antibodies may be prepared using hybridoma methods, such as those described by Kohler and Milstein, Nature, 256:495 (1975). In a hybridoma method, a mouse, hamster, or other appropriate host animal, is typically immunized with an immunizing agent to elicit lymphocytes that produce or are capable of producing antibodies that will specifically bind to the immunizing agent. Alternatively, the lymphocytes may be immunized in vitro. The immunizing agent will typically include a polypeptide encoded by a nucleic acid of Tables 1-28, or fragment thereof or a fusion protein thereof. Generally, either peripheral blood lymphocytes (“PBLs”) are used if cells of human origin are desired, or spleen cells or lymph node cells are used if non-human mammalian sources are desired. The lymphocytes are then fused with an immortalized cell line using a suitable fusing agent, such as polyethylene glycol, to form a hybridoma cell (Goding, Monoclonal Antibodies: Principles and Practice, Academic Press, (1986) pp. 59-103). Immortalized cell lines are usually transformed mammalian cells, particularly myeloma cells of rodent, bovine and human origin. Usually, rat or mouse myeloma cell lines are employed. The hybridoma cells may be cultured in a suitable culture medium that preferably contains one or more substances that inhibit the growth or survival of the unfused, immortalized cells. For example, if the parental cells lack the enzyme hypoxanthine guanine phosphoribosyl transferase (HGPRT or HPRT), the culture medium for the hybridomas typically will include hypoxanthine, aminopterin, and thymidine (“HAT medium”), which substances prevent the growth of HGPRT-deficient cells.

[0160] Monoclonal antibody technology is used in implementing research, diagnosis and therapy. Monoclonal antibodies are used in radioimmunoassays, enzyme-linked immunosorbent assays, immunocytopathology, and flow cytometry for in vitro diagnosis, and in vivo for diagnosis and immunotherapy of human disease. Waldmann, T. A. (1991) Science 252:1657-1662. In particular, monoclonal antibodies have been widely applied to the diagnosis and therapy of cancer, wherein it is desirable to target malignant lesions while avoiding normal tissue. See, e.g., U.S. Pat. No. 4,753,894 to Frankel, et al.; U.S. Pat. No. 4,938,948 to Ring et al.; and U.S. Pat. No. 4,956,453 to Bjorn et al.

[0161] In one embodiment, the antibodies are bispecific antibodies. Bispecific antibodies are monoclonal, preferably human or humanized, antibodies that have binding specificities for at least two different antigens. A number of “humanized” antibody molecules comprising an antigen-binding site derived from a non-human immunoglobulin have been described, including chimeric antibodies having rodent V regions and their associated CDRs fused to human constant domains (Winter et al. (1991) Nature 349:293-299; Lobuglio et al. (1989) Proc. Nat. Acad. Sci. USA 86:4220-4224; Shaw et al. (1987) J Immunol. 138:4534-4538; and Brown et al. (1987) Cancer Res. 47:3577-3583), rodent CDRs grafted into a human supporting FR prior to fusion with an appropriate human antibody constant domain (Riechmann et al. (1988) Nature 332:323-327; Verhoeyen et al. (1988) Science 239:1534-1536; and Jones et al. (1986) Nature 321:522-525), and rodent CDRs supported by recombinantly veneered rodent FRs (European Patent Publication No. 519,596, published Dec. 23, 1992). These “humanized” molecules are designed to minimize unwanted immunological response toward rodent antihuman antibody molecules which limits the duration and effectiveness of therapeutic applications of those moieties in human recipients. In the present case, one of the binding specificities is for a protein encoded by a nucleic acid of Tables 1-28, or a fragment thereof, the other one is for any other antigen, and preferably for a cell-surface protein or receptor or receptor subunit, preferably one that is tumor specific.

[0162] In a preferred embodiment, the antibodies to CA are capable of reducing or eliminating the biological function of CA, as is described below. That is, the addition of anti-CA antibodies (either polyclonal or preferably monoclonal) to CA (or cells containing CA) may reduce or eliminate the CA activity. Generally, at least a 25% decrease in activity is preferred, with at least about 50% being particularly preferred and about a 95-100% decrease being especially preferred.

[0163] In a preferred embodiment the antibodies to the CA proteins are humanized antibodies. “Humanized” antibodies refer to a molecule having an antigen binding site that is substantially derived from an immunoglobulin from a non-human species and the remaining immunoglobulin structure of the molecule based upon the structure and/or sequence of a human immunoglobulin. The antigen binding site may comprise either complete variable domains fused onto constant domains or only the complementarity determining regions (CDRs) grafted onto appropriate framework regions in the variable domains. Antigen binding sites may be wild type or modified by one or more amino acid substitutions, e.g., modified to resemble human immunoglobulin more closely. Alternatively, a humanized antibody may be derived from a chimeric antibody that retains or substantially retains the antigen-binding properties of the parental, non-human, antibody but which exhibits diminished immunogenicity as compared to the parental antibody when administered to humans. The phrase “chimeric antibody,” as used herein, refers to an antibody containing sequence derived from two different antibodies (see, e.g., U.S. Pat. No. 4,816,567) that typically originate from different species. Typically, in these chimeric antibodies, the variable region of both light and heavy chains mimics the variable regions of antibodies derived from one species of mammals, while the constant portions are homologous to the sequences in antibodies derived from another. Most typically, chimeric antibodies comprise human and murine antibody fragments, generally human constant and mouse variable regions. Humanized antibodies include human immunoglobulins (recipient antibody) in which residues form a complementary determining region (CDR) of the recipient are replaced by residues from a CDR of a non-human species (donor antibody) such as mouse, rat or rabbit having the desired specificity, affinity and capacity. In some instances, Fv framework residues of the human immunoglobulin are replaced by corresponding non-human residues. Humanized antibodies may also comprise residues that are found neither in the recipient antibody nor in the imported CDR or framework sequences. In general, the humanized antibody will comprise substantially all of at least one, and typically two, variable domains, in which all or substantially all of the CDR regions correspond to those of a non-human immunoglobulin and all or substantially all of the framework residues (FR) regions are those of a human immunoglobulin consensus sequence. The humanized antibody optimally also will comprise at least a portion of an immunoglobulin constant region (Fc), typically that of a human immunoglobulin (Jones et al., Nature, 321:522-525 (1986); Riechmann et al., Nature, 332:323-329 (1988); and Presta, Curr. Op. Struct. Biol., 2:593-596 (1992)). One clear advantage to such chimeric forms is that, for example, the variable regions can conveniently be derived from presently known sources using readily available hybridomas or B cells from non human host organisms in combination with constant regions derived from, for example, human cell preparations. While the variable region has the advantage of ease of preparation, and the specificity is not affected by its source, the constant region being human, is less likely to elicit an immune response from a human subject when the antibodies are injected than would the constant region from a non-human source. However, the definition is not limited to this particular example.

[0164] Because humanized antibodies are far less immunogenic in humans than the parental mouse monoclonal antibodies, they can be used for the treatment of humans with far less risk of anaphylaxis. Thus, these antibodies may be preferred in therapeutic applications that involve in vivo administration to a human such as, e.g., use as radiation sensitizers for the treatment of neoplastic disease or use in methods to reduce the side effects of, e.g., cancer therapy. Methods for humanizing non-human antibodies are well known in the art. Generally, a humanized antibody has one or more amino acid residues introduced into it from a source that is non-human. These non-human amino acid residues are often referred to as import residues, which are typically taken from an import variable domain. Humanization can be essentially performed following the method of Winter and co-workers (Jones et al., Nature 321:522-525 (1986); Riechmann et al., Nature 332:323-327 (1988); Verhoeyen et al., Science 239:1534-1536 (1988)), by substituting rodent CDRs or CDR sequences for the corresponding sequences of a human antibody. Accordingly, such humanized antibodies are chimeric antibodies (U.S. Pat. No. 4,816,567), wherein substantially less than an intact human variable domain has been substituted by the corresponding sequence from a non-human species. In practice, humanized antibodies are typically human antibodies in which some CDR residues and possibly some FR residues are substituted by residues from analogous sites in rodent antibodies.

[0165] Human antibodies can also be produced using various techniques known in the art, including phage display libraries [Hoogenboom and Winter, J. Mol. Biol., 227:381 (1991); Marks et al., J. Mol. Biol., 222:581 (1991)]. The techniques of Cole et al. and Boerner et al. are also available for the preparation of human monoclonal antibodies [Cole et al., Monoclonal Antibodies and Cancer Therapy, Alan R. Liss, p. 77 (1985) and Boerner et al., J. Immunol., 147(l):86-95 (1991)]. Humanized antibodies may be achieved by a variety of methods including, for example: (1) grafting the non-human complementarity determining regions (CDRs) onto a human framework and constant region (a process referred to in the art as “humanizing”), or, alternatively, (2) transplanting the entire non-human variable domains, but “cloaking” them with a human-like surface by replacement of surface residues (a process referred to in the art as “veneering”). In the present invention, humanized antibodies will include both “humanized” and “veneered” antibodies. Similarly, human antibodies can be made by introducing human immunoglobulin loci into transgenic animals, e.g., mice in which the endogenous immunoglobulin genes have been partially or completely inactivated. Upon challenge, human antibody production is observed, which closely resembles that seen in humans in all respects, including gene rearrangement, assembly, and antibody repertoire. This approach is described, for example, in U.S. Pat. Nos. 5,545,807; 5,545,806; 5,569,825; 5,625,126; 5,633,425; 5,661,016, and in the following scientific publications: Marks et al., Bio/Technology 10, 779-783 (1992); Lonberg et al., Nature 368 856-859 (1994); Morrison, Nature 368, 812-13 (1994); Fishwild et al., Nature Biotechnology 14, 845-51 (1996); Neuberger, Nature Biotechnology 14, 826 (1996); Lonberg and Huszar, Intern. Rev. Immunol. 13 65-93 (1995); Jones et al., Nature 321:522-525 (1986); Morrison et al., Proc. Natl. Acad. Sci, US.A., 81:6851-6855 (1984); Morrison and Oi, Adv. Immunol., 44:65-92 (1988); Verhoeyer et al., Science 239:1534-1536 (1988); Padlan, Molec. Immun. 28:489-498 (1991); Padlan, Molec. Immunol. 31(3):169-217 (1994); and Kettleborough, C. A. et al., Protein Eng. 4(7):773-83 (1991) each of which is incorporated herein by reference.

[0166] The phrase “complementarity determining region” refers to amino acid sequences which together define the binding affinity and specificity of the natural Fv region of a native immunoglobulin binding site. See, e.g., Chothia et al., J. Mol. Biol. 196:901-917 (1987); Kabat et al., U.S. Dept. of Health and Human Services NIH Publication No. 91-3242 (1991). The phrase “constant region” refers to the portion of the antibody molecule that confers effector functions. In the present invention, mouse constant regions are substituted by human constant regions. The constant regions of the subject humanized antibodies are derived from human immunoglobulins. The heavy chain constant region can be selected from any of the five isotypes: alpha, delta, epsilon, gamma or mu. One method of humanizing antibodies comprises aligning the non-human heavy and light chain sequences to human heavy and light chain sequences, selecting and replacing the non-human framework with a human framework based on such alignment, molecular modeling to predict the conformation of the humanized sequence and comparing to the conformation of the parent antibody. This process is followed by repeated back mutation of residues in the CDR region that disturb the structure of the CDRs until the predicted conformation of the humanized sequence model closely approximates the conformation of the non-human CDRs of the parent non-human antibody. Such humanized antibodies may be further derivatized to facilitate uptake and clearance, e.g, via Ashwell receptors. See, e.g., U.S. Pat. Nos. 5,530,101 and 5,585,089 which are incorporated herein by reference.

[0167] Humanized antibodies to CA polypeptides can also be produced using transgenic animals that are engineered to contain human immunoglobulin loci. For example, WO 98/24893 discloses transgenic animals having a human Ig locus wherein the animals do not produce functional endogenous immunoglobulins due to the inactivation of endogenous heavy and light chain loci. WO 91/10741 also discloses transgenic non-primate mammalian hosts capable of mounting an immune response to an immunogen, wherein the antibodies have primate constant and/or variable regions, and wherein the endogenous immunoglobulin-encoding loci are substituted or inactivated. WO 96/30498 discloses the use of the Cre/Lox system to modify the immunoglobulin locus in a mammal, such as to replace all or a portion of the constant or variable region to form a modified antibody molecule. WO 94/02602 discloses non-human mammalian hosts having inactivated endogenous Ig loci and functional human Ig loci. U.S. Pat. No. 5,939,598 discloses methods of making transgenic mice in which the mice lack endogenous heavy chains, and express an exogenous immunoglobulin locus comprising one or more xenogeneic constant regions.

[0168] Using a transgenic animal described above, an immune response can be produced to a selected antigenic molecule, and antibody-producing cells can be removed from the animal and used to produce hybridomas that secrete human monoclonal antibodies. Immunization protocols, adjuvants, and the like are known in the art, and are used in immunization of, for example, a transgenic mouse as described in WO 96/33735. The monoclonal antibodies can be tested for the ability to inhibit or neutralize the biological activity or physiological effect of the corresponding protein.

[0169] In the present invention, CA polypeptides of the invention and variants thereof are used to immunize a transgenic animal as described above. Monoclonal antibodies are made using methods known in the art, and the specificity of the antibodies is tested using isolated CA polypeptides. Methods for preparation of the human or primate CA or an epitope thereof include, but are not limited to chemical synthesis, recombinant DNA techniques or isolation from biological samples. Chemical synthesis of a peptide can be performed, for example, by the classical Merrifeld method of solid phase peptide synthesis (Merrifeld, J. Am. Chem. Soc. 85:2149, 1963 which is incorporated by reference) or the FMOC strategy on a Rapid Automated Multiple Peptide Synthesis system (E. I. du Pont de Nemours Company, Wilmington, Del.) (Caprino and Han, J. Org. Chem. 37:3404, 1972 which is incorporated by reference).

[0170] Polyclonal antibodies can be prepared by immunizing rabbits or other animals by injecting antigen followed by subsequent boosts at appropriate intervals. The animals are bled and sera assayed against purified CA proteins usually by ELISA or by bioassay based upon the ability to block the action of CA proteins. When using avian species, e.g., chicken, turkey and the like, the antibody can be isolated from the yolk of the egg. Monoclonal antibodies can be prepared after the method of Milstein and Kohler by fusing splenocytes from immunized mice with continuously replicating tumor cells such as myeloma or lymphoma cells. (Milstein and Kohler, Nature 256:495-497, 1975; Gulfre and Milstein, Methods in Enzymology: Immunochemical Techniques 73:1-46, Langone and Banatis eds., Academic Press, 1981 which are incorporated by reference). The hybridoma cells so formed are then cloned by limiting dilution methods and supernates assayed for antibody production by ELISA, RIA or bioassay.

[0171] The unique ability of antibodies to recognize and specifically bind to target proteins provides an approach for treating an overexpression of the protein. Thus, another aspect of the present invention provides for a method for preventing or treating diseases involving overexpression of a CA polypeptide by treatment of a patient with specific antibodies to the CA protein.

[0172] Specific antibodies, either polyclonal or monoclonal, to the CA proteins can be produced by any suitable method known in the art as discussed above. For example, murine or human monoclonal antibodies can be produced by hybridoma technology or, alternatively, the CA proteins, or an immunologically active fragment thereof, or an anti-idiotypic antibody, or fragment thereof can be administered to an animal to elicit the production of antibodies capable of recognizing and binding to the CA proteins. Such antibodies can be from any class of antibodies including, but not limited to IgG, IgA, IgM, IgD, and IgE or in the case of avian species, IgY and from any subclass of antibodies.

[0173] By immunotherapy is meant treatment of a cancer with an antibody raised against a CA protein. As used herein, immunotherapy can be passive or active. Passive immunotherapy as defined herein is the passive transfer of antibody to a recipient (patient). Active immunization is the induction of antibody and/or T-cell responses in a recipient (patient). Induction of an immune response is the result of providing the recipient with an antigen to which antibodies are raised. As appreciated by one of ordinary skill in the art, the antigen may be provided by injecting a polypeptide against which antibodies are desired to be raised into a recipient, or contacting the recipient with a nucleic acid capable of expressing the antigen and under conditions for expression of the antigen.

[0174] In a preferred embodiment, oncogenes which encode secreted growth factors may be inhibited by raising antibodies against CA proteins that are secreted proteins as described above. Without being bound by theory, antibodies used for treatment, bind and prevent the secreted protein from binding to its receptor, thereby inactivating the secreted CA protein.

[0175] In another preferred embodiment, the CA protein to which antibodies are raised is a transmembrane protein. Without being bound by theory, antibodies used for treatment, bind the extracellular domain of the CA protein and prevent it from binding to other proteins, such as circulating ligands or cell-associated molecules. The antibody may cause down-regulation of the transmembrane CA protein. As will be appreciated by one of ordinary skill in the art, the antibody may be a competitive, non-competitive or uncompetitive inhibitor of protein binding to the extracellular domain of the CA protein. The antibody is also an antagonist of the CA protein. Further, the antibody prevents activation of the transmembrane CA protein. In one aspect, when the antibody prevents the binding of other molecules to the CA protein, the antibody prevents growth of the cell. The antibody may also sensitize the cell to cytotoxic agents, including, but not limited to TNF-α, TNF-β, IL-1, INF-γ and IL-2, or chemotherapeutic agents including 5FU, vinblastine, actinomycin D, cisplatin, methotrexate, and the like. In some instances the antibody belongs to a sub-type that activates serum complement when complexed with the transmembrane protein thereby mediating cytotoxicity. Thus, cancers may be treated by administering to a patient antibodies directed against the transmembrane CA protein.

[0176] In another preferred embodiment, the antibody is conjugated to a therapeutic moiety. In one aspect the therapeutic moiety is a small molecule that modulates the activity of the CA protein. In another aspect the therapeutic moiety modulates the activity of molecules associated with or in close proximity to the CA protein. The therapeutic moiety may inhibit enzymatic activity such as protease or protein kinase activity associated with cancer.

[0177] In a preferred embodiment, the therapeutic moiety may also -be a cytotoxic agent. In this method, radioisotopes, natural toxins, chemotherapy agents, or other substances (such as biological response modifiers) are chemically linked or conjugated to a monoclonal antibody to form “immunoconjugates” and “immunotoxins” which target the cytotoxic agent to tumor tissue or cells resulting in a reduction in the number of afflicted cells, thereby reducing symptoms associated with cancers, including lymphoma. Cytotoxic agents are numerous and varied and include, but are not limited to, cytotoxic drugs or toxins or active fragments of such toxins. Suitable toxins and their corresponding fragments include diphtheria A chain, exotoxin A chain, ricin A chain, abrin A chain, curcin, crotin, phenomycin, enomycin and the like. Cytotoxic agents also include radiochemicals made by conjugating radioisotopes to antibodies raised against CA proteins, or binding of a radionuclide to a chelating agent that has been covalently attached to the antibody. Targeting the therapeutic moiety to transmembrane CA proteins not only serves to increase the local concentration of therapeutic moiety in the cancer of interest, i.e., lymphoma, but also serves to reduce deleterious side effects that may be associated with the therapeutic moiety. A number of investigators have used monoclonal antibodies as carriers of cytotoxic substances in attempts to selectively direct those agents to malignant tissue. More particularly, a number of monoclonal antibodies have been conjugated to toxins such as ricin, abrin, diphtheria toxin and Pseudomonas exotoxin or to enzymatically active portions (A chains) thereof via heterobifunctional agents. See, e.g., U.S. Pat. No. 4,753,894 to Frankel et al.; Nevelle, et al. (1982) Immunol Rev 62:75-91; Ross et al. (1980) Eur. J Biochem 104; Vitteta et al. (1982) Immunol Rev 62:158-183; Raso et al. (1982) Cancer Res 42:457-464, and Trowbridge et al. (1981) Nature 294:171-173.

[0178] In another preferred embodiment, the CA protein against which the antibodies are raised is an intracellular protein. In this case, the antibody may be conjugated to a protein that facilitates entry into the cell. In one case, the antibody enters the cell by endocytosis. In another embodiment, a nucleic acid encoding the antibody is administered to the individual or cell. Moreover, wherein the CA protein can be targeted within a cell, e.g., the nucleus, an antibody thereto contains a signal for that target localization, e.g., a nuclear localization signal.

[0179] The CA antibodies of the invention specifically bind to CA proteins. By “specifically bind” herein is meant that the antibodies bind to the protein with a binding constant in the range of 10⁻⁴-10⁻⁶ M⁻¹, with a preferred range being 10⁻⁷-10⁻⁹ M⁻¹.

[0180] In a preferred embodiment, the CA protein is purified or isolated after expression. CA proteins may be isolated or purified in a variety of ways known to those skilled in the art depending on what other components are present in the sample. Standard purification methods include electrophoretic, molecular, immunological and chromatographic techniques, including ion exchange, hydrophobic, affinity, and reverse-phase HPLC chromatography, and chromatofocusing. For example, the CA protein may be purified using a standard anti-CA antibody column. Ultrafiltration and diafiltration techniques, in conjunction with protein concentration, are also useful. For general guidance in suitable purification techniques, see Scopes, R., Protein Purification, Springer-Verlag, NY (1982). The degree of purification necessary will vary depending on the use of the CA protein. In some instances no purification will be necessary.

[0181] Detection of Cancer Phenotype

[0182] Once expressed and purified if necessary, the CA proteins and nucleic acids are useful in a number of applications. In one aspect, the expression levels of genes are determined for different cellular states in the cancer phenotype; that is, the expression levels of genes in normal tissue and in cancer tissue (and in some cases, for varying severities of lymphoma that relate to prognosis, as outlined below) are evaluated to provide expression profiles. An expression profile of a particular cell state or point of development is essentially a “fingerprint” of the state; while two states may have any particular gene similarly expressed, the evaluation of a number of genes simultaneously allows the generation of a gene expression profile that is unique to the state of the cell. By comparing expression profiles of cells in different states, information regarding which genes are important (including both up- and down-regulation of genes) in each of these states is obtained. Then, diagnosis may be done or confirmed: does tissue from a particular patient have the gene expression profile of normal or cancer tissue.

[0183] “Differential expression,” or equivalents used herein, refers to both qualitative as well as quantitative differences in the temporal and/or cellular expression patterns of genes, within and among the cells. Thus, a differentially expressed gene can qualitatively have its expression altered, including an activation or inactivation, in, for example, normal versus cancer tissue. That is, genes may be turned on or turned off in a particular state, relative to another state. As is apparent to the skilled artisan, any comparison of two or more states can be made. Such a qualitatively regulated gene will exhibit an expression pattern within a state or cell type which is detectable by standard techniques in one such state or cell type, but is not detectable in both. Alternatively, the determination is quantitative in that expression is increased or decreased; that is, the expression of the gene is either up-regulated, resulting in an increased amount of transcript, or down-regulated, resulting in a decreased amount of transcript. The degree to which expression differs need only be large enough to quantify via standard characterization techniques as outlined below, such as by use of Affymetrix GeneChip® expression arrays, Lockhart, Nature Biotechnology, 14:1675-1680 (1996), hereby expressly incorporated by reference. Other techniques include, but are not limited to, quantitative reverse transcriptase PCR, Northern analysis and RNase protection. As outlined above, preferably the change in expression (i.e. upregulation or downregulation) is at least about 50%, more preferably at least about 100%, more preferably at least about 150%, more preferably, at least about 200%, with from 300 to at least 1000% being especially preferred.

[0184] As will be appreciated by those in the art, this may be done by evaluation at either the gene transcript, or the protein level; that is, the amount of gene expression may be monitored using nucleic acid probes to the DNA or RNA equivalent of the gene transcript, and the quantification of gene expression levels, or, alternatively, the final gene product itself (protein) can be monitored, for example through the use of antibodies to the CA protein and standard immunoassays (ELISAs, etc.) or other techniques, including mass spectroscopy assays, 2D gel electrophoresis assays, etc. Thus, the proteins corresponding to CA genes, i.e. those identified as being important in a particular cancer phenotype, i.e., lymphoma, can be evaluated in a diagnostic test specific for that cancer.

[0185] In a preferred embodiment, gene expression monitoring is done and a number of genes, i.e. an expression profile, is monitored simultaneously, although multiple protein expression monitoring can be done as well. Similarly, these assays may be done on an individual basis as well.

[0186] In this embodiment, the CA nucleic acid probes may be attached to biochips as outlined herein for the detection and quantification of CA sequences in a particular cell. The assays are done as is known in the art. As will be appreciated by those in the art, any number of different CA sequences may be used as probes, with single sequence assays being used in some cases, and a plurality of the sequences described herein being used in other embodiments. In addition, while solid-phase assays are described, any number of solution based assays may be done as well.

[0187] In a preferred embodiment, both solid and solution based assays may be used to detect CA sequences that are up-regulated or down-regulated in cancers as compared to normal tissue. In instances where the CA sequence has been altered but shows the same expression profile or an altered expression profile, the protein will be detected as outlined herein.

[0188] In a preferred embodiment nucleic acids encoding the CA protein are detected. Although DNA or RNA encoding the CA protein may be detected, of particular interest are methods wherein the mRNA encoding a CA protein is detected. The presence of mRNA in a sample is an indication that the CA gene has been transcribed to form the mRNA, and suggests that the protein is expressed. Probes to detect the mRNA can be any nucleotide/deoxynucleotide probe that is complementary to and base pairs with the mRNA and includes but is not limited to oligonucleotides, cDNA or RNA. Probes also should contain a detectable label, as defined herein. In one method the mRNA is detected after immobilizing the nucleic acid to be examined on a solid support such as nylon membranes and hybridizing the probe with the sample. Following washing to remove the non-specifically bound probe, the label is detected. In another method detection of the mRNA is performed in situ. In this method permeabilized cells or tissue samples are contacted with a detectably labeled nucleic acid probe for sufficient time to allow the probe to hybridize with the target mRNA. Following washing to remove the non-specifically bound probe, the label is detected. For example a digoxygenin labeled riboprobe (RNA probe) that is complementary to the mRNA encoding a CA protein is detected by binding the digoxygenin with an anti-digoxygenin secondary antibody and developed with nitro blue tetrazolium and 5-bromo-4-chloro-3-indoyl phosphate.

[0189] In a preferred embodiment, any of the three classes of proteins as described herein (secreted, transmembrane or intracellular proteins) are used in diagnostic assays. The CA proteins, antibodies, nucleic acids, modified proteins and cells containing CA sequences are used in diagnostic assays. This can be done on an individual gene or corresponding polypeptide level, or as sets of assays.

[0190] As described and defined herein, CA proteins find use as markers of cancers, including lymphomas such as, but not limited to, Hodgkin's and non-Hodgkin's lymphoma. Detection of these proteins in putative cancer tissue or patients allows for a determination or diagnosis of the type of cancer. Numerous methods known to those of ordinary skill in the art find use in detecting cancers. In one embodiment, antibodies are used to detect CA proteins. A preferred method separates proteins from a sample or patient by electrophoresis on a gel (typically a denaturing and reducing protein gel, but may be any other type of gel including isoelectric focusing gels and the like). Following separation of proteins, the CA protein is detected by immunoblotting with antibodies raised against the CA protein. Methods of immunoblotting are well known to those of ordinary skill in the art.

[0191] In another preferred method, antibodies to the CA protein find use in in situ imaging techniques. In this method cells are contacted with from one to many antibodies to the CA protein(s). Following washing to remove non-specific antibody binding, the presence of the antibody or antibodies is detected. In one embodiment the antibody is detected by incubating with a secondary antibody that contains a detectable label. In another method the primary antibody to the CA protein(s) contains a detectable label. In another preferred embodiment each one of multiple primary antibodies contains a distinct and detectable label. This method finds particular use in simultaneous screening for a plurality of CA proteins. As will be appreciated by one of ordinary skill in the art, numerous other histological imaging techniques are useful in the invention.

[0192] In a preferred embodiment the label is detected in a fluorometer that has the ability to detect and distinguish emissions of different wavelengths. In addition, a fluorescence activated cell sorter (FACS) can be used in the method.

[0193] In another preferred embodiment, antibodies find use in diagnosing cancers from blood samples. As previously described, certain CA proteins are secreted/circulating molecules. Blood samples, therefore, are useful as samples to be probed or tested for the presence of secreted CA proteins. Antibodies can be used to detect the CA proteins by any of the previously described immunoassay techniques including ELISA, immunoblotting (Western blotting), immunoprecipitation, BIACORE technology and the like, as will be appreciated by one of ordinary skill in the art.

[0194] In a preferred embodiment, in situ hybridization of labeled CA nucleic acid probes to tissue arrays is done. For example, arrays of tissue samples, including CA tissue and/or normal tissue, are made. In situ hybridization as is known in the art can then be done.

[0195] It is understood that when comparing the expression fingerprints between an individual and a standard, the skilled artisan can make a diagnosis as well as a prognosis. It is further understood that the genes that indicate diagnosis may differ from those that indicate prognosis.

[0196] In a preferred embodiment, the CA proteins, antibodies, nucleic acids, modified proteins and cells containing CA sequences are used in prognosis assays. As above, gene expression profiles can be generated that correlate to cancer, especially lymphoma, severity, in terms of long term prognosis. Again, this may be done on either a protein or gene level, with the use of genes being preferred. As above, the CA probes are attached to biochips for the detection and quantification of CA sequences in a tissue or patient. The assays proceed as outlined for diagnosis.

[0197] Screening for CA-Targeted Drugs

[0198] In one embodiment, any of the CA sequences as described herein are used in drug screening assays. The CA proteins, antibodies, nucleic acids, modified proteins and cells containing CA sequences are used in drug screening assays or by evaluating the effect of drug candidates on a “gene expression profile” or expression profile of polypeptides. In one embodiment, the expression profiles are used, preferably in conjunction with high throughput screening techniques to allow monitoring for expression profile genes after treatment with a candidate agent, Zlokarnik, et al., Science 279, 84-8 (1998), Heid, et al., Genome Res., 6:986-994 (1996).

[0199] In another embodiment, the CA proteins, antibodies, nucleic acids, modified proteins and cells containing the native or modified CA proteins are used in screening assays. That is, the present invention provides novel methods for screening for compositions that modulate the cancer phenotype. As above, this can be done by screening for modulators of gene expression or for modulators of protein activity. Similarly, this may be done on an individual gene or protein level or by evaluating the effect of drug candidates on a “gene expression profile”. In a preferred embodiment, the expression profiles are used, preferably in conjunction with high throughput screening techniques to allow monitoring for expression profile genes after treatment with a candidate agent, see Zlokarnik, supra.

[0200] Having identified the CA genes herein, a variety of assays to evaluate the effects of agents on gene expression may be executed. In a preferred embodiment, assays may be run on an individual gene or protein level. That is, having identified a particular gene as aberrantly regulated in cancer, candidate bioactive agents may be screened to modulate the gene's regulation. “Modulation” thus includes both an increase and a decrease in gene expression or activity. The preferred amount of modulation will depend on the original change of the gene expression in normal versus tumor tissue, with changes of at least 10%, preferably 50%, more preferably 100-300%, and in some embodiments 300-1000% or greater. Thus, if a gene exhibits a 4 fold increase in tumor compared to normal tissue, a decrease of about four fold is desired; a 10 fold decrease in tumor compared to normal tissue gives a 10 fold increase in expression for a candidate agent is desired, etc. Alternatively, where the CA sequence has been altered but shows the same expression profile or an altered expression profile, the protein will be detected as outlined herein.

[0201] As will be appreciated by those in the art, this may be done by evaluation at either the gene or the protein level; that is, the amount of gene expression may be monitored using nucleic acid probes and the quantification of gene expression levels, or, alternatively, the level of the gene product itself can be monitored, for example through the use of antibodies to the CA protein and standard immunoassays. Alternatively, binding and bioactivity assays with the protein may be done as outlined below.

[0202] In a preferred embodiment, gene expression monitoring is done and a number of genes, i.e. an expression profile, is monitored simultaneously, although multiple protein expression monitoring can be done as well.

[0203] In this embodiment, the CA nucleic acid probes are attached to biochips as outlined herein for the detection and quantification of CA sequences in a particular cell. The assays are further described below.

[0204] Generally, in a preferred embodiment, a candidate bioactive agent is added to the cells prior to analysis. Moreover, screens are provided to identify a candidate bioactive agent that modulates a particular type of cancer, modulates CA proteins, binds to a CA protein, or interferes between the binding of a CA protein and an antibody.

[0205] The term “candidate bioactive agent” or “drug candidate” or grammatical equivalents as used herein describes any molecule, e.g., protein, oligopeptide, small organic or inorganic molecule, polysaccharide, polynucleotide, etc., to be tested for bioactive agents that are capable of directly or indirectly altering either the cancer phenotype, binding to and/or modulating the bioactivity of a CA protein, or the expression of a CA sequence, including both nucleic acid sequences and protein sequences. In a particularly preferred embodiment, the candidate agent suppresses a CA phenotype, for example to a normal tissue fingerprint. Similarly, the candidate agent preferably suppresses a severe CA phenotype. Generally a plurality of assay mixtures are run in parallel with different agent concentrations to obtain a differential response to the various concentrations. Typically, one of these concentrations serves as a negative control, i.e., at zero concentration or below the level of detection.

[0206] In one aspect, a candidate agent will neutralize the effect of a CA protein. By “neutralize” is meant that activity of a protein is either inhibited or counter acted against so as to have substantially no effect on a cell.

[0207] Candidate agents encompass numerous chemical classes, though typically they are organic or inorganic molecules, preferably small organic compounds having a molecular weight of more than 100 and less than about 2,500 Daltons. Preferred small molecules are less than 2000, or less than 1500 or less than 1000 or less than 500 D. Candidate agents comprise functional groups necessary for structural interaction with proteins, particularly hydrogen bonding, and typically include at least an amine, carbonyl, hydroxyl or carboxyl group, preferably at least two of the functional chemical groups. The candidate agents often comprise cyclical carbon or heterocyclic structures and/or aromatic or polyaromatic structures substituted with one or more of the above functional groups. Candidate agents are also found among biomolecules including peptides, saccharides, fatty acids, steroids, purines, pyrimidines, derivatives, structural analogs or combinations thereof. Particularly preferred are peptides.

[0208] Candidate agents are obtained from a wide variety of sources including libraries of synthetic or natural compounds.. For example, numerous means are available for random and directed synthesis of a wide variety of organic compounds and biomolecules, including expression of randomized oligonucleotides. Alternatively, libraries of natural compounds in the form of bacterial, fungal, plant and animal extracts are available or readily produced. Additionally, natural or synthetically produced libraries and compounds are readily modified through conventional chemical, physical and biochemical means. Known pharmacological agents may be subjected to directed or random chemical modifications, such as acylation, alkylation, esterification, or amidification to produce structural analogs.

[0209] In one embodiment, the candidate bioactive agents are proteins. By “protein” herein is meant at least two covalently attached amino acids, which includes proteins, polypeptides, oligopeptides and peptides. The protein may be made up of naturally occurring amino acids and peptide bonds, or synthetic peptidomimetic structures. Thus “amino acid”, or “peptide residue”, as used herein means both naturally occurring and synthetic amino acids. For example, homo-phenylalanine, citrulline and norleucine are considered amino acids for the purposes of the invention. “Amino acid” also includes imino acid residues such as proline and hydroxyproline. The side chains may be in either the (R) or the (S) configuration. In the preferred embodiment, the amino acids are in the (S) or L-configuration. If non-naturally occurring side chains are used, non-amino acid substituents may be used, for example to prevent or retard in vivo degradations.

[0210] In a preferred embodiment, the candidate bioactive agents are naturally occurring proteins or fragments of naturally occurring proteins. Thus, for example, cellular extracts containing proteins, or random or directed digests of proteinaceous cellular extracts, may be used. In this way libraries of prokaryotic and eukaryotic proteins may be made for screening in the methods of the invention. Particularly preferred in this embodiment are libraries of bacterial, fungal, viral, and mammalian proteins, with the latter being preferred, and human proteins being especially preferred.

[0211] In another preferred embodiment, the candidate bioactive agents are peptides of from about 5 to about 30 amino acids, with from about 5 to about 20 amino acids being preferred, and from about 7 to about 15 being particularly preferred. The peptides may be digests of naturally occurring proteins as is outlined above, random peptides, or “biased” random peptides. By “randomized” or grammatical equivalents herein is meant that each nucleic acid and peptide consists of essentially random nucleotides and amino acids, respectively. Since generally these random peptides (or nucleic acids, discussed below) are chemically synthesized, they may incorporate any nucleotide or amino acid at any position. The synthetic process can be designed to generate randomized proteins or nucleic acids, to allow the formation of all or most of the possible combinations over the length of the sequence, thus forming a library of randomized candidate bioactive proteinaceous agents.

[0212] In one embodiment, the library is fully randomized, with no sequence preferences or constants at any position. In a preferred embodiment, the library is biased. That is, some positions within the sequence are either held constant, or are selected from a limited number of possibilities. For example, in a preferred embodiment, the nucleotides or amino acid residues are randomized within a defined class, for example, of hydrophobic amino acids, hydrophilic residues, sterically biased (either small or large) residues, towards the creation of nucleic acid binding domains, the creation of cysteines, for cross-linking, prolines for SH-3 domains, serines, threonines, tyrosines or histidines for phosphorylation sites, etc., or to purines, etc.

[0213] In one embodiment, the candidate bioactive agents are nucleic acids. As described generally for proteins, nucleic acid candidate bioactive agents may be naturally occurring nucleic acids, random nucleic acids, or “biased” random nucleic acids. In another embodiment, the candidate bioactive agents are organic chemical moieties, a wide variety of which are available in the literature.

[0214] In assays for testing alteration of the expression profile of one or more CA genes, after the candidate agent has been added and the cells allowed to incubate for some period of time, a nucleic acid sample containing the target sequences to be analyzed is prepared. The target sequence is prepared using known techniques (e.g., converted from RNA to labeled cDNA, as described above) and added to a suitable microarray. For example, an in vitro reverse transcription with labels covalently attached to the nucleosides is performed. Generally, the nucleic acids are labeled with a label as defined herein, especially with biotin-FITC or PE, Cy3 and Cy5.

[0215] As will be appreciated by those in the art, these assays can be direct hybridization assays or can comprise “sandwich assays”, which include the use of multiple probes, as is generally outlined in U.S. Pat. Nos. 5,681,702, 5,597,909, 5,545,730, 5,594,117, 5,591,584, 5,571,670, 5,580,731, 5,571,670, 5,591,584, 5,624,802, 5,635,352, 5,594,118, 5,359,100, 5,124,246 and 5,681,697, all of which are hereby incorporated by reference. In this embodiment, in general, the target nucleic acid is prepared as outlined above, and then added to the biochip comprising a plurality of nucleic acid probes, under conditions that allow the formation of a hybridization complex.

[0216] A variety of hybridization conditions may be used in the present invention, including high, moderate and low stringency conditions as outlined above. The assays are generally run under stringency conditions that allow formation of the label probe hybridization complex only in the presence of target. Stringency can be controlled by altering a step parameter that is a thermodynamic variable, including, but not limited to, temperature, formamide concentration, salt concentration, chaotropic salt concentration, pH, organic solvent concentration, etc. These parameters may also be used to control non-specific binding, as is generally outlined in U.S. Pat. No. 5,681,697. Thus it may be desirable to perform certain steps at higher stringency conditions to reduce non-specific binding.

[0217] The reactions outlined herein may be accomplished in a variety of ways, as will be appreciated by those in the art. Components of the reaction may be added simultaneously, or sequentially, in any order, with preferred embodiments outlined below. In addition, the reaction may include a variety of other reagents in the assays. These include reagents like salts, buffers, neutral proteins, e.g. albumin, detergents, etc which may be used to facilitate optimal hybridization and detection, and/or reduce non-specific or background interactions. Also reagents that otherwise improve the efficiency of the assay, such as protease inhibitors, nuclease inhibitors, anti-microbial agents, etc., may be used, depending on the sample preparation methods and purity of the target. In addition, either solid phase or solution based (i.e., kinetic PCR) assays may be used.

[0218] Once the assay is run, the data are analyzed to determine the expression levels, and changes in expression levels as between states, of individual genes, forming a gene expression profile.

[0219] In a preferred embodiment, as for the diagnosis and prognosis applications, having identified the differentially expressed gene(s) or mutated gene(s) important in any one state, screens can be run to test for alteration of the expression of the CA genes individually. That is, screening for modulation of regulation of expression of a single gene can be done. Thus, for example, in the case of target genes whose presence or absence is unique between two states, screening is done for modulators of the target gene expression.

[0220] In addition, screens can be done for novel genes that are induced in response to a candidate agent. After identifying a candidate agent based upon its ability to suppress a CA expression pattern leading to a normal expression pattern, or modulate a single CA gene expression profile so as to mimic the expression of the gene from normal tissue, a screen as described above can be performed to identify genes that are specifically modulated in response to the agent. Comparing expression profiles between normal tissue and agent treated CA tissue reveals genes that are not expressed in normal tissue or CA tissue, but are expressed in agent treated tissue. These agent specific sequences can be identified and used by any of the methods described herein for CA genes or proteins. In particular these sequences and the proteins they encode find use in marking or identifying agent-treated cells. In addition, antibodies can be raised against the agent-induced proteins and used to target novel therapeutics to the treated CA tissue sample.

[0221] Thus, in one embodiment, a candidate agent is administered to a population of CA cells, that thus has an associated CA expression profile. By “administration” or “contacting” herein is meant that the candidate agent is added to the cells in such a manner as to allow the agent to act upon the cell, whether by uptake and intracellular action, or by action at the cell surface. In some embodiments, nucleic acid encoding a proteinaceous candidate agent (i.e. a peptide) may be put into a viral construct such as a retroviral construct and added to the cell, such that expression of the peptide agent is accomplished; see PCT US97/01019, hereby expressly incorporated by reference.

[0222] Once the candidate agent has been administered to the cells, the cells can be washed if desired and are allowed to incubate under preferably physiological conditions for some period of time. The cells are then harvested and a new gene expression profile is generated, as outlined herein.

[0223] Thus, for example, CA tissue may be screened for agents that reduce or suppress the CA phenotype. A change in at least one gene of the expression profile indicates that the agent has an effect on CA activity. By defining such a signature for the CA phenotype, screens for new drugs that alter the phenotype can be devised. With this approach, the drug target need not be known and need not be represented in the original expression screening platform, nor does the level of transcript for the target protein need to change.

[0224] In a preferred embodiment, as outlined above, screens may be done on individual genes and gene products (proteins). That is, having identified a particular differentially expressed gene as important in a particular state, screening of modulators of either the expression of the gene or the gene product itself can be done. The gene products of differentially expressed genes are sometimes referred to herein as “CA proteins” or “CAP”. The CAP may be a fragment, or alternatively, be the full-length protein to the fragment encoded by the nucleic acids of Tables 1-28 human genomic sequences of SEQ ID NOS: 4, 10, 16, 22, 28, 34, 40, 46, 52, 58, 64, 70, 76, 82, 88, 94, 100, 106, 112, 118, 124, 130, 136, 142, 148, 154, 160, and 166, and sequences of SEQ ID NOS: 5, 11, 17, 23, 29, 35, 41, 47, 53, 59, 65, 71, 77, 83, 89, 95, 101, 107, 113, 119, 125, 131, 137, 143, 149, 155, 161, 167, 169, 171, 173, 175, 177, 179, 181, 183, and 185 corresponding to the human mRNAs generated therefrom). In a preferred embodiment, the CAP is selected from the human protein sequences shown in Tables 1-28 (of SEQ ID NOS: 6, 12, 18, 24, 30, 36, 42, 48, 54, 60, 66, 72, 78, 84, 90, 96, 102, 108, 114, 120, 126, 132, 138, 144, 150, 156, 162, 168, 170, 172, 174, 176, 178, 180, 182, 184, and 186). In another embodiment, the sequences are sequence variants as further described herein.

[0225] Preferably, the CAP is a fragment approximately 14 to 24 amino acids in length. More preferably the fragment is a soluble fragment. Preferably, the fragment includes a non-transmembrane region. In a preferred embodiment, the fragment has an N-terminal Cys to aid in solubility. In one embodiment, the C-terminus of the fragment is kept as a free acid and the N-terminus is a free amine to aid in coupling, e.g., to a cysteine.

[0226] In one embodiment the CA proteins are conjugated to an immunogenic agent as discussed herein. In one embodiment the CA protein is conjugated to BSA.

[0227] In a preferred embodiment, screening is done to alter the biological function of the expression product of the CA gene. Again, having identified the importance of a gene in a particular state, screening for agents that bind and/or modulate the biological activity of the gene product can be run as is more fully outlined below.

[0228] In a preferred embodiment, screens are designed to first find candidate agents that can bind to CA proteins, and then these agents may be used in assays that evaluate the ability of the candidate agent to modulate the CAP activity and the cancer phenotype. Thus, as will be appreciated by those in the art, there are a number of different assays that may be run; binding assays and activity assays.

[0229] In a preferred embodiment, binding assays are done. In general, purified or isolated gene product is used; that is, the gene products of one or more CA nucleic acids are made. In general, this is done as is known in the art. For example, antibodies are generated to the protein gene products, and standard immunoassays are run to determine the amount of protein present. Alternatively, cells comprising the CA proteins can be used in the assays.

[0230] Thus, in a preferred embodiment, the methods comprise combining a CA protein and a candidate bioactive agent, and determining the binding of the candidate agent to the CA protein. Preferred embodiments utilize the human or mouse CA protein, although other mammalian proteins may also be used, for example for the development of animal models of human disease. In some embodiments, as outlined herein, variant or derivative CA proteins may be used.

[0231] Generally, in a preferred embodiment of the methods herein, the CA protein or the candidate agent is non-diffusably bound to an insoluble support having isolated sample receiving areas (e.g. a microtiter plate, an array, etc.). The insoluble support may be made of any composition to which the compositions can be bound, is readily separated from soluble material, and is otherwise compatible with the overall method of screening. The surface of such supports may be solid or porous and of any convenient shape. Examples of suitable insoluble supports include microtiter plates, arrays, membranes and beads. These are typically made of glass, plastic (e.g., polystyrene), polysaccharides, nylon or nitrocellulose, Teflon®, etc. Microtiter plates and arrays are especially convenient because a large number of assays can be carried out simultaneously, using small amounts of reagents and samples.

[0232] The particular manner of binding of the composition is not crucial so long as it is compatible with the reagents and overall methods of the invention, maintains the activity of the composition and is nondiffusable. Preferred methods of binding include the use of antibodies (which do not sterically block either the ligand binding site or activation sequence when the protein is bound to the support), direct binding to “sticky” or ionic supports, chemical crosslinking, the synthesis of the protein or agent on the surface, etc. Following binding of the protein or agent, excess unbound material is removed by washing. The sample receiving areas may then be blocked through incubation with bovine serum albumin (BSA), casein or other innocuous protein or other moiety.

[0233] In a preferred embodiment, the CA protein is bound to the support, and a candidate bioactive agent is added to the assay. Alternatively, the candidate agent is bound to the support and the CA protein is added. Novel binding agents include specific antibodies, non-natural binding agents identified in screens of chemical libraries, peptide analogs, etc. Of particular interest are screening assays for agents that have a low toxicity for human cells. A wide variety of assays may be used for this purpose, including labeled in vitro protein-protein binding assays, electrophoretic mobility shift assays, immunoassays for protein binding, functional assays (phosphorylation assays, etc.) and the like.

[0234] The determination of the binding of the candidate bioactive agent to the CA protein may be done in a number of ways. In a preferred embodiment, the candidate bioactive agent is labeled, and binding determined directly. For example, this may be done by attaching all or a portion of the CA protein to a solid support, adding a labeled candidate agent (for example a fluorescent label), washing off excess reagent, and determining whether the label is present on the solid support. Various blocking and washing steps may be utilized as is known in the art.

[0235] By “labeled” herein is meant that the compound is either directly or indirectly labeled with a label which provides a detectable signal, e.g. radioisotope, fluorescers, enzyme, antibodies, particles such as magnetic particles, chemiluminescers, or specific binding molecules, etc. Specific binding molecules include pairs, such as biotin and streptavidin, digoxin and antidigoxin etc. For the specific binding members, the complementary member would normally be labeled with a molecule which provides for detection, in accordance with known procedures, as outlined above. The label can directly or indirectly provide a detectable signal.

[0236] In some embodiments, only one of the components is labeled. For example, the proteins (or proteinaceous candidate agents) may be labeled at tyrosine positions using ¹²⁵I, or with fluorophores. Alternatively, more than one component may be labeled with different labels; using ¹²⁵I for the proteins, for example, and a fluorophore for the candidate agents.

[0237] In a preferred embodiment, the binding of the candidate bioactive agent is determined through the use of competitive binding assays. In this embodiment, the competitor is a binding moiety known to bind to the target molecule (i.e. CA protein), such as an antibody, peptide, binding partner, ligand, etc. Under certain circumstances, there may be competitive binding as between the bioactive agent and the binding moiety, with the binding moiety displacing the bioactive agent.

[0238] In one embodiment, the candidate bioactive agent is labeled. Either the candidate bioactive agent, or the competitor, or both, is added first to the protein for a time sufficient to allow binding, if present. Incubations may be performed at any temperature which facilitates optimal activity, typically between 4 and 40° C. Incubation periods are selected for optimum activity, but may also be optimized to facilitate rapid high throughput screening. Typically between 0.1 and 1 hour will be sufficient. Excess reagent is generally removed or washed away. The second component is then added, and the presence or absence of the labeled component is followed, to indicate binding.

[0239] In a preferred embodiment, the competitor is added first, followed by the candidate bioactive agent. Displacement of the competitor is an indication that the candidate bioactive agent is binding to the CA protein and thus is capable of binding to, and potentially modulating, the activity of the CA protein. In this embodiment, either component can be labeled. Thus, for example, if the competitor is labeled, the presence of label in the wash solution indicates displacement by the agent. Alternatively, if the candidate bioactive agent is labeled, the presence of the label on the support indicates displacement.

[0240] In an alternative embodiment, the candidate bioactive agent is added first, with incubation and washing, followed by the competitor. The absence of binding by the competitor may indicate that the bioactive agent is bound to the CA protein with a higher affinity. Thus, if the candidate bioactive agent is labeled, the presence of the label on the support, coupled with a lack of competitor binding, may indicate that the candidate agent is capable of binding to the CA protein.

[0241] In a preferred embodiment, the methods comprise differential screening to identity bioactive agents that are capable of modulating the activity of the CA proteins. In this embodiment, the methods comprise combining a CA protein and a competitor in a first sample. A second sample comprises a candidate bioactive agent, a CA protein and a competitor. The binding of the competitor is determined for both samples, and a change, or difference in binding between the two samples indicates the presence of an agent capable of binding to the CA protein and potentially modulating its activity. That is, if the binding of the competitor is different in the second sample relative to the first sample, the agent is capable of binding to the CA protein.

[0242] Alternatively, a preferred embodiment utilizes differential screening to identify drug candidates that bind to the native CA protein, but cannot bind to modified CA proteins. The structure of the CA protein may be modeled, and used in rational drug design to synthesize agents that interact with that site. Drug candidates that affect CA bioactivity are also identified by screening drugs for the ability to either enhance or reduce the activity of the protein.

[0243] Positive controls and negative controls may be used in the assays. Preferably all control and test samples are performed in at least triplicate to obtain statistically significant results. Incubation of all samples is for a time sufficient for the binding of the agent to the protein. Following incubation, all samples are washed free of non-specifically bound material and the amount of bound, generally labeled agent determined. For example, where a radiolabel is employed, the samples may be counted in a scintillation counter to determine the amount of bound compound.

[0244] A variety of other reagents may be included in the screening assays. These include reagents like salts, neutral proteins, e.g. albumin, detergents, etc which may be used to facilitate optimal protein-protein binding and/or reduce non-specific or background interactions. Also reagents that otherwise improve the efficiency of the assay, such as protease inhibitors, nuclease inhibitors, anti-microbial agents, etc., may be used. The mixture of components may be added in any order that provides for the requisite binding.

[0245] Screening for agents that modulate the activity of CA proteins may also be done. In a preferred embodiment, methods for screening for a bioactive agent capable of modulating the activity of CA proteins comprise the steps of adding a candidate bioactive agent to a sample of CA proteins, as above, and determining an alteration in the biological activity of CA proteins. “Modulating the activity of a CA protein” includes an increase in activity, a decrease in activity, or a change in the type or kind of activity present. Thus, in this embodiment, the candidate agent should both bind to CA proteins (although this may not be necessary), and alter its biological or biochemical activity as defined herein. The methods include both in vitro screening methods, as are generally outlined above, and in vivo screening of cells for alterations in the presence, distribution, activity or amount of CA proteins.

[0246] Thus, in this embodiment, the methods comprise combining a CA sample and a candidate bioactive agent, and evaluating the effect on CA activity. By “CA activity” or grammatical equivalents herein is meant one of the CA protein's biological activities, including, but not limited to, its role in tumorigenesis, including cell division, preferably in lymphatic tissue, cell proliferation, tumor growth and transformation of cells. In one embodiment, CA activity includes activation of or by a protein encoded by a nucleic acid of Tables 1-28. An inhibitor of CA activity is the inhibition of any one or more CA activities.

[0247] In a preferred embodiment, the activity of the CA protein is increased; in another preferred embodiment, the activity of the CA protein is decreased. Thus, bioactive agents that are antagonists are preferred in some embodiments, and bioactive agents that are agonists may be preferred in other embodiments.

[0248] In a preferred embodiment, the invention provides methods for screening for bioactive agents capable of modulating the activity of a CA protein. The methods comprise adding a candidate bioactive agent, as defined above, to a cell comprising CA proteins. Preferred cell types include almost any cell. The cells contain a recombinant nucleic acid that encodes a CA protein. In a preferred embodiment, a library of candidate agents is tested on a plurality of cells.

[0249] In one aspect, the assays are evaluated in the presence or absence or previous or subsequent exposure of physiological signals, for example hormones, antibodies, peptides, antigens, cytokines, growth factors, action potentials, pharmacological agents including chemotherapeutics, radiation, carcinogenics, or other cells (i.e. cell-cell contacts). In another example, the determinations are determined at different stages of the cell cycle process.

[0250] In this way, bioactive agents are identified. Compounds with pharmacological activity are able to enhance or interfere with the activity of the CA protein.

[0251] Applications of the Invention

[0252] In one embodiment, a method of inhibiting cancer cell division is provided. In another embodiment, a method of inhibiting tumor growth is provided. In a further embodiment, methods of treating cells or individuals with cancer are provided.

[0253] The method comprises administration of a cancer inhibitor. In particular embodiments, the cancer inhibitor is an antisense molecule, a pharmaceutical composition, a therapeutic agent or small molecule, or a monoclonal, polyclonal, chimeric or humanized antibody. In particular embodiments, a therapeutic agent is coupled with a an antibody, preferable a monoclonal antobody.

[0254] In other embodiments, methods for detection or diagnosis of cancer cells in an individual are provided. In particular embodiments, the diagnostic/detection agent is a small molecule that pereferentially binds to a CAP according to the invention. In one embodiment, the diagnostic/detection agent is an antibody, preferably a monoclonal antobody, preferably linked to a detectable agent.

[0255] In other embodiments of the invention, animal models and transgenic animals are provided, which find use in generating animal models of cancers, particularly lymphomas and carcinomas.

[0256] (a) Antisense Molecules

[0257] In one embodiment, the cancer inhibitor is an antisense molecule. Antisense molecules as used herein include antisense or sense oligonucleotides comprising a single-stranded nucleic acid sequence (either RNA or DNA) capable of binding to target mRNA (sense) or DNA (antisense) sequences for cancer molecules. Antisense or sense oligonucleotides, according to the present invention, comprise a fragment generally at least about 14 nucleotides, preferably from about 14 to 30 nucleotides. The ability to derive an antisense or a sense oligonucleotide, based upon a cDNA sequence encoding a given protein is described in, for example, Stein and Cohen, Cancer Res. 48:2659, (1988) and van der Krol et al., BioTechniques 6:958, (1988).

[0258] Antisense molecules may be introduced into a cell containing the target nucleotide sequence by formation of a conjugate with a ligand binding molecule, as described in WO 91/04753. Suitable ligand binding molecules include, but are not limited to, cell surface receptors, growth factors, other cytokines, or other ligands that bind to cell surface receptors. Preferably, conjugation of the ligand binding molecule does not substantially interfere with the ability of the ligand binding molecule to bind to its corresponding molecule or receptor, or block entry of the sense or antisense oligonucleotide or its conjugated version into the cell. Alternatively, a sense or an antisense oligonucleotide may be introduced into a cell containing the target nucleic acid sequence by formation of an oligonucleotide-lipid complex, as described in WO 90/10448. It is understood that the use of antisense molecules or knock out and knock in models may also be used in screening assays as discussed above, in addition to methods of treatment.

[0259] (b) Pharmaceutical Compositions

[0260] Pharmaceutical compositions encompassed by the present invention include as active agent, the polypeptides, polynucleotides, antisense oligonucleotides, or antibodies of the invention disclosed herein in a therapeutically effective amount. An “effective amount” is an amount sufficient to effect beneficial or desired results, including clinical results. An effective amount can be administered in one or more administrations. For purposes of this invention, an effective amount of an adenoviral vector is an amount that is sufficient to palliate, ameliorate, stabilize, reverse, slow or delay the progression of the disease state.

[0261] The compositions can be used to treat cancer as well as metastases of primary cancer. In addition, the pharmaceutical compositions can be used in conjunction with conventional methods of cancer treatment, e.g., to sensitize tumors to radiation or conventional chemotherapy. The terms “treatment”, “treating”, “treat” and the like are used herein to generally refer to obtaining a desired pharmacologic and/or physiologic effect. The effect may be prophylactic in terms of completely or partially preventing a disease or symptom thereof and/or may be therapeutic in terms of a partial or complete stabilization or cure for a disease and/or adverse effect attributable to the disease. “Treatment” as used herein covers any treatment of a disease in a mammal, particularly a human, and includes: (a) preventing the disease or symptom from occurring in a subject which may be predisposed to the disease or symptom but has not yet been diagnosed as having it; (b) inhibiting the disease symptom, i.e., arresting its development; or (c) relieving the disease symptom, i.e., causing regression of the disease or symptom.

[0262] Where the pharmaceutical composition comprises an antibody that specifically binds to a gene product encoded by a differentially expressed polynucleotide, the antibody can be coupled to a drug for delivery to a treatment site or coupled to a detectable label to facilitate imaging of a site comprising cancer cells, such as prostate cancer cells. Methods for coupling antibodies to drugs and detectable labels are well known in the art, as are methods for imaging using detectable labels.

[0263] A “patient” for the purposes of the present invention includes both humans and other animals, particularly mammals, and organisms. Thus the methods are applicable to both human therapy and veterinary applications. In the preferred embodiment the patient is a mammal, and in the most preferred embodiment the patient is human.

[0264] The term “therapeutically effective amount” as used herein refers to an amount of a therapeutic agent to treat, ameliorate, or prevent a desired disease or condition, or to exhibit a detectable therapeutic or preventative effect. The effect can be detected by, for example, chemical markers or antigen levels. Therapeutic effects also include reduction in physical symptoms, such as decreased body temperature. The precise effective amount for a subject will depend upon the subject's size and health, the nature and extent of the condition, and the therapeutics or combination of therapeutics selected for administration. The effective amount for a given situation is determined by routine experimentation and is within the judgment of the clinician. For purposes of the present invention, an effective dose will generally be from about 0.01 mg/kg to about 5 mg/kg, or about 0.01 mg/kg to about 50 mg/kg or about 0.05 mg/kg to about 10 mg/kg of the compositions of the present invention in the individual to which it is administered.

[0265] A pharmaceutical composition can also contain a pharmaceutically acceptable carrier. The term “pharmaceutically acceptable carrier” refers to a carrier for administration of a therapeutic agent, such as antibodies or a polypeptide, genes, and other therapeutic agents. The term refers to any pharmaceutical carrier that does not itself induce the production of antibodies harmful to the individual receiving the composition, and which can be administered without undue toxicity. Suitable carriers can be large, slowly metabolized macromolecules such as proteins, polysaccharides, polylactic acids, polyglycolic acids, polymeric amino acids, amino acid copolymers, and inactive virus particles. Such carriers are well known to those of ordinary skill in the art. Pharmaceutically acceptable carriers in therapeutic compositions can include liquids such as water, saline, glycerol and ethanol. Auxiliary substances, such as wetting or emulsifying agents, pH buffering substances, and the like, can also be present in such vehicles. Typically, the therapeutic compositions are prepared as injectables, either as liquid solutions or suspensions; solid forms suitable for solution in, or suspension in, liquid vehicles prior to injection can also be prepared. Liposomes are included within the definition of a pharmaceutically acceptable carrier. Pharmaceutically acceptable salts can also be present in the pharmaceutical composition, e.g., mineral acid salts such as hydrochlorides, hydrobromides, phosphates, sulfates, and the like; and the salts of organic acids such as acetates, propionates, malonates, benzoates, and the like. A thorough discussion of pharmaceutically acceptable excipients is available in Remington: The Science and Practice of Pharmacy (1995) Alfonso Gennaro, Lippincott, Williams, & Wilkins.

[0266] The pharmaceutical compositions can be prepared in various forms, such as granules, tablets, pills, suppositories, capsules, suspensions, salves, lotions and the like. Pharmaceutical grade organic or inorganic carriers and/or diluents suitable for oral and topical use can be used to make up compositions containing the therapeutically-active compounds. Diluents known to the art include aqueous media, vegetable and animal oils and fats. Stabilizing agents, wetting and emulsifying agents, salts for varying the osmotic pressure or buffers for securing an adequate pH value, and skin penetration enhancers can be used as auxiliary agents.

[0267] The pharmaceutical compositions of the present invention comprise a CA protein in a form suitable for administration to a patient. In the preferred embodiment, the pharmaceutical compositions are in a water soluble form, such as being present as pharmaceutically acceptable salts, which is meant to include both acid and base addition salts. “Pharmaceutically acceptable acid addition salt” refers to those salts that retain the biological effectiveness of the free bases and that are not biologically or otherwise undesirable, formed with inorganic acids such as hydrochloric acid, hydrobromic acid, sulfuric acid, nitric acid, phosphoric acid and the like, and organic acids such as acetic acid, propionic acid, glycolic acid, pyruvic acid, oxalic acid, maleic acid, malonic acid, succinic acid, fumaric acid, tartaric acid, citric acid, benzoic acid, cinnamic acid, mandelic acid, methanesulfonic acid, ethanesulfonic acid, p-toluenesulfonic acid, salicylic acid and the like. “Pharmaceutically acceptable base addition salts” include those derived from inorganic bases such as sodium, potassium, lithium, ammonium, calcium, magnesium, iron, zinc, copper, manganese, aluminum salts and the like. Particularly preferred are the ammonium, potassium, sodium, calcium, and magnesium salts. Salts derived from pharmaceutically acceptable organic non-toxic bases include salts of primary, secondary, and tertiary amines, substituted amines including naturally occurring substituted amines, cyclic amines and basic ion exchange resins, such as isopropylamine, trimethylamine, diethylamine, triethylamine, tripropylamine, and ethanolamine.

[0268] The pharmaceutical compositions may also include one or more of the following: carrier proteins such as serum albumin; buffers; fillers such as microcrystalline cellulose, lactose, corn and other starches; binding agents; sweeteners and other flavoring agents; coloring agents; and polyethylene glycol. Additives are well known in the art, and are used in a variety of formulations.

[0269] The compounds having the desired pharmacological activity may be administered in a physiologically acceptable carrier to a host, as previously described. The agents may be administered in a variety of ways, orally, parenterally e.g., subcutaneously, intraperitoneally, intravascularly, etc. Depending upon the manner of introduction, the compounds may be formulated in a variety of ways. The concentration of therapeutically active compound in the formulation may vary from about 0.1-100% wgt/vol. Once formulated, the compositions contemplated by the invention can be (1) administered directly to the subject (e.g., as polynucleotide, polypeptides, small molecule agonists or antagonists, and the like); or (2) delivered ex vivo, to cells derived from the subject (e.g., as in ex vivo gene therapy). Direct delivery of the compositions will generally be accomplished by parenteral injection, e.g., subcutaneously, intraperitoneally, intravenously or intramuscularly, intratumoral or to the interstitial space of a tissue. Other modes of administration include oral and pulmonary administration, suppositories, and transdermal applications, needles, and gene guns or hyposprays. Dosage treatment can be a single dose schedule or a multiple dose schedule.

[0270] Methods for the ex vivo delivery and reimplantation of transformed cells into a subject are known in the art and described in e.g., International Publication No. WO 93/14778. Examples of cells useful in ex vivo applications include, for example, stem cells, particularly hematopoetic, lymph cells, macrophages, dendritic cells, or tumor cells. Generally, delivery of nucleic acids for both ex vivo and in vitro applications can be accomplished by, for example, dextran-mediated transfection, calcium phosphate precipitation, polybrene mediated transfection, protoplast fusion, electroporation, encapsulation of the polynucleotide(s) in liposomes, and direct microinjection of the DNA into nuclei, all well known in the art.

[0271] Once differential expression of a gene corresponding to a CA polynucleotide described herein has been found to correlate with a proliferative disorder, such as neoplasia, dysplasia, and hyperplasia, the disorder can be amenable to treatment by administration of a therapeutic agent based on the provided polynucleotide, corresponding polypeptide or other corresponding molecule (e.g., antisense, ribozyme, etc.). In other embodiments, the disorder can be amenable to treatment by administration of a small molecule drug that, for example, serves as an inhibitor (antagonist) of the function of the encoded gene product of a gene, having increased expression in cancerous cells relative to normal cells or as an agonist for gene products that are decreased in expression in cancerous cells (e.g., to promote the activity of gene products that act as tumor suppressors).

[0272] The dose and the means of administration of the inventive pharmaceutical compositions are determined based on the specific qualities of the therapeutic composition, the condition, age, and weight of the patient, the progression of the disease, and other relevant factors. For example, administration of polynucleotide therapeutic compositions agents includes local or systemic administration, including injection, oral administration, particle gun or catheterized administration, and topical administration. Preferably, the therapeutic polynucleotide composition contains an expression construct comprising a promoter operably linked to a polynucleotide of at least 12, 22, 25, 30, or 35 contiguous nt of the polynucleotide disclosed herein. Various methods can be used to administer the therapeutic composition directly to a specific site in the body. For example, a small metastatic lesion is located and the therapeutic composition injected several times in several different locations within the body of tumor. Alternatively, arteries that serve a tumor are identified, and the therapeutic composition injected into such an artery, in order to deliver the composition directly into the tumor. A tumor that has a necrotic center is aspirated and the composition injected directly into the now empty center of the tumor. An antisense composition is directly administered to the surface of the tumor, for example, by topical application of the composition. X-ray imaging is used to assist in certain of the above delivery methods.

[0273] Targeted delivery of therapeutic compositions containing an antisense polynucleotide, subgenomic polynucleotides, or antibodies to specific tissues can also be used. Receptor-mediated DNA delivery techniques are described in, for example, Findeis et al., Trends Biotechnol. (1993) 11:202; Chiou et al., Gene Therapeutics: Methods And Applications Of Direct Gene Transfer (J. A. Wolff, ed.) (1994); Wu et al., J. Biol. Chem. (1988) 263:621; Wu et al., J. Biol. Chem. (1994) 269:542; Zenke et al., Proc. Natl. Acad. Sci. (USA) (1990) 87:3655; Wu et al., J. Biol. Chem. (1991) 266:338. Therapeutic compositions containing a polynucleotide are administered in a range of about 100 ng to about 200 mg of DNA for local administration in a gene therapy protocol. Concentration ranges of about 500 ng to about 50 mg, about 1 μg to about 2 mg, about 5 μg to about 500 μg, and about 20 μg to about 100 μg of DNA can also be used during a gene therapy protocol. Factors such as method of action (e.g., for enhancing or inhibiting levels of the encoded gene product) and efficacy of transformation and expression are considerations that will affect the dosage required for ultimate efficacy of the antisense subgenomic polynucleotides. Where greater expression is desired over a larger area of tissue, larger amounts of antisense subgenomic polynucleotides or the same amounts re-administered in a successive protocol of administrations, or several administrations to different adjacent or close tissue portions of, for example, a tumor site, may be required to effect a positive therapeutic outcome. In all cases, routine experimentation in clinical trials will determine specific ranges for optimal therapeutic effect.

[0274] The therapeutic polynucleotides and polypeptides of the present invention can be delivered using gene delivery vehicles. The gene delivery vehicle can be of viral or non-viral origin (see generally, Jolly, Cancer Gene Therapy (1994) 1:51; Kimura, Human Gene Therapy (1994) 5:845; Connelly, Human Gene Therapy (1995) 1:185; and Kaplitt, Nature Genetics (1994) 6:148). Expression of such coding sequences can be induced using endogenous mammalian or heterologous promoters. Expression of the coding sequence can be either constitutive or regulated.

[0275] Viral-based vectors for delivery of a desired polynucleotide and expression in a desired cell are well known in the art. Exemplary viral-based vehicles include, but are not limited to, recombinant retroviruses (see, e.g., WO 90/07936; WO 94/03622; WO 93/25698; WO 93/25234; U.S. Pat. No. 5, 219,740; WO 93/11230; WO 93/10218; U.S. Pat. No. 4,777,127; GB Patent No. 2,200,651; EP 0 345 242; and WO 91/02805), alphavirus-based vectors (e.g., Sindbis virus vectors, Semliki forest virus (ATCC VR-67; ATCC VR-1247), Ross River virus (ATCC VR-373; ATCC VR-1246) and Venezuelan equine encephalitis virus (ATCC VR-923; ATCC VR-1250; ATCC VR 1249; ATCC VR-532)), and adeno-associated virus (AAV) vectors (see, e.g., WO 94/12649, WO 93/03769; WO 93/19191; WO 94/28938; WO 95/11984 and WO 95/00655). Administration of DNA linked to killed adenovirus as described in Curiel, Hum. Gene Ther. (1992) 3:147 can also be employed.

[0276] Non-viral delivery vehicles and methods can also be employed, including, but not limited to, polycationic condensed DNA linked or unlinked to killed adenovirus alone (see, e.g., Curiel, Hum. Gene Ther. (1992) 3:147); ligand-linked DNA (see, e.g., Wu, J. Biol. Chem. (1989) 264:16985); eukaryotic cell delivery vehicles cells (see, e.g., U.S. Pat. No. 5,814,482; WO 95/07994; WO 96/17072; WO 95/30763; and WO 97/42338) and nucleic charge neutralization or fusion with cell membranes. Naked DNA can also be employed. Exemplary naked DNA introduction methods are described in WO 90/11092 and U.S. Pat. No. 5,580,859. Liposomes that can act as gene delivery vehicles are described in U.S. Pat. No. 5,422,120; WO 95/13796; WO 94/23697; WO 91/14445; and EP 0524968. Additional approaches are described in Philip, Mol. Cell Biol. (1994)14:2411, and in Woffendin, Proc. Natl. Acad. Sci. (1994) 91:1581.

[0277] Further non-viral delivery suitable for use includes mechanical delivery systems such as the approach described in Woffendin et al., Proc. Natl. Acad. Sci. USA (1994) 91(24):11581. Moreover, the coding sequence and the product of expression of such can be delivered through deposition of photopolymerized hydrogel materials or use of ionizing radiation (see, e.g., U.S. Pat. No. 5,206,152 and WO 92/11033). Other conventional methods for gene delivery that can be used for delivery of the coding sequence include, for example, use of hand-held gene transfer particle gun (see, e.g., U.S. Pat. No. 5,149,655); use of ionizing radiation for activating transferred gene (see, e.g., U.S. Pat. No. 5,206,152 and WO 92/11033).

[0278] The administration of the CA proteins and modulators of the present invention can be done in a variety of ways as discussed above, including, but not limited to, orally, subcutaneously, intravenously, intranasally, transdermally, intraperitoneally, intramuscularly, intrapulmonary, vaginally, rectally, or intraocularly. In some instances, for example, in the treatment of wounds and inflammation, the CA proteins and modulators may be directly applied as a solution or spray.

[0279] In a preferred embodiment, CA proteins and modulators are administered as therapeutic agents, and can be formulated as outlined above. Similarly, CA genes (including both the full-length sequence, partial sequences, or regulatory sequences of the CA coding regions) can be administered in gene therapy applications, as is known in the art. These CA genes can include antisense applications, either as gene therapy (i.e. for incorporation into the genome) or as antisense compositions, as will be appreciated by those in the art.

[0280] Thus, in one embodiment, methods of modulating CA gene activity in cells or organisms are provided. In one embodiment, the methods comprise administering to a cell an anti-CA antibody that reduces or eliminates the biological activity of an endogenous CA protein. Alternatively, the methods comprise administering to a cell or organism a recombinant nucleic acid encoding a CA protein. As will be appreciated by those in the art, this may be accomplished in any number of ways. In a preferred embodiment, for example when the CA sequence is down-regulated in cancer, the activity of the CA gene product is increased by increasing the amount of CA expression in the cell, for example by overexpressing the endogenous CA gene or by administering a gene encoding the CA sequence, using known gene-therapy techniques. In a preferred embodiment, the gene therapy techniques include the incorporation of the exogenous gene using enhanced homologous recombination (EHR), for example as described in PCT/US93/03868, hereby incorporated by reference in its entirety. Alternatively, for example when the CA sequence is up-regulated in cancer, the activity of the endogenous CA gene is decreased, for example by the administration of a CA antisense nucleic acid.

[0281] (c) Vaccines

[0282] In a preferred embodiment, CA genes are administered as DNA vaccines, either single genes or combinations of CA genes. Naked DNA vaccines are generally known in the art. Brower, Nature Biotechnology, 16:1304-1305 (1998).

[0283] In one embodiment, CA genes of the present invention are used as DNA vaccines. Methods for the use of genes as DNA vaccines are well known to one of ordinary skill in the art, and include placing a CA gene or portion of a CA gene under the control of a promoter for expression in a patient with cancer. The CA gene used for DNA vaccines can encode full-length CA proteins, but more preferably encodes portions of the CA proteins including peptides derived from the CA protein. In a preferred embodiment a patient is immunized with a DNA vaccine comprising a plurality of nucleotide sequences derived from a CA gene. Similarly, it is possible to immunize a patient with a plurality of CA genes or portions thereof. Without being bound by theory, expression of the polypeptide encoded by the DNA vaccine, cytotoxic T-cells, helper T-cells and antibodies are induced that recognize and destroy or eliminate cells expressing CA proteins.

[0284] In a preferred embodiment, the DNA vaccines include a gene encoding an adjuvant molecule with the DNA vaccine. Such adjuvant molecules include cytokines that increase the immunogenic response to the CA polypeptide encoded by the DNA vaccine. Additional or alternative adjuvants are known to those of ordinary skill in the art and find use in the invention.

[0285] (d) Antibodies

[0286] In one embodiment, a cancer inhibitor is an antibody as discussed above. In one embodiment, the CA proteins of the present invention may be used to generate polyclonal and monoclonal antibodies to CA proteins, which are useful as described herein. Similarly, the CA proteins can be coupled, using standard technology, to affinity chromatography columns. These columns may then be used to purify CA antibodies. In a preferred embodiment, the antibodies are generated to epitopes unique to a CA protein; that is, the antibodies show little or no cross-reactivity to other proteins. These antibodies find use in a number of applications. For example, the CA antibodies may be coupled to standard affinity chromatography columns and used to purify CA proteins. The antibodies may also be used therapeutically as blocking polypeptides, as outlined above, since they will specifically bind to the CA protein.

[0287] The present invention further provides methods for detecting the presence of and/or measuring a level of a polypeptide in a biological sample, which CA polypeptide is encoded by a CA polynucleotide that is differentially expressed in a cancer cell, using an antibody specific for the encoded polypeptide. The methods generally comprise: a) contacting the sample with an antibody specific for a polypeptide encoded by a CA polynucleotide that is differentially expressed in a prostate cancer cell; and b) detecting binding between the antibody and molecules of the sample.

[0288] Detection of specific binding of the antibody specific for the encoded cancer-associated polypeptide, when compared to a suitable control is an indication that encoded polypeptide is present in the sample. Suitable controls include a sample known not to contain the encoded CA polypeptide or known not to contain elevated levels of the polypeptide; such as normal tissue, and a sample contacted with an antibody not specific for the encoded polypeptide, e.g., an anti-idiotype antibody. A variety of methods to detect specific antibody-antigen interactions are known in the art and can be used in the method, including, but not limited to, standard immunohistological methods, immunoprecipitation, an enzyme immunoassay, and a radioimmunoassay. In general, the specific antibody will be detectably labeled, either directly or indirectly. Direct labels include radioisotopes; enzymes whose products are detectable (e.g., luciferase, β-galactosidase, and the like); fluorescent labels (e.g., fluorescein isothiocyanate, rhodamine, phycoerythrin, and the like); fluorescence emitting metals, e.g., ¹⁵²Eu, or others of the lanthanide series, attached to the antibody through metal chelating groups such as EDTA; chemiluminescent compounds, e.g., luminol, isoluminol, acridinium salts, and the like; bioluminescent compounds, e.g., luciferin, aequorin (green fluorescent protein), and the like. The antibody may be attached (coupled) to an insoluble support, such as a polystyrene plate or a bead. Indirect labels include second antibodies specific for antibodies specific for the encoded polypeptide (“first specific antibody”), wherein the second antibody is labeled as described above; and members of specific binding pairs, e.g., biotin-avidin, and the like. The biological sample may be brought into contact with and immobilized on a solid support or carrier, such as nitrocellulose, that is capable of immobilizing cells, cell particles, or soluble proteins. The support may then be washed with suitable buffers, followed by contacting with a detectably-labeled first specific antibody. Detection methods are known in the art and will be chosen as appropriate to the signal emitted by the detectable label. Detection is generally accomplished in comparison to suitable controls, and to appropriate standards.

[0289] In some embodiments, the methods are adapted for use in vivo, e.g., to locate or identify sites where cancer cells are present. In these embodiments, a detectably-labeled moiety, e.g., an antibody, which is specific for a cancer-associated polypeptide is administered to an individual (e.g., by injection), and labeled cells are located using standard imaging techniques, including, but not limited to, magnetic resonance imaging, computed tomography scanning, and the like. In this manner, cancer cells are differentially labeled.

[0290] (e) Detection and Diagnosis of Cancers

[0291] Without being bound by theory, it appears that the various CA sequences are important in cancers. Accordingly, disorders based on mutant or variant CA genes may be determined. In one embodiment, the invention provides methods for identifying cells containing variant CA genes comprising determining all or part of the sequence of at least one endogenous CA genes in a cell. As will be appreciated by those in the art, this may be done using any number of sequencing techniques. In a preferred embodiment, the invention provides methods of identifying the CA genotype of an individual comprising determining all or part of the sequence of at least one CA gene of the individual. This is generally done in at least one tissue of the individual, and may include the evaluation of a number of tissues or different samples of the same tissue. The method may include comparing the sequence of the sequenced CA gene to a known CA gene, i.e., a wild-type gene. As will be appreciated by those in the art, alterations in the sequence of some CA genes can be an indication of either the presence of the disease, or propensity to develop the disease, or prognosis evaluations.

[0292] The sequence of all or part of the CA gene can then be compared to the sequence of a known CA gene to determine if any differences exist. This can be done using any number of known homology programs, such as Bestfit, etc. In a preferred embodiment, the presence of a difference in the sequence between the CA gene of the patient and the known CA gene is indicative of a disease state or a propensity for a disease state, as outlined herein.

[0293] In a preferred embodiment, the CA genes are used as probes to determine the number of copies of the CA gene in the genome. For example, some cancers exhibit chromosomal deletions or insertions, resulting in an alteration in the copy number of a gene.

[0294] In another preferred embodiment CA genes are used as probes to determine the chromosomal location of the CA genes. Information such as chromosomal location finds use in providing a diagnosis or prognosis in particular when chromosomal abnormalities such as translocations, and the like are identified in CA gene loci.

[0295] The present invention provides methods of using the polynucleotides described herein for detecting cancer cells, facilitating diagnosis of cancer and the severity of a cancer (e.g., tumor grade, tumor burden, and the like) in a subject, facilitating a determination of the prognosis of a subject, and assessing the responsiveness of the subject to therapy (e.g., by providing a measure of therapeutic effect through, for example, assessing tumor burden during or following a chemotherapeutic regimen). Detection can be based on detection of a polynucleotide that is differentially expressed in a cancer cell, and/or detection of a polypeptide encoded by a polynucleotide that is differentially expressed in a cancer cell. The detection methods of the invention can be conducted in vitro or in vivo, on isolated cells, or in whole tissues or a bodily fluid e.g., blood, plasma, serum, urine, and the like).

[0296] In some embodiments, methods are provided for detecting a cancer cell by detecting expression in the cell of a transcript that is differentially expressed in a cancer cell. Any of a variety of known methods can be used for detection, including, but not limited to, detection of a transcript by hybridization with a polynucleotide that hybridizes to a polynucleotide that is differentially expressed in a prostate cancer cell; detection of a transcript by a polymerase chain reaction using specific oligonucleotide primers; in situ hybridization of a cell using as a probe a polynucleotide that hybridizes to a gene that is differentially expressed in a prostate cancer cell. The methods can be used to detect and/or measure mRNA levels of a gene that is differentially expressed in a cancer cell. In some embodiments, the methods comprise: a) contacting a sample with a polynucleotide that corresponds to a differentially expressed gene described herein under conditions that allow hybridization; and b) detecting hybridization, if any.

[0297] Detection of differential hybridization, when compared to a suitable control, is an indication of the presence in the sample of a polynucleotide that is differentially expressed in a cancer cell. Appropriate controls include, for example, a sample that is known not to contain a polynucleotide that is differentially expressed in a cancer cell, and use of a labeled polynucleotide of the same “sense” as the polynucleotide that is differentially expressed in the cancer cell. Conditions that allow hybridization are known in the art, and have been described in more detail above. Detection can also be accomplished by any known method, including, but not limited to, in situ hybridization, PCR (polymerase chain reaction), RT-PCR (reverse transcription-PCR), TMA, bDNA, and Nasbau and “Northern” or RNA blotting, or combinations of such techniques, using a suitably labeled polynucleotide. A variety of labels and labeling methods for polynucleotides are known in the art and can be used in the assay methods of the invention. Specificity of hybridization can be determined by comparison to appropriate controls.

[0298] Polynucleotides generally comprising at least 10 nt, at least 12 nt or at least 15 contiguous nucleotides of a polynucleotide provided herein, such as, for example, those having the sequence as depicted in Tables 1-28, are used for a variety of purposes, such as probes for detection of and/or measurement of, transcription levels of a polynucleotide that is differentially expressed in a prostate cancer cell. As will be readily appreciated by the ordinarily skilled artisan, the probe can be detectably labeled and contacted with, for example, an array comprising immobilized polynucleotides obtained from a test sample. (e.g., mRNA). Alternatively, the probe can be immobilized on an array and the test sample detectably labeled. These and other variations of the methods of the invention are well within the skill in the art and are within the scope of the invention.

[0299] Nucleotide probes are used to detect expression of a gene corresponding to the provided polynucleotide. In Northern blots, mRNA is separated electrophoretically and contacted with a probe. A probe is detected as hybridizing to an mRNA species of a particular size. The amount of hybridization can be quantitated to determine relative amounts of expression, for example under a particular condition. Probes are used for in situ hybridization to cells to detect expression. Probes can also be used in vivo for diagnostic detection of hybridizing sequences. Probes are typically labeled with a radioactive isotope. Other types of detectable labels can be used such as chromophores, fluorophores, and enzymes. Other examples of nucleotide hybridization assays are described in WO92/02526 and U.S. Pat. No. 5,124,246.

[0300] PCR is another means for detecting small amounts of target nucleic acids (see, e.g., Mullis et al., Meth. Enzymol. (1987) 155:335; U.S. Pat. No. 4,683,195; and U.S. Pat. No. 4,683,202). Two primer oligonucleotides that hybridize with the target nucleic acids are used to prime the reaction. The primers can be composed of sequence within or 3′ and 5′ to the CA polynucleotides disclosed herein. Alternatively, if the primers are 3′ and 5′ to these polynucleotides, they need not hybridize to them or the complements. After amplification of the target with a thermostable polymerase, the amplified target nucleic acids can be detected by methods known in the art, e.g., Southern blot. mRNA or cDNA can also be detected by traditional blotting techniques (e.g., Southern blot, Northern blot, etc.) described in Sambrook et al., “Molecular Cloning: A Laboratory Manual” (New York, Cold Spring Harbor Laboratory, 1989) (e.g., without PCR amplification). In general, mRNA or cDNA generated from mRNA using a polymerase enzyme can be purified and separated using gel electrophoresis, and transferred to a solid support, such as nitrocellulose. The solid support is exposed to a labeled probe, washed to remove any unhybridized probe, and duplexes containing the labeled probe are detected.

[0301] Methods using PCR amplification can be performed on the DNA from a single cell, although it is convenient to use at least about 10⁵ cells. The use of the polymerase chain reaction is described in Saiki et al. (1985) Science 239:487, and a review of current techniques may be found in Sambrook, et al. Molecular Cloning: A Laboratory Manual, CSH Press 1989, pp. 14.2-14.33. A detectable label may be included in the amplification reaction. Suitable detectable labels include fluorochromes,(e.g. fluorescein isothiocyanate (FITC), rhodamine, Texas Red, phycoerythrin, allophycocyanin, 6-carboxyfluorescein (6-FAM), 2′,7′-dimethoxy-4′,5′-dichloro-6-carboxyfluorescein, 6-carboxy-X-rhodamine (ROX), 6-carboxy-2′,4′,7′,4,7-hexachlorofluorescein. (HEX), 5-carboxyfluorescein (5-FAM) or N,N,N′,N′-tetramethyl-6-carboxyrhodamine (TAMRA)), radioactive labels, (e.g. ³²P, 35S, ³H, etc.), and the like. The label may be a two stage system, where the polynucleotides is conjugated to biotin, haptens, etc. having a high affinity binding partner, e.g. avidin, specific antibodies, etc., where the binding partner is conjugated to a detectable label. The label may be conjugated to one or both of the primers. Alternatively, the pool of nucleotides used in the amplification is labeled, so as to incorporate the label into the amplification product.

[0302] The detection methods can be provided as part of a kit. Thus, the invention further provides kits for detecting the presence and/or a level of a polynucleotide that is differentially expressed in a cancer cell (e.g., by detection of an mRNA encoded by the differentially expressed gene of interest), and/or a polypeptide encoded thereby, in a biological sample. Procedures using these kits can be performed by clinical laboratories, experimental laboratories, medical practitioners, or private individuals. The kits of the invention for detecting a polypeptide encoded by a polynucleotide that is differentially expressed in a cancer cell may comprise a moiety that specifically binds the polypeptide, which may be an antibody that binds the polypeptide or fragment thereof. The kits of the invention used for detecting a polynucleotide that is differentially expressed in a prostate cancer cell may comprise a moiety that specifically hybridizes to such a polynucleotide. The kit may optionally provide additional components that are useful in the procedure, including, but not limited to, buffers, developing reagents, labels, reacting surfaces, means for detection, control samples, standards, instructions, and interpretive information. Accordingly, the present invention provides kits for detecting prostate cancer comprising at least one of polynucleotides having the sequence as shown in Tables 1-28 or fragments thereof.

[0303] The present invention further relates to methods of detecting/diagnosing a neoplastic or preneoplastic condition in a mammal (for example, a human). “Diagnosis” as used herein generally includes determination of a subject's susceptibility to a disease or disorder, determination as to whether a subject is presently affected by a disease or disorder, prognosis of a subject affected by a disease or disorder (e.g., identification of pre-metastatic or metastatic cancerous states, stages of cancer, or responsiveness of cancer to therapy), and therametrics (e.g., monitoring a subject's condition to provide information as to the effect or efficacy of therapy).

[0304] The terms “treatment”, “treating”, “treat” and the like are used herein to generally refer to obtaining a desired pharmacologic and/or physiologic effect. The effect may be prophylactic in terms of completely or partially preventing a disease or symptom thereof and/or may be therapeutic in terms of a partial or complete stabilization or cure for a disease and/or adverse effect attributable to the disease. “Treatment” as used herein covers any treatment of a disease in a mammal, particularly a human, and includes: (a) preventing the disease or symptom from occurring in a subject which may be predisposed to the disease or symptom but has not yet been diagnosed as having it; (b) inhibiting the disease symptom, i.e., arresting its development; or (c) relieving the disease symptom, i.e., causing regression of the disease or symptom.

[0305] An “effective amount” is an amount sufficient to effect beneficial or desired results, including clinical results. An effective amount can be administered in one or more administrations.

[0306] A “cell sample” encompasses a variety of sample types obtained from an individual and can be used in a diagnostic or monitoring assay. The definition encompasses blood and other liquid samples of biological origin, solid tissue samples such as a biopsy specimen or tissue cultures or cells derived therefrom, and the progeny thereof. The definition also includes samples that have been manipulated in any way after their procurement, such as by treatment with reagents, solubilization, or enrichment for certain components, such as proteins or polynucleotides. The term “cell sample” encompasses a clinical sample, and also includes cells in culture, cell supernatants, cell lysates, serum, plasma, biological fluid, and tissue samples.

[0307] As used herein, the terms “neoplastic cells”, “neoplasia”, “tumor”, “tumor cells”, “cancer” and “cancer cells”, (used interchangeably) refer to cells which exhibit relatively autonomous growth, so that they exhibit an aberrant growth phenotype characterized by a significant loss of control of cell proliferation (i.e., de-regulated cell division). Neoplastic cells can be malignant or benign.

[0308] The terms “individual,” “subject,” “host,” and “patient,” are used interchangeably herein and refer to any mammalian subject for whom diagnosis, treatment, or therapy is desired, particularly humans. Other subjects may include cattle, dogs, cats, guinea pigs, rabbits, rats, mice, horses, and so on. Examples of conditions that can be detected/diagnosed in accordance with these methods include cancers. Polynucleotides corresponding to genes that exhibit the appropriate expression pattern can be used to detect cancer in a subject. For a review of markers of cancer, see, e.g., Hanahan et al. Cell 100:57-70 (2000).

[0309] One detection/diagnostic method comprises: (a) obtaining from a mammal (e.g., a human) a biological sample, (b) detecting the presence in the sample of a CA protein and (c) comparing the amount of product present with that in a control sample. In accordance with this method, the presence in the sample of elevated levels of a CA gene product indicates that the subject has a neoplastic or preneoplastic condition.

[0310] Biological samples suitable for use in this method include biological fluids such as serum, plasma, pleural effusions, urine and cerebro-spinal fluid, CSF, tissue samples (e.g., mammary tumor or prostate tissue slices) can also be used in the method of the invention, including samples derived from biopsies. Cell cultures or cell extracts derived, for example, from tissue biopsies can also be used.

[0311] The compound is preferably a binding protein, e.g., an antibody, polyclonal or monoclonal, or antigen binding fragment thereof, which can be labeled with a detectable marker (e.g., fluorophore, chromophore or isotope, etc). Where appropriate, the compound can be attached to a solid support such as a bead, plate, filter, resin, etc. Determination of formation of the complex can be effected by contacting the complex with a further compound (e.g., an antibody) that specifically binds to the first compound (or complex). Like the first compound, the further compound can be attached to a solid support and/or can be labeled with a detectable marker.

[0312] The identification of elevated levels of CA protein in accordance with the present invention makes possible the identification of subjects (patients) that are likely to benefit from adjuvant therapy. For example, a biological sample from a post primary therapy subject (e.g., subject having undergone surgery) can be screened for the presence of circulating CA protein, the presence of elevated levels of the protein, determined by studies of normal populations, being indicative of residual tumor tissue. Similarly, tissue from the cut site of a surgically removed tumor can be examined (e.g., by immunofluorescence), the presence of elevated levels of product (relative to the surrounding tissue) being indicative of incomplete removal of the tumor. The ability to identify such subjects makes it possible to tailor therapy to the needs of the particular subject. Subjects undergoing non-surgical therapy, e.g., chemotherapy or radiation therapy, can also be monitored, the presence in samples from such subjects of elevated levels of CA protein being indicative of the need for continued treatment. Staging of the disease (for example, for purposes of optimizing treatment regimens) can also be effected, for example, by biopsy e.g., with antibody specific for a CA protein.

[0313] (f) Animal Models and Transgenics

[0314] In another preferred embodiment CA genes find use in generating animal models of cancers, particularly lymphomas and carcinomas. As is appreciated by one of ordinary skill in the art, when the CA gene identified is repressed or diminished in CA tissue, gene therapy technology wherein antisense RNA directed to the CA gene will also diminish or repress expression of the gene. An animal generated as such serves as an animal model of CA that finds use in screening bioactive drug candidates. Similarly, gene knockout technology, for example as a result of homologous recombination with an appropriate gene targeting vector, will result in the absence of the CA protein. When desired, tissue-specific expression or knockout of the CA protein may be necessary.

[0315] It is also possible that the CA protein is overexpressed in cancer. As such, transgenic animals can be generated that overexpress the CA protein. Depending on the desired expression level, promoters of various strengths can be employed to express the transgene. Also, the number of copies of the integrated transgene can be determined and compared for a determination of the expression level of the transgene. Animals generated by such methods find use as animal models of CA and are additionally useful in screening for bioactive molecules to treat cancer.

[0316] Characterization of CA Sequences

[0317] The CA nucleic acid sequences of the invention are depicted in Tables 1-28. The sequences in each Table include genomic DNA sequence (mouse genomic sequences mDxx-yyy; human genomic sequences hDxx-yyy), sequence corresponding to the mRNA(s) generated therefrom (mRxx-yyy; hRxx-yyy) and amino acid sequences of the proteins (mPxx-yyy; hPxx-yyy encoded by the mRNA for both mouse and human genes. N/A indicates a gene that has been identified, but for which there has not been a name ascribed.

[0318] The CA sequences were analyzed by Panther™ (Molecular Diagnostics, Palo Alto, Calif.) software designed to detect homologs and enable prediction of molecular function through a system for protein functional classification. Human Gene Ontlogy annotations were prepared in accordance with the Gene Ontology Consortium (Gene Ontology: tool for the unification of biology. The Gene Ontology Consortium Nature Genet. 25: 25-29 (2000)). Similar analysis was carried out by determining IPR information regarding the CA polypeptides from InterPro, which is an integrated documentation resource for protein families, domains and functional sites (Apweiler at al. Bioinformatics 16(12):1145-1150 (2000)).

[0319] The CA sequences may be classified according to the following predicted general classifications of function by Panther™ analysis, human gene ontology and IPR domain information for polypeptides SEQ ID NOS: 6, 12, 18, 24, 30, 36, 42, 48, 54, 60, 66, 72, 78, 84, 90, 96, 102, 108, 114, 120, 126, 132, 138, 144, 150, 156, 162, 168, 170, 172, 174, 176, 178, 180, 182, 184, and 186 shown in Tables 1-28.

TABLE 29

| HUMAN PROTEIN | CLASSIFICATION |
|---|---|
| hP10-001 | HUMAN PANTHER CLASSIFICATIONS |
| (SEQ ID NO: 6) | FAMILY (SUBFAMILY) |
| | LIV-1-RELATED(LIV-1) |
| | MOLECULAR FUNCTIONS |
| | MOLECULAR FUNCTION UNCLASSIFIED |
| | BIOLOGICAL PROCESS |
| | ONCOGENESIS |
| | HOMEOSTASIS > OTHER HOMEOSTASIS ACTIVITIES |
| | HUMAN GENE ONTOLOGY |
| | PROCESS |
| | pheromone processing > a-factor processing (proteolytic) |
| | pheromone induction of gene expression |
| | peptidoglycan catabolism > pheromone induction of gene expression |
| | from Pol II promoter |
| | transcription regulation from Pol II promoter |
| | pheromone response |
| | FUNCTION |
| | glucosidase > mannosyl-oligosaccharide glucosidase (processing A- |
| | glucosidase I) |
| | enzyme > N-acetylglucosaminylphosphatidylinositol deacetylase |
| | LOCATION |
| | cell > membrane fraction |
| | plasma membrane > integral plasma membrane protein |
| | GO cellular component > extracellular |
| | HUMAN PROTEIN DOMAINS (INTERPRO SIGNATURES) |
| | NULL (HIS RICH 4 ) |
| | IPR000822 (ZINC FINGER C2H2 1 ) |
| | IPR000345 (CYTOCHROME C) |
| hP11-031 | HUMAN PANTHER CLASSIFICATIONS |
| (SEQ ID NO: 12) | No Panther Hit |
| | HUMAN GENE ONTOLOGY |
| | PROCESS |
| | neurogenesis > pan-neural process |
| | cell motility > muscle contraction |
| | cell surface receptor linked signal transduction > G protein linked |
| | receptor protein signaling pathway |
| | cell-cell signaling > synaptic transmission |
| | FUNCTION |
| | enzyme > choline O-acetyltransferase |
| | LOCATION |
| | extracellular > extracellular space |
| | HUMAN PROTEIN DOMAINS (INTERPRO SIGNATURES) |
| | IPR001483 (Urotensin II ) |
| | IPR001483 (UROTENSIN II) |
| hP08-003 | HUMAN PANTHER CLASSIFICATIONS |
| (SEQ ID NO: 18) | FAMILY (SUBFAMILY) |
| | NOTCH AND FIBRILLIN RELATED(FIBRILLIN) |
| | MOLECULAR FUNCTIONS |
| | EXTRACELLULAR MATRIX > EXTRACELLULAR MATRIX |
| | STRUCTURAL PROTEIN |
| | BIOLOGICAL PROCESS |
| | BIOLOGICAL PROCESS UNCLASSIFIED |
| | HUMAN GENE ONTOLOGY |
| | PROCESS |
| | mesoderm development > skeletal development |
| | ectoderm development > epidermal differentiation |
| | embryogenesis and morphogenesis > histogenesis and organogenesis |
| | developmental processes > embryogenesis and morphogenesis |
| | ectoderm development > neurogenesis |
| | FUNCTION |
| | ligand binding or carrier > calcium binding |
| | ligand binding or carrier > protein binding |
| | GO molecular function > cell adhesion |
| | GO molecular function > ligand binding or carrier |
| | molecular_function unknown > lymphocyte antigen |
| | LOCATION |
| | extracellular > extracellular matrix |
| | fibrillar collagen > collagen type III |
| | extracellular > extracellular space |
| | cell > membrane fraction |
| | plasma membrane > integral plasma membrane protein |
| | HUMAN PROTEIN DOMAINS (INTERPRO SIGNATURES) |
| | IPR001438 (EGFBLOOD ) |
| | IPR000152 (ASX HYDROXYL ) |
| | IPR000561 (EGF 2 ) |
| | IPR000561 (EGF 1 ) |
| | IPR001881 (EGF CA) |
| | IPR001881 (EGF CA ) |
| | IPR000561 (EGF ) |
| | IPR000561 (EGF ) |
| | IPR002212 (TB ) |
| | NULL (GLY RICH ) |
| | IPR001881 (EGF CA 2 43 ) |
| | IPR000694 (PRO RICH ) |
| | NULL (CYS RICH 2 ) |
| hP08-017 | HUMAN PANTHER CLASSIFICATIONS |
| (SEQ ID NO: 24) | FAMILY (SUBFAMILY) |
| | BUTYROPHILIN-RELATED(BUTYROPHILIN) |
| | MOLECULAR FUNCTIONS |
| | RECEPTOR > OTHER RECEPTOR |
| | BIOLOGICAL PROCESS |
| | BIOLOGICAL PROCESS UNCLASSIFIED |
| | HUMAN GENE ONTOLOGY |
| | PROCESS |
| | nucleotide metabolism > lipid metabolism |
| | action potential regulation > ionic insulation of neurons by glial cells |
| | stress response > defence response |
| | defence response > immune response |
| | neurogenesis > central nervous system development |
| | FUNCTION |
| | defense/immunity protein > major histocompatibility complex |
| | antigen |
| | B cell receptor |
| | defense/immunity protein > major histocompatibility complex |
| | antigen |
| | adenosinetriphosphatase > myosin ATPase |
| | molecular_function unknown > lymphocyte antigen |
| | O-glucosyl hydrolase |
| | antimicrobial response protein > lysozyme |
| | LOCATION |
| | plasma membrane > integral plasma membrane protein |
| | cell > membrane fraction |
| | cell > cytoplasm |
| | cell > plasma membrane |
| | GO cellular component > extracellular |
| | HUMAN PROTEIN DOMAINS (INTERPRO SIGNATURES) |
| | IPR003596 (IGv ) |
| | IPR003599 (IG ) |
| | IPR003006 (ig) |
| hP08-020 | HUMAN PANTHER CLASSIFICATIONS |
| (SEQ ID NO: 30) | FAMILY (SUBFAMILY) |
| | TUMOR NECROSIS FACTOR FAMILY MEMBER |
| | (LYMPHOTOXIN-BETA ) |
| | MOLECULAR FUNCTIONS |
| | SIGNALING MOLECULE > CYTOKINE > OTHER CYTOKINE |
| | BIOLOGICAL PROCESS |
| | SIGNAL TRANSDUCTION > CELL SURFACE RECEPTOR |
| | MEDIATED SIGNAL TRANSDUCTION > CYTOKINE AND CHEMOKINE |
| | MEDIATED SIGNALING PATHWAY |
| | IMMUNITY AND DEFENSE > B-CELL- AND ANTIBODY- |
| | MEDIATED IMMUNITY |
| | IMMUNITY AND DEFENSE > MACROPHAGE-MEDIATED |
| | IMMUNITY |
| | IMMUNITY AND DEFENSE > NATURAL KILLER CELL |
| | MEDIATED IMMUNITY |
| | IMMUNITY AND DEFENSE > CYTOKINE/CHEMOKINE |
| | MEDIATED IMMUNITY |
| | IMMUNITY AND DEFENSE > T-CELL MEDIATED |
| | IMMUNITY |
| | HUMAN GENE ONTOLOGY |
| | PROCESS |
| | cell death > apoptosis |
| | defence response > immune response |
| | defence response > inflammatory response |
| | apoptosis > killing transformed cells |
| | cell communication > signal transduction |
| | FUNCTION |
| | tRNA ligase > phenylalanine--tRNA ligase |
| | enzyme > lactose synthase |
| | molecular_function unknown > lymphocyte antigen |
| | LOCATION |
| | cell > membrane fraction |
| | Golgi apparatus > secretory vesicle |
| | plasma membrane > integral plasma membrane protein |
| | cell > plasma membrane |
| | cell > soluble fraction |
| | HUMAN PROTEIN DOMAINS (INTERPRO SIGNATURES) |
| | IPR000478 (TNECROSISFCT) |
| | IPR002961 (TNFC ) |
| | IPR000478 (TNF ) |
| | IPR000478 (TNF ) |
| | IPR000478 (TNF 2 ) |
| | IPR000478 (TNF 1 ) |
| | IPR003636 (sp Q06643 TNFC HUMAN) |
| hP08-020.1 | HUMAN PANTHER CLASSIFICATIONS |
| (SEQ ID NO: 170) | FAMILY (SUBFAMILY) |
| | TUMOR NECROSIS FACTOR FAMILY MEMBER |
| | (LYMPHOTOXIN-BETA ) |
| | MOLECULAR FUNCTIONS |
| | SIGNALING MOLECULE > CYTOKINE > OTHER CYTOKINE |
| | BIOLOGICAL PROCESS |
| | SIGNAL TRANSDUCTION > CELL SURFACE RECEPTOR |
| | MEDIATED SIGNAL TRANSDUCTION > CYTOKINE AND CHEMOKINE |
| | MEDIATED SIGNALING PATHWAY |
| | IMMUNITY AND DEFENSE > B-CELL- AND ANTIBODY- |
| | MEDIATED IMMUNITY |
| | IMMUNITY AND DEFENSE > MACROPHAGE-MEDIATED |
| | IMMUNITY |
| | IMMUNITY AND DEFENSE > NATURAL KILLER CELL |
| | MEDIATED IMMUNITY |
| | IMMUNITY AND DEFENSE > CYTOKINE/CHEMOKINE |
| | MEDIATED IMMUNITY |
| | IMMUNITY AND DEFENSE > T-CELL MEDIATED |
| | IMMUNITY |
| | HUMAN GENE ONTOLOGY |
| | PROCESS |
| | cell death > apoptosis |
| | defence response > immune response |
| | defence response > inflammatory response |
| | apoptosis > killing transformed cells |
| | cell communication > signal transduction |
| | FUNCTION |
| | tRNA ligase > phenylalanine--tRNA ligase |
| | enzyme > lactose synthase |
| | molecular_function unknown > lymphocyte antigen |
| | LOCATION |
| | cell > membrane fraction |
| | Golgi apparatus > secretory vesicle |
| | plasma membrane > integral plasma membrane protein |
| | cell > plasma membrane |
| | cell > soluble fraction |
| | HUMAN PROTEIN DOMAINS (INTERPRO SIGNATURES) |
| | IPR000478 (TNECROSISFCT ) |
| | IPR002961 (TNFC ) |
| | IPR000478 (TNF ) |
| | IPR000478 (TNF ) |
| | IPR000478 (TNF 2 ) |
| | IPR000478 (TNF 1 ) |
| | IPR003636 (sp Q06643 TNFC HUMAN) |
| hP08-020.2 | HUMAN PANTHER CLASSIFICATIONS |
| (SEQ ID NO: 172) | FAMILY (SUBFAMILY) |
| | TUMOR NECROSIS FACTOR FAMILY |
| | MEMBER(LYMPHOTOXIN-BETA) |
| | MOLECULAR FUNCTIONS |
| | SIGNALING MOLECULE > CYTOKINE > OTHER CYTOKINE |
| | BIOLOGICAL PROCESS |
| | SIGNAL TRANSDUCTION > CELL SURFACE RECEPTOR |
| | MEDIATED SIGNAL TRANSDUCTION > CYTOKINE AND CHEMOKINE |
| | MEDIATED SIGNALING PATHWAY |
| | IMMUNITY AND DEFENSE > B-CELL- AND ANTIBODY- |
| | MEDIATED IMMUNITY |
| | IMMUNITY AND DEFENSE > MACROPHAGE-MEDIATED |
| | IMMUNITY |
| | IMMUNITY AND DEFENSE > NATURAL KILLER CELL |
| | MEDIATED IMMUNITY |
| | IMMUNITY AND DEFENSE > CYTOKINE/CHEMOKINE |
| | MEDIATED IMMUNITY |
| | IMMUNITY AND DEFENSE > T-CELL MEDIATED |
| | IMMUNITY |
| | HUMAN GENE ONTOLOGY |
| | PROCESS |
| | cell death > apoptosis |
| | defence response > immune response |
| | defence response > inflammatory response |
| | apoptosis > killing transformed cells |
| | cell communication > signal transduction |
| | FUNCTION |
| | tRNA ligase > phenylalanine--tRNA ligase |
| | enzyme > lactose synthase |
| | molecular_function unknown > lymphocyte antigen |
| | LOCATION |
| | cell > membrane fraction |
| | Golgi apparatus > secretory vesicle |
| | plasma membrane > integral plasma membrane protein |
| | cell > plasma membrane |
| | cell > soluble fraction |
| | HUMAN PROTEIN DOMAINS (INTERPRO SIGNATURES) |
| | IPR002961 (TNFC) |
| hP08-034 | HUMAN PANTHER CLASSIFICATIONS |
| (SEQ ID NO: 36) | FAMILY (SUBFAMILY) |
| | CYCLIC-NUCLEOTIDE-GATED CATION CHANNEL- |
| | RELATED(VOLTAGE-GATED POTASSIUM CHANNEL EAG) |
| | MOLECULAR FUNCTIONS |
| | ION CHANNEL > VOLTAGE-GATED ION CHANNEL > |
| | VOLTAGE-GATED POTASSIUM CHANNEL |
| | BIOLOGICAL PROCESS |
| | TRANSPORT > ION TRANSPORT > CATION TRANSPORT |
| | HUMAN GENE ONTOLOGY |
| | PROCESS |
| | monovalent inorganic cation transport > potassium transport |
| | transport > ion transport |
| | muscle development > myocyte fusion |
| | cell communication > signal transduction |
| | FUNCTION |
| | GO molecular function > nucleic acid binding |
| | protein histidine kinase > two-component sensor molecule |
| | signal transduction |
| | LOCATION |
| | integral plasma membrane protein > voltage-gated potassium |
| | channel |
| | cell > membrane fraction |
| | plasma membrane > integral plasma membrane protein |
| | nuclear membrane > nuclear membrane lumen |
| | HUMAN PROTEIN DOMAINS (INTERPRO SIGNATURES) |
| | IPR003938 (EAGCHANLFMLY ) |
| | IPR000700 (PAS ASSOCIATED ) |
| | IPR001472 (NLS BP ) |
| | IPR001622 (CHANNEL PORE K) |
| | IPR003949 (EAGCHANNEL ) |
| | IPR000595 (cNMP ) |
| | IPR001610 (PAC ) |
| | IPR002025 (CNG membrane ) |
| | IPR001610 (PAC ) |
| | IPR000595 (cNMP binding ) |
| | IPR000636 (CATION CHANNEL TM ) |
| | IPR000595 (CNMP BINDING 3 ) |
| hP08-050 | HUMAN PANTHER CLASSIFICATIONS |
| (SEQ ID NO: 42) | FAMILY (SUBFAMILY) |
| | CATION-CHLORIDE COTRANSPORTER- |
| | RELATED(POTASSIUM-CHLORIDE COTRANSPORTER SLC12A7-RELATED) |
| | MOLECULAR FUNCTIONS |
| | TRANSPORTER > OTHER TRANSPORTER |
| | TRANSPORTER > CATION TRANSPORTER |
| | BIOLOGICAL PROCESS |
| | TRANSPORT > ION TRANSPORT |
| | HUMAN GENE ONTOLOGY |
| | PROCESS |
| | cell growth and maintenance > cell volume regulation |
| | cell growth and maintenance > transport |
| | transport > amino-acid transport |
| | transport > ion transport |
| | FUNCTION |
| | enzyme > 11-beta-hydroxysteroid dehydrogenase |
| | LOCATION |
| | plasma membrane > integral plasma membrane protein |
| | cell > membrane fraction |
| | cell > plasma membrane |
| | HUMAN PROTEIN DOMAINS (INTERPRO SIGNATURES) |
| | No Domain Hit |
| hP08-052 | HUMAN PANTHER CLASSIFICATIONS |
| (SEQ ID NO: 48) | FAMILY (SUBFAMILY) |
| | HEPARIN-BINDING GROWTH FACTOR FAMILY |
| | MEMBER/FGF(FIBROBLAST GROWTH FACTOR-10) |
| | MOLECULAR FUNCTIONS |
| | SIGNALING MOLECULE > GROWTH FACTOR |
| | BIOLOGICAL PROCESS |
| | SIGNAL TRANSDUCTION > INTRACELLULAR SIGNALING |
| | CASCADE > MAPKKK CASCADE |
| | SIGNAL TRANSDUCTION > CELL COMMUNICATION > |
| | LIGAND-MEDIATED SIGNALING |
| | SIGNAL TRANSDUCTION > CELL SURFACE RECEPTOR |
| | MEDIATED SIGNAL TRANSDUCTION > RECEPTOR PROTEIN TYROSINE |
| | KINASE SIGNALING PATHWAY |
| | DEVELOPMENTAL PROCESSES > OTHER |
| | DEVELOPMENTAL PROCESS |
| | DEVELOPMENTAL PROCESSES > MESODERM |
| | DEVELOPMENT |
| | HUMAN GENE ONTOLOGY |
| | PROCESS |
| | cell communication > signal transduction |
| | cell communication > cell-cell signaling |
| | embryogenesis and morphogenesis > histogenesis and organogenesis |
| | cell proliferation > positive control of cell proliferation |
| | ectoderm development > neurogenesis |
| | FUNCTION |
| | GO molecular function > cell cycle regulator |
| | glycosaminoglycan binding > heparin binding |
| | cytokine > fibroblast growth factor receptor ligand |
| | sugar binding > chitin binding |
| | LOCATION |
| | extracellular > extracellular space |
| | GO cellular component > extracellular |
| | cell > cytoplasm |
| | cell > nucleus |
| | cell > soluble fraction |
| | HUMAN PROTEIN DOMAINS (INTERPRO SIGNATURES) |
| | IPR002348 (IL1HBGF ) |
| | IPR002209 (HBGFFGF ) |
| | IPR002209 (FGF ) |
| | IPR002209 (FGF ) |
| | IPR002209 (HBGF FGF ) |
| | IPR002209 (sp P70492 FGFA RAT) |
| hP09-004 | HUMAN PANTHER CLASSIFICATIONS |
| (SEQ ID NO: 54) | FAMILY (SUBFAMILY) |
| | VOLTAGE-DEPENDENT CALCIUM AND SODIUM CHANNEL |
| | ALPHA SUBUNIT(VOLTAGE-DEPENDENT L-TYPE CALCIUM CHANNEL |
| | ALPHA SUBUNIT) |
| | MOLECULAR FUNCTIONS |
| | ION CHANNEL > VOLTAGE-GATED ION CHANNEL > |
| | VOLTAGE-GATED CALCIUM CHANNEL |
| | BIOLOGICAL PROCESS |
| | TRANSPORT > ION TRANSPORT > CATION TRANSPORT |
| | NEURONAL ACTIVITIES > SYNAPTIC TRANSMISSION > |
| | NEUROTRANSMITTER RELEASE |
| | MUSCLE CONTRACTION |
| | CELL STRUCTURE AND MOTILITY > CELL MOTILITY |
| | HUMAN GENE ONTOLOGY |
| | PROCESS |
| | ion transport > cation transport |
| | monovalent inorganic cation transport > potassium transport |
| | cell motility > muscle contraction |
| | di-, tri-valent inorganic cation transport > calcium ion transport |
| | transport > ion transport |
| | FUNCTION |
| | ligand binding or carrier > calcium binding |
| | ligand binding or carrier > lipid binding |
| | GO molecular function > ligand binding or carrier |
| | nucleotide binding > ATP binding |
| | LOCATION |
| | cell > membrane fraction |
| | integral plasma membrane protein > voltage-gated calcium channel |
| | plasma membrane > integral plasma membrane protein |
| | integral plasma membrane protein > voltage-gated potassium |
| | channel |
| | HUMAN PROTEIN DOMAINS (INTERPRO SIGNATURES) |
| | IPR003091 (KCHANNEL ) |
| | IPR002077 (CACHANNEL ) |
| | IPR000636 (ion trans ) |
| | IPR000636 (CATION CHANNEL TM 4 ) |
| | NULL (MET RICH ) |
| | IPR002111 (CATION CHANNEL TRPL 2 ) |
| | IPR001472 (NLS BP 2 ) |
| | IPR001682 (CHANNEL PORE CA NA 4 ) |
| | IPR001687 (ATP GTP A) |
| hP09-015 | HUMAN PANTHER CLASSIFICATION |
| (SEQ ID NO: 60) | FAMILY (SUBFAMILY) |
| | ATP-BINDING CASSETTE TRANSPORTER-RELATED(ATP- |
| | BINDING CASSETTE TRANSPORTER ABCC4-RELATED) |
| | MOLECULAR FUNCTIONS |
| | TRANSPORTER > ATP-BINDING CASSETTE |
| | BIOLOGICAL PROCESS |
| | TRANSPORT |
| | HUMAN GENE ONTOLOGY |
| | PROCESS |
| | cell growth and maintenance > transport |
| | xenobiotic metabolism > drug resistance |
| | monovalent inorganic cation transport > potassium transport |
| | cell growth and maintenance > invasive growth |
| | peptide transport > oligopeptide transport |
| | FUNCTION |
| | nucleotide binding > ATP binding |
| | P-P-bond-hydrolysis-driven transporter > ATP-binding cassette |
| | (ABC) transporter |
| | adenosinetriphosphatase |
| | protein binding > lipoprotein binding |
| | enzyme > adenosinetriphosphatase |
| | nucleic acid binding > DNA binding |
| | LOCATION |
| | cell > membrane fraction |
| | plasma membrane > integral plasma membrane protein |
| | cell > plasma membrane |
| | gap junction > connexon |
| | fibrillar collagen > collagen type I |
| | HUMAN PROTEIN DOMAINS (INTERPRO SIGNATURES) |
| | IPR003593 (AAA ) |
| | IPR001140 (ABC membrane ) |
| | IPR003439 (ABC tran ) |
| | IPR003439 (DA BOX 2 ) |
| | IPR001687 (ATP GTP A2 2 ) |
| | IPR003439 (ABC TRANSPORTER ) |
| | IPR001687 (ATP GTP A) |
| hP09-016 | HUMAN PANTHER CLASSIFICATIONS |
| (SEQ ID NO: 66) | FAMILY (SUBFAMILY) |
| | CYTOKINE RECEPTOR HUMAN GENE ONTOLOGY |
| | FUNCTION |
| | B cell receptor |
| | defense/immunity protein > immunoglobulin |
| | enzyme > lactose synthase |
| | transcription factor > transcription activating factor |
| | molecular_function unknown > lymphocyte antigen |
| | LOCATION |
| | plasma membrane > integral plasma membrane protein |
| | cell > membrane fraction |
| | HUMAN PROTEIN DOMAINS (INTERPRO SIGNATURES) |
| | IPR001777 (fn3 ) |
| | IPR003531 (HEMATOPO REC S F1) |
| hP09-016.1 | HUMAN PANTHER CLASSIFICATIONS |
| (SEQ ID NO: 174) | FAMILY (SUBFAMILY) |
| | CYTOKINE RECEPTORHUMAN GENE ONTOLOGY |
| | FUNCTION |
| | B cell receptor |
| | defense/immunity protein > immunoglobulin |
| | enzyme > lactose synthase |
| | LOCATION |
| | plasma membrane > integral plasma membrane protein |
| | cell > membrane fraction |
| | HUMAN PROTEIN DOMAINS (INTERPRO SIGNATURES) |
| | IPR001777 (fn3 ) |
| | IPR003531 (HEMATOPO REC S F1) |
| hP10-008 | HUMAN PANTHER CLASSIFICATIONS |
| (SEQ ID NO: 72) | FAMILY (SUBFAMILY) |
| | NOTCH AND FIBRILLIN RELATED(MATRILIN 2-RELATED) |
| | MOLECULAR FUNCTIONS |
| | MOLECULAR FUNCTION UNCLASSIFIED |
| | BIOLOGICAL PROCESS |
| | DEVELOPMENTAL PROCESSES > MESODERM |
| | DEVELOPMENT > SKELETAL DEVELOPMENT |
| | HUMAN GENE ONTOLOGY |
| | PROCESS |
| | skeletal development > cartilage condensation |
| | ectoderm development > neurogenesis |
| | cell communication > cell adhesion |
| | mesoderm development > skeletal development |
| | FUNCTION |
| | ligand binding or carrier > calcium binding |
| | protein binding > collagen binding |
| | ligand binding or carrier > calcium binding |
| | molecular_function unknown > lymphocyte antigen |
| | cell adhesion |
| | transmembrane receptor > cell adhesion receptor |
| | LOCATION |
| | extracellular > extracellular matrix |
| | GO cellular component > extracellular |
| | cell > membrane fraction |
| | extracellular > extracellular space |
| | fibrillar collagen > collagen type III |
| | HUMAN PROTEIN DOMAINS (INTERPRO SIGNATURES) |
| | IPR002035 (VWFADOMAIN ) |
| | IPR000152 (ASX HYDROXYL ) |
| | IPR000561 (EGF 2) |
| | IPR001881 (EGF CA ) |
| | IPR002035 (VWA ) |
| | IPR000561 (EGF ) |
| | IPR000561 (EGF ) |
| | IPR002035 (vwa ) |
| | IPR002035 (VWFA 2 ) |
| | IPR001881 (EGF CA 2 3 ) |
| | NULL (CYS RICH ) |
| hP10-010 | HUMAN PANTHER CLASSIFICATIONS |
| (SEQ ID NO: 78) | FAMILY (SUBFAMILY) |
| | COLLAGEN ALPHA CHAIN(COLLAGEN ALPHA 1(XIX) |
| | CHAIN) |
| | MOLECULAR FUNCTIONS |
| | EXTRACELLULAR MATRIX > EXTRACELLULAR MATRIX |
| | STRUCTURAL PROTEIN |
| | BIOLOGICAL PROCESS |
| | DEVELOPMENTAL PROCESSES > MESODERM |
| | DEVELOPMENT > SKELETAL DEVELOPMENT |
| | HUMAN GENE ONTOLOGY |
| | PROCESS |
| | cell communication > cell adhesion |
| | ectoderm development > epidermal differentiation |
| | mesoderm development > skeletal development |
| | skeletal development > cartilage condensation |
| | GO biological process > cell growth and maintenance |
| | FUNCTION |
| | blood coagulation factor > protein C (activated) |
| | serine-type endopeptidase |
| | protein binding > collagen binding |
| | GO molecular function > cell adhesion |
| | lectin > mannose binding lectin |
| | mannose binding |
| | proteinase inhibitor > serine protease inhibitor |
| | LOCATION |
| | fibrillar collagen > collagen type III |
| | extracellular matrix > collagen |
| | fibrillar collagen > collagen type V |
| | fibrillar collagen > collagen type IV |
| | fibrillar collagen > collagen type I |
| | HUMAN PROTEIN DOMAINS (INTERPRO SIGNATURES) |
| | IPR003129 (TSPN ) |
| | IPR003129 (TSPN ) |
| | IPR000087 (Collagen ) |
| | NULL (GLY RICH ) |
| | IPR000694 (PRO RICH ) |
| | IPR000087 (COLLAGEN REP 3) |
| hP10-018 | HUMAN PANTHER CLASSIFICATIONS |
| (SEQ ID NO: 84) | FAMILY (SUBFAMILY) |
| | VOLTAGE-DEPENDENT CALCIUM AND SODIUM CHANNEL |
| | ALPHA SUBUNIT (VOLTAGE-DEPENDENT P/Q-TYPE CALCIUM CHANNEL |
| | ALPHA-1A ) |
| | MOLECULAR FUNCTIONS |
| | ION CHANNEL > VOLTAGE-GATED ION CHANNEL > |
| | VOLTAGE-GATED CALCIUM CHANNEL |
| | BIOLOGICAL PROCESS |
| | TRANSPORT > ION TRANSPORT > CATION TRANSPORT |
| | NEURONAL ACTIVITIES > SYNAPTIC TRANSMISSION > |
| | NEUROTRANSMITTER RELEASE |
| | MUSCLE CONTRACTION |
| | HUMAN GENE ONTOLOGY |
| | PROCESS |
| | ion transport > cation transport |
| | monovalent inorganic cation transport > potassium transport |
| | cell-cell signaling > synaptic transmission |
| | transport > ion transport |
| | cell motility > muscle contraction |
| | FUNCTION |
| | ligand binding or carrier > calcium binding |
| | nucleotide binding > ATP binding |
| | ligand binding or carrier > lipid binding |
| | GO molecular function > ligand binding or carrier |
| | LOCATION |
| | cell > membrane fraction |
| | integral plasma membrane protein > voltage-gated calcium channel |
| | plasma membrane > integral plasma membrane protein |
| | HUMAN PROTEIN DOMAINS (INTERPRO SIGNATURES) |
| | IPR002077 (CACHANNEL ) |
| | IPR000636 (ion trans ) |
| | IPR000636 (CATION CHANNEL TM 4 ) |
| | NULL (SER RICH ) |
| | IPR002111 (CATION CHANNEL TRPL 3 ) |
| | IPR001682 (CHANNEL PORE CA NA 4) |
| hP10-018.1 | HUMAN PANTHER CLASSIFICATIONS |
| (SEQ ID NO: 176) | FAMILY (SUBFAMILY) |
| | VOLTAGE-DEPENDENT CALCIUM AND SODIUM CHANNEL |
| | ALPHA SUBUNIT (VOLTAGE-DEPENDENT P/Q-TYPE CALCIUM CHANNEL |
| | ALPHA-1A ) |
| | MOLECULAR FUNCTIONS |
| | ION CHANNEL > VOLTAGE-GATED ION CHANNEL > |
| | VOLTAGE-GATED CALCIUM CHANNEL |
| | BIOLOGICAL PROCESS |
| | TRANSPORT > ION TRANSPORT > CATION TRANSPORT |
| | NEURONAL ACTIVITIES > SYNAPTIC TRANSMISSION > |
| | NEUROTRANSMITTER RELEASE |
| | MUSCLE CONTRACTION |
| | HUMAN GENE ONTOLOGY |
| | PROCESS |
| | ion transport > cation transport |
| | monovalent inorganic cation transport > potassium transport |
| | cell-cell signaling > synaptic transmission |
| | transport > ion transport |
| | cell motility > muscle contraction |
| | FUNCTION |
| | ligand binding or carrier > calcium binding |
| | nucleotide binding > ATP binding |
| | ligand binding or carrier > lipid binding |
| | GO molecular function > ligand binding or carrier |
| | LOCATION |
| | cell > membrane fraction |
| | integral plasma membrane protein > voltage-gated calcium channel |
| | plasma membrane > integral plasma membrane protein |
| | HUMAN PROTEIN DOMAINS (INTERPRO SIGNATURES) |
| | IPR002077 (CACHANNEL ) |
| | IPR000636 (ion trans ) |
| | IPR000636 (CATION CHANNEL TM 4 ) |
| | NULL (SER RICH ) |
| | IPR002111 (CATION CHANNEL TRPL 3 ) |
| | IPR001682 (CHANNEL PORE CA NA 4) |
| hP10-018.2 | HUMAN PANTHER CLASSIFICATIONS |
| (SEQ ID NO: 178) | FAMILY (SUBFAMILY) |
| | VOLTAGE-DEPENDENT CALCIUM AND SODIUM CHANNEL |
| | ALPHA SUBUNIT(VOLTAGE-DEPENDENT P/Q-TYPE CALCIUM CHANNEL |
| | ALPHA-1A) |
| | MOLECULAR FUNCTIONS |
| | ION CHANNEL > VOLTAGE-GATED ION CHANNEL > |
| | VOLTAGE-GATED CALCIUM CHANNEL |
| | BIOLOGICAL PROCESS |
| | TRANSPORT > ION TRANSPORT > CATION TRANSPORT |
| | NEURONAL ACTIVIES > SYNAPTIC TRANSMISSION > |
| | NEUROTRANSMITTER RELEASE |
| | MUSCLE CONTRACTION |
| | HUMAN GENE ONTOLOGY |
| | PROCESS |
| | ion transport > cation transport |
| | monovalent inorganic cation transport > potassium transport |
| | cell-cell signaling > synaptic transmission |
| | transport > ion transport |
| | cell motility > muscle contraction |
| | FUNCTION |
| | ligand binding or carrier > calcium binding |
| | nucleotide binding > ATP binding |
| | ligand binding or carrier > lipid binding |
| | GO molecular function > ligand binding or carrier |
| | LOCATION |
| | cell > membrane fraction |
| | integral plasma membrane protein > voltage-gated calcium channel |
| | plasma membrane > integral plasma membrane protein |
| | HUMAN PROTEIN DOMAINS (INTERPRO SIGNATURES) |
| | IPR002077 (CACHANNEL ) |
| | IPR000636 (ion trans ) |
| | IPR000636 (CATION CHANNEL TM 4 ) |
| | NULL (SER RICH ) |
| | IPR002111 (CATION CHANNEL TRPL 3 ) |
| | IPR001682 (CHANNEL PORE CA NA 4) |
| hP10-024 | HUMAN PANTHER CLASSIFICATIONS |
| (SEQ ID NO: 90) | FAMILY (SUBFAMILY) |
| | PROTEIN TYROSINE KINASE(EPITHELIAL DISCOIDIN |
| | DOMAIN RECEPTOR-RELATED) |
| | MOLECULAR FUNCTIONS |
| | RECEPTOR > PROTEIN KINASE RECEPTOR |
| | KINASE > PROTEIN KINASE > TYROSINE PROTEIN |
| | KINASE RECEPTOR |
| | BIOLOGICAL PROCESS |
| | PROTEIN METABOLISM AND MODIFICATION > PROTEIN |
| | MODIFICATION > PROTEIN PHOSPHORYLATION |
| | SIGNAL TRANSDUCTION > CELL COMMUNICATION > |
| | CELL ADHESION-MEDIATED SIGNALING |
| | SIGNAL TRANSDUCTION > CELL SURFACE RECEPTOR |
| | MEDIATED SIGNAL TRANSDUCTION > RECEPTOR PROTEIN TYROSINE |
| | KINASE SIGNALING PATHWAY |
| | HUMAN GENE ONTOLOGY |
| | PROCESS |
| | protein modification > protein dephosphorylation |
| | protein modification > protein phosphorylation |
| | enzyme linked receptor protein signaling pathway > transmembrane |
| | receptor protein tyrosine kinase signaling pathway |
| | cell communication > signal transduction |
| | FUNCTION |
| | protein kinase > protein tyrosine kinase |
| | nucleotide binding > ATP binding |
| | enzyme > protein kinase |
| | transmembrane receptor |
| | protein tyrosine kinase > transmembrane receptor protein tyrosine |
| | kinase |
| | B cell receptor |
| | defense/immunity protein > immunoglobulin |
| | LOCATION |
| | cell > membrane fraction |
| | plasma membrane > integral plasma membrane protein |
| | cell > cytoplasm |
| | GO cellular component > intracellular |
| | cell > nucleus |
| | HUMAN PROTEIN DOMAINS (INTERPRO SIGNATURES) |
| | IPR001245 (TYRKINASE ) |
| | IPR002011 (RECEPTOR TYR KIN II ) |
| | LPR000421 (FA58C 1 ) |
| | IPR000421 (FA58C 2) |
| | IPR001245 (TyrKc ) |
| | IPR002290 (S TKc ) |
| | IPR000421 (FA58C ) |
| | IPR000421 (F5 F8 type C ) |
| | IPR000719 (pkinase ) |
| | IPR000719 (PROTEIN KINASE DOM ) |
| | IPR000421 (DS DOMAIN ) |
| | IPR001245 (PROTEIN KINASE TYR ) |
| hP10-025 | HUMAN PANTHER CLASSIFICATIONS |
| (SEQ ID NO: 96) | FAMILY (SUBFAMILY) |
| | IMMUNOGLOBULIN FC RECEPTOR (LOW AFFINITY |
| | IMMUNOGLOBULIN GAMMA FC REGION RECEPTOR II ) |
| | MOLECULAR FUNCTIONS |
| | RECEPTOR |
| | DEFENSE/IMMUNITY PROTEIN > IMMUNOGLOBULIN |
| | RECEPTOR FAMILY MEMBER |
| | BIOLOGICAL PROCESS |
| | IMMUNITY AND DEFENSE > MACROPHAGE-MEDIATED |
| | IMMUNITY |
| | IMMUNITY AND DEFENSE > B-CELL- AND ANTIBODY- |
| | MEDIATED IMMUNITY |
| | HUMAN GENE ONTOLOGY |
| | PROCESS |
| | stress response > defence response |
| | defence response > immune response |
| | phagocytosis > phagocytosis, engulfment |
| | defence response > inflammatory response |
| | cell communication > cell adhesion |
| | FUNCTION |
| | molecular_function unknown > lymphocyte antigen |
| | B cell receptor |
| | defense/immunity protein > immunoglobulin |
| | GO molecular function > cell adhesion |
| | molecular_function unknown > lymphocyte antigen |
| | sugar binding > lectin |
| | LOCATION |
| | cell > plasma membrane |
| | cell > membrane fraction |
| | plasma membrane > integral plasma membrane protein |
| | extracellular > extracellular space |
| | HUMAN PROTEIN DOMAINS (INTERPRO SIGNATURES) |
| | IPR003598 (IGc2 ) |
| | IPR003599 (IG ) |
| | IPR003006 (ig) |
| hP10-025 | HUMAN PANTHER CLASSIFICATIONS |
| (SEQ ID NO: 180) | FAMILY (SUBFAMILY) |
| | IMMUNOGLOBULIN FC RECEPTOR(LOW AFFINITY |
| | IMMUNOGLOBULIN GAMMA FC REGION RECEPTOR II) |
| | MOLECULAR FUNCTIONS |
| | RECEPTOR |
| | DEFENSE/IMMUNITY PROTEIN > IMMUNOGLOBULIN |
| | RECEPTOR FAMILY MEMBER |
| | BIOLOGICAL PROCESS |
| | IMMUNITY AND DEFENSE > MACROPHAGE-MEDIATED |
| | IMMUNITY |
| | IMMUNITY AND DEFENSE > B-CELL- AND ANTIBODY- |
| | MEDIATED IMMUNITY |
| | HUMAN GENE ONTOLOGY |
| | PROCESS |
| | stress response > defence response |
| | defence response > immune response |
| | phagocytosis > phagocytosis, engulfment |
| | defence response > inflammatory response |
| | cell communication > cell adhesion |
| | FUNCTION |
| | molecular_function unknown > lymphocyte antigen |
| | B cell receptor |
| | defense/immunity protein > immunoglobulin |
| | GO molecular function > cell adhesion |
| | molecular_function unknown > lymphocyte antigen |
| | sugar binding > lectin |
| | LOCATION |
| | cell > plasma membrane |
| | cell > membrane fraction |
| | plasma membrane > integral plasma membrane protein |
| | extracellular > extracellular space |
| | HUMAN PROTEIN DOMAINS (INTERPRO SIGNATURES) |
| | IPR003598 (IGc2 ) |
| | IPR003599 (IG ) |
| | IPR003006 (ig) |
| hP10-030 | HUMAN PANTHER CLASSIFICATIONS |
| (SEQ ID NO: 102) | FAMILY (SUBFAMILY) |
| | COMPLEMENT RECEPTOR-RELATED(COMPLEMENT |
| | RECEPTOR TYPE 1-RELATED) |
| | MOLECULAR FUNCTIONS |
| | DEFENSE/IMMUNITY PROTEIN > COMPLEMENT |
| | COMPONENT |
| | BIOLOGICAL PROCESS |
| | IMMUNITY AND DEFENSE > COMPLEMENT-MEDIATED |
| | IMMUNITY |
| | HUMAN GENE ONTOLOGY |
| | PROCESS |
| | complement activation > complement activation, classical pathway |
| | immune response > complement activation |
| | cell communication > cell adhesion |
| | cell growth and maintenance > invasive growth |
| | protein-membrane targeting > post-translational membrane targeting |
| | FUNCTION |
| | ligand binding or carrier > calcium binding |
| | cell adhesion > selectin |
| | lectin |
| | GO molecular function > cell adhesion |
| | enzyme > acetylcholinesterase |
| | plasma protein |
| | defense/immunity protein > complement component |
| | LOCATION |
| | cell > membrane fraction |
| | plasma membrane > integral plasma membrane protein |
| | extracellular > extracellular space |
| | cell > plasma membrane |
| | cell > soluble fraction |
| | HUMAN PROTEIN DOMAINS (INTERPRO SIGNATURES) |
| | IPR000436 (CCP ) |
| | IPR000436 (sushi ) |
| | IPR001424 (SOD CU ZN 1) |
| hP10-037 | HUMAN PANTHER CLASSIFICATIONS |
| (SEQ ID NO: 108) | FAMILY (SUBFAMILY) |
| | WNT PROTEIN(WNT-10 PROTEIN) |
| | MOLECULAR FUNCTIONS |
| | SIGNALING MOLECULE > OTHER SIGNALING MOLECULE |
| | BIOLOGICAL PROCESS |
| | DEVELOPMENTAL PROCESSES |
| | HUMAN GENE ONTOLOGY |
| | PROCESS |
| | cell surface receptor linked signal transduction > fz2 receptor |
| | signaling pathway |
| | GO biological process > developmental processes |
| | developmental processes > embryogenesis and morphogenesis |
| | cell communication > signal transduction |
| | cell communication > cell-cell signaling |
| | FUNCTION |
| | GO molecular function > cell cycle regulator |
| | LOCATION |
| | extracellular > extracellular matrix |
| | extracellular > extracellular space |
| | cell > soluble fraction |
| | GO cellular component > extracellular |
| | HUMAN PROTEIN DOMAINS (INTERPRO SIGNATURES) |
| | IPR000970 (WNTPROTEIN ) |
| | IPR000970 (WNT1 ) |
| | IPR000970 (wnt ) |
| | NULL (CYS RICH ) |
| | IPR000970 (WNT1) |
| hP10-038 (SEQ ID NO: | HUMAN PANTHER CLASSIFICATIONS |
| 114) | FAMILY (SUBFAMILY) |
| | AMINO ACID TRANSPORTER-RELATED (EXCITATORY |
| | AMINO ACID TRANSPORTER 2 SLC1A2-RELATED ) |
| | MOLECULAR FUNCTIONS |
| | TRANSPORTER > OTHER TRANSPORTER |
| | BIOLOGICAL PROCESS |
| | AMINO-ACID METABOLISM |
| | TRANSPORT > AMINO ACID TRANSPORT |
| | TRANSPORT > ION TRANSPORT |
| | HUMAN GENE ONTOLOGY |
| | PROCESS |
| | organic anion transport > dicarboxylic acid transport |
| | L-amino-acid transport > glutamate transport |
| | neurotransmitter maintenance > neurotransmitter uptake |
| | L-amino-acid transport > aspartate transport |
| | cell growth and maintenance > transport |
| | FUNCTION |
| | galactosidase > beta-galactosidase |
| | LOCATION |
| | cell > membrane fraction |
| | plasma membrane > integral plasma membrane protein |
| | mitochondrial membrane > mitochondrial inner membrane |
| | HUMAN PROTEIN DOMAINS (INTERPRO SIGNATURES) |
| | IPR001991 (EDTRNSPORT ) |
| | IPR001991 (SDF ) |
| | IPR001991 (NA DICARBOXYL SYMP 1 ) |
| | IPR001991 (NA DICARBOXYL SYMP 2) |
| hP10-038 | HUMAN PANTHER CLASSIFICATIONS |
| (SEQ ID NO: 182) | FAMILY (SUBFAMILY) |
| | AMINO ACID TRANSPORTER-RELATED (EXCITATORY |
| | AMINO ACID TRANSPORTER 2 SLC1A2-RELATED ) |
| | MOLECULAR FUNCTIONS |
| | TRANSPORTER > OTHER TRANSPORTER |
| | BIOLOGICAL PROCESS |
| | AMINO-ACID METABOLISM |
| | TRANSPORT > AMINO ACID TRANSPORT |
| | TRANSPORT > ION TRANSPORT |
| | HUMAN GENE ONTOLOGY |
| | PROCESS |
| | organic anion transport > dicarboxylic acid transport |
| | L-amino-acid transport > glutamate transport |
| | neurotransmitter maintenance > neurotransmitter uptake |
| | L-amino-acid transport > aspartate transport |
| | cell growth and maintenance > transport |
| | FUNCTION |
| | galactosidase > beta-galactosidase |
| | LOCATION |
| | cell > membrane fraction |
| | plasma membrane > integral plasma membrane protein |
| | mitochondrial membrane > mitochondrial inner membrane |
| | HUMAN PROTEIN DOMAINS (INTERPRO SIGNATURES) |
| | IPR001991 (EDTRNSPORT ) |
| | IPR001991 (SDF ) |
| | IPR001991 (NA DICARBOXYL SYMP 1 ) |
| | IPR001991 (NA DICARBOXYL SYMP 2) |
| hP10-038 | HUMAN PANTHER CLASSIFICATIONS |
| (SEQ ID NO: 184) | FAMILY (SUBFAMILY) |
| | AMINO ACID TRANSPORTER-RELATED(EXCITATORY |
| | AMINO ACID TRANSPORTER 2 SLC1A2-RELATED) |
| | MOLECULAR FUNCTIONS |
| | TRANSPORTER > OTHER TRANSPORTER |
| | BIOLOGICAL PROCESS |
| | AMINO-ACID METABOLISM |
| | TRANSPORT > AMINO ACID TRANSPORT |
| | TRANSPORT > ION TRANSPORT |
| | HUMAN GENE ONTOLOGY |
| | PROCESS |
| | organic anion transport > dicarboxylic acid transport |
| | L-amino-acid transport > glutamate transport |
| | neurotransmitter maintenance > neurotransmitter uptake |
| | L-amino-acid transport > aspartate transport |
| | cell growth and maintenance > transport |
| | FUNCTION |
| | galactosidase > beta-galactosidase |
| | LOCATION |
| | cell > membrane fraction |
| | plasma membrane > integral plasma membrane protein |
| | HUMAN PROTEIN DOMAINS (INTERPRO SIGNATURES) |
| | IPR001991 (EDTRNSPORT ) |
| | IPR001991 (SDF ) |
| | IPR001991 (NA DICARBOXYL SYMP 1 ) |
| | IPR001991 (NA DICARBOXYL SYMP 2) |
| hP10-040 | HUMAN PANTHER CLASSIFICATIONS |
| (SEQ ID NO: 120) | FAMILY (SUBFAMILY) |
| | SODIUM/NUCLEOSIDE |
| | COTRANSPORTER(SODIUM/NUCLEOSIDE COTRANSPORTER SLC28A2) |
| | MOLECULAR FUNCTIONS |
| | TRANSPORTER > OTHER TRANSPORTER |
| | BIOLOGICAL PROCESS |
| | TRANSPORT > ION TRANSPORT > CATION TRANSPORT |
| | HUMAN GENE ONTOLOGY |
| | PROCESS |
| | nucleoside transport > purine nucleoside transport |
| | metabolism > nucleobase, nucleoside, nucleotide and nucleic acid |
| | metabolism |
| | neurogenesis > central nervous system development |
| | cell growth and maintenance > transport |
| | nucleobase, nucleoside, nucleotide and nucleic acid transport > |
| | nucleoside transport |
| | FUNCTION |
| | nucleobase, nucleoside, nucleotide and nucleic acid transporter > |
| | nucleoside transporter |
| | nucleoside transporter > purine nucleoside transporter |
| | enzyme > nitric oxide synthase |
| | GO molecular function > cell cycle regulator |
| | nucleotide binding > ATP binding |
| | LOCATION |
| | plasma membrane > integral plasma membrane protein |
| | cell > membrane fraction |
| | GO cellular component > extracellular |
| | mitochondrial membrane > mitochondrial inner membrane |
| | cell > nucleus |
| | HUMAN PROTEIN DOMAINS (INTERPRO SIGNATURES) |
| | IPR002668 (Nucleoside tra2 ) |
| | IPR002668 (sp O43868 O43868 HUMAN) |
| hP10-044 | HUMAN PANTHER CLASSIFICATIONS |
| (SEQ ID NO: 126) | FAMILY (SUBFAMILY) |
| | ANTILEUKOPROTEINASE(ANTILEUKOPROTEINASE) |
| | MOLECULAR FUNCTIONS |
| | SELECT REGULATORY MOLECULE > PROTEASE |
| | INHIBITOR > SERINE-TYPE PROTEASE INHIBITOR |
| | BIOLOGICAL PROCESS |
| | BIOLOGICAL PROCESS UNCLASSIFIED |
| | HUMAN GENE ONTOLOGY |
| | PROCESS |
| | defence response > inflammatory response |
| | eye morphogenesis > mystery cell fate differentiation |
| | gametogenesis > spermatogenesis |
| | ectoderm development > epidermal differentiation |
| | organelle organization and biogenesis > cytoskeleton organization |
| | and biogenesis |
| | FUNCTION |
| | enzyme inhibitor > proteinase inhibitor |
| | proteinase inhibitor > serine protease inhibitor |
| | GO molecular function > cell adhesion |
| | ligand binding or carrier > protein binding |
| | enzyme > farnesyltranstransferase |
| | LOCATION |
| | extracellular > extracellular matrix |
| | GO cellular component > extracellular |
| | extracellular > extracellular space |
| | HUMAN PROTEIN DOMAINS (INTERPRO SIGNATURES) |
| | IPR002221 (4DISULPHCORE ) |
| | IPR002221 (WAP ) |
| | IPR002221 (wap ) |
| | NULL (CYS RICH ) |
| | IPR001472 (NLS BP ) |
| | IPR002221 (4 DISULFIDE CORE ) |
| | IPR001687 (ATP GTP A ) |
| | IPR002221 (sp P03973 ALK1 HUMAN) |
| hP11-003 | HUMAN PANTHER CLASSIFICATIONS |
| (SEQ ID NO: 132) | FAMILY (SUBFAMILY) |
| | INTERLEUKIN-12 ALPHA CHAIN (INTERLEUKIN-12 ALPHA |
| | CHAIN ) |
| | MOLECULAR FUNCTIONS |
| | SIGNALING MOLECULE > CYTOKINE > INTERLEUKIN |
| | BIOLOGICAL PROCESS |
| | SIGNAL TRANSDUCTION > INTRACELLULAR SIGNALING |
| | CASCADE > NF-KAPPAB CASCADE > JAK-STAT CASCADE |
| | SIGNAL TRANSDUCTION > CELL SURFACE RECEPTOR |
| | MEDIATED SIGNAL TRANSDUCTION > CYTOKINE AND CHEMOKINE |
| | MEDIATED SIGNALING PATHWAY |
| | IMMUNITY AND DEFENSE > MACROPHAGE-MEDIATED |
| | IMMUNITY |
| | IMMUNITY AND DEFENSE > INTERFERON-MEDIATED |
| | IMMUNITY |
| | IMMUNITY AND DEFENSE > NATURAL KILLER CELL |
| | MEDIATED IMMUNITY |
| | IMMUNITY AND DEFENSE > T-CELL MEDIATED |
| | IMMUNITY |
| | HUMAN GENE ONTOLOGY |
| | PROCESS |
| | humoral defense mechanism > antimicrobial response |
| | cell growth and maintenance > cell proliferation |
| | defence response > immune response |
| | LOCATION |
| | extracellular > extracellular space |
| | HUMAN PROTEIN DOMAINS (INTERPRO SIGNATURES) |
| | No Domain Hit |
| hP11-003 | HUMAN PANTHER CLASSIFICATIONS |
| (SEQ ID NO: 186) | FAMILY (SUBFAMILY) |
| | INTERLEUKIN-12 ALPHA CHAIN(INTERLEUKIN-12 ALPHA |
| | CHAIN) |
| | MOLECULAR FUNCTIONS |
| | SIGNALING MOLECULE > CYTOKINE > INTERLEUKIN |
| | BIOLOGICAL PROCESS |
| | SIGNAL TRANSDUCTION > INTRACELLULAR SIGNALING |
| | CASCADE > NF-KAPPAB CASCADE > JAK-STAT CASCADE |
| | SIGNAL TRANSDUCTION > CELL SURFACE RECEPTOR |
| | MEDIATED SIGNAL TRANSDUCTION > CYTOKINE AND CHEMOKINE |
| | MEDIATED SIGNALING PATHWAY |
| | IMMUNITY AND DEFENSE > MACROPHAGE-MEDIATED |
| | IMMUNITY |
| | IMMUNITY AND DEFENSE > INTERFERON-MEDIATED |
| | IMMUNITY |
| | IMMUNITY AND DEFENSE > NATURAL KILLER CELL |
| | MEDIATED IMMUNITY |
| | IMMUNITY AND DEFENSE > T-CELL MEDIATED |
| | IMMUNITY |
| | HUMAN GENE ONTOLOGY |
| | PROCESS |
| | humoral defense mechanism > antimicrobial response |
| | cell growth and maintenance > cell proliferation |
| | defence response > immune response |
| | LOCATION |
| | extracellular > extracellular space |
| | HUMAN PROTEIN DOMAINS (INTERPRO SIGNATURES) |
| | IPR002106 (AA TRNA LIGASE II 2) |
| hP11-005 | HUMAN PANTHER CLASSIFICATIONS |
| (SEQ ID NO: 138) | FAMILY (SUBFAMILY) |
| | EPHRIN(EPHRIN-A1) |
| | MOLECULAR FUNCTIONS |
| | SIGNALING MOLECULE > MEMBRANE-BOUND |
| | SIGNALING MOLECULE |
| | BIOLOGICAL PROCESS |
| | SIGNAL TRANSDUCTION > CELL COMMUNICATION > |
| | LIGAND-MEDIATED SIGNALING |
| | SIGNAL TRANSDUCTION > CELL SURFACE RECEPTOR |
| | MEDIATED SIGNAL TRANSDUCTION > RECEPTOR PROTEIN TYROSINE |
| | KINASE SIGNALING PATHWAY |
| | HUMAN GENE ONTOLOGY |
| | PROCESS |
| | protein-membrane targeting > post-translational membrane targeting |
| | cell communication > cell-cell signaling |
| | FUNCTION |
| | protein kinase > protein tyrosine kinase |
| | LOCATION |
| | plasma membrane > integral plasma membrane protein |
| | HUMAN PROTEIN DOMAINS (INTERPRO SIGNATURES) |
| | IPR001799 (Ephrin ) |
| | IPR001799 (sp P20827 EFA1 HUMAN) |
| hP11-006 | HUMAN PANTHER CLASSIFICATIONS |
| (SEQ ID NO: 144) | FAMILY (SUBFAMILY) |
| | INTERLEUKIN-6 RECEPTOR-RELATED(INTERLEUKIN-6 |
| | RECEPTOR ALPHA) |
| | MOLECULAR FUNCTIONS |
| | RECEPTOR > CYTOKINE RECEPTOR > INTERLEUKIN |
| | RECEPTOR |
| | BIOLOGICAL PROCESS |
| | SIGNAL TRANSDUCTION > INTRACELLULAR SIGNALING |
| | CASCADE > MAPKKK CASCADE > JAK-STAT CASCADE |
| | SIGNAL TRANSDUCTION > CELL COMMUNICATION > |
| | LIGAND-MEDIATED SIGNALING |
| | SIGNAL TRANSDUCTION > CELL SURFACE RECEPTOR |
| | MEDIATED SIGNAL TRANSDUCTION > CYTOKINE AND CHEMOKINE |
| | MEDIATED SIGNALING PATHWAY |
| | IMMUNITY AND DEFENSE |
| | HUMAN GENE ONTOLOGY |
| | FUNCTION |
| | B cell receptor |
| | defense/immunity protein > immunoglobulin |
| | enzyme > lactose synthase |
| | defense/immunity protein > immunoglobulin |
| | enzyme > lactose synthase |
| | GO molecular function > cell cycle regulator |
| | LOCATION |
| | plasma membrane > integral plasma membrane protein |
| | cell > membrane fraction |
| | extracellular > extracellular space |
| | integral plasma membrane protein > interleukin-6 receptor |
| | GO cellular component > extracellular |
| | HUMAN PROTEIN DOMAINS (INTERPRO SIGNATURES) |
| | IPR001777 (FN3 ) |
| | IPR003598 (IGc2 ) |
| | IPR003599 (IG ) |
| | IPR001777 (fn3 ) |
| | IPR003006 (ig ) |
| | IPR002996 (CR1A ) |
| | IPR003530 (HEMATOPO REC L F3) |
| hP11-017 | HUMAN PANTHER CLASSIFICATIONS |
| (SEQ ID NO: 150) | No Panther Hit |
| | HUMAN GENE ONTOLOGY |
| | PROCESS |
| | defence response > immune response |
| | apoptosis > induction of apoptosis |
| | cell communication > signal transduction |
| | cell communication > cell-cell signaling |
| | cell growth and maintenance > cell proliferation |
| | FUNCTION |
| | enzyme > glutamate dehydrogenase |
| | LOCATION |
| | cell > membrane fraction |
| | plasma membrane > integral plasma membrane protein |
| | HUMAN PROTEIN DOMAINS (INTERPRO SIGNATURES) |
| | IPR000478 (TNF ) |
| | IPR000478 (TNF ) |
| | IPR000478 (TNF 2 ) |
| | IPR000478 (TNF 1 ) |
| | IPR003638 (sp P32971 TNF8 HUMAN) |
| hP11-030 | HUMAN PANTHER CLASSIFICATIONS |
| (SEQ ID NO: 156) | No Panther Hit |
| | HUMAN GENE ONTOLOGY |
| | PROCESS |
| | cell communication > signal transduction |
| | cell proliferation > negative control of cell proliferation |
| | cell death > necrosis |
| | mesoderm development > lymph gland development |
| | cell death > apoptosis |
| | FUNCTION |
| | GO molecular function > apoptosis inhibitor |
| | O-glucosyl hydrolase |
| | antimicrobial response protein > lysozyme |
| | sugar binding > lectin |
| | glycosaminoglycan binding > hyaluronic acid binding |
| | molecular_function unknown > lymphocyte antigen |
| | LOCATION |
| | GO cellular component > extracellular |
| | cell > membrane fraction |
| | cell > plasma membrane |
| | plasma membrane > integral plasma membrane protein |
| | extracellular > extracellular matrix |
| | HUMAN PROTEIN DOMAINS (INTERPRO SIGNATURES) |
| | IPR001368 (TNFR ) |
| | IPR001368 (TNFR c6 ) |
| | IPR001368 (TNFR NGFR 2 2 ) |
| | NULL (CYS RICH ) |
| | IPR001368 (TNFR NGFR 1) |
| hP11-035 | HUMAN PANTHER CLASSIFICATIONS |
| (SEQ ID NO: 162) | FAMILY (SUBFAMILY) |
| | ADP-RIBOSYL CYCLASE(ADP-RIBOSYL CYCLASE 1) |
| | MOLECULAR FUNCTIONS |
| | MOLECULAR FUNCTION UNCLASSIFIED |
| | BIOLOGICAL PROCESS |
| | SIGNAL TRANSDUCTION |
| | APOPTOSIS > INDUCTION OF APOPTOSIS |
| | HUMAN GENE ONTOLOGY |
| | PROCESS |
| | induction of a apoptosis > induction of apoptosis by extracellular |
| | signals |
| | protein-membrane targeting > post-translational membrane targeting |
| | metabolism > energy pathways |
| | cell communication > signal transduction |
| | developmental processes > fertilization |
| | FUNCTION |
| | enzyme > NAD(+) nucleosidase |
| | GO molecular function > enzyme |
| | molecular_function unknown > lymphocyte antigen |
| | LOCATION |
| | cell > plasma membrane |
| | cell > membrane fraction |
| | plasma membrane > peripheral plasma membrane protein |
| | HUMAN PROTEIN DOMAINS (INTERPRO SIGNATURES) |
| | IPR003193 (Rib hydrolayse) |
| hP11-039 | HUMAN PANTHER CLASSIFICATIONS |
| (SEQ ID NO: 168) | FAMILY (SUBFAMILY) |
| | PROTEIN TYROSINE KINASE(MACROPHAGE COLONY |
| | STIMULATING FACTOR I RECEPTOR) |
| | MOLECULAR FUNCTIONS |
| | RECEPTOR > PROTEIN KINASE RECEPTOR |
| | KINASE > PROTEIN KINASE > TYROSINE PROTEIN |
| | KINASE RECEPTOR |
| | BIOLOGICAL PROCESS |
| | PROTEIN METABOLISM AND MODIFICATION > PROTEIN |
| | MODIFICATION > PROTEIN PHOSPHORYLATION |
| | SIGNAL TRANSDUCTION > CELL SURFACE RECEPTOR |
| | MEDIATED SIGNAL TRANSDUCTION > CYTOKINE AND CHEMOKINE |
| | MEDIATED SIGNALING PATHWAY > RECEPTOR PROTEIN TYROSINE |
| | KINASE SIGNALING PATHWAY |
| | IMMUNITY AND DEFENSE > MACROPHAGE-MEDIATED |
| | IMMUNITY |
| | ONCOGENESIS > ONCOGENE |
| | HUMAN GENE ONTOLOGY |
| | PROCESS |
| | protein modification > protein dephosphorylation |
| | protein modification > protein phosphorylation |
| | enzyme linked receptor protein signaling pathway > transmembrane |
| | receptor protein tyrosine kinase signaling pathway |
| | cell communication > signal transduction |
| | FUNCTION |
| | protein kinase > protein tyrosine kinase |
| | nucleotide binding > ATP binding |
| | enzyme > protein kinase |
| | B cell receptor |
| | defense/immunity protein > immunoglobulin |
| | transmembrane receptor |
| | protein tyrosine kinase > transmembrane receptor protein tyrosine |
| | kinase |
| | LOCATION |
| | cell > membrane fraction |
| | plasma membrane > integral plasma membrane protein |
| | GO cellular component > intracellular |
| | cell > plasma membrane |
| | cell > cytoplasm |
| | HUMAN PROTEIN DOMAINS (INTERPRO SIGNATURES) |
| | IPR001245 (TyrKc ) |
| | IPR001824 (RECEPTOR TYR KIN III) |
| | IPR002290 (S TKc ) |
| | IPR003598 (IGc2 ) |
| | IPR003599 (IG ) |
| | IPR000719 (pkinase ) |
| | IPR003006 (ig ) |
| | IPR000719 (PROTEIN KINASE DOM ) |
| | IPR000719 (PROTEIN KINASE ATP ) |
| | IPR001245 (PROTEIN KINASE TYR ) |

[0320] A CA protein (CAP) is an inhibitor of transcription wherein the CAP sequence is SEQ ID NO: 6.

[0321] A CA protein (CAP) is a G-protein coupled receptor antagonist wherein the CAP sequence is SEQ ID NO: 12.

[0322] A CA protein (CAP) is an ion transport protein wherein the CAP sequence is selected from the group consisting of SEQ ID NOS: 42, 84, 114, 182, 184 and 120.

[0323] A CA protein (CAP) is an amino acid transport protein wherein the CAP sequence is selected from the group consisting of SEQ ID NOS: 42, 54, 60, 176, 178, and 120.

[0324] A CA protein (CAP) is an apoptosis-related protein wherein the CAP sequence is selected from the group consisting of SEQ ID NOS: 150, 156 and 162.

[0325] A CA protein (CAP) is involved in signalling wherein the CAP sequence is selected from the group consisting of SEQ ID NOS: 36, 48, 108, 144, 150, 168 and 186.

[0326] A CA protein (CAP) is a cell adhesion molecule wherein the CAP sequence is selected from the group consisting of SEQ ID NOS: 18, 78, 96, 180, 102, and 126.

[0327] A CA protein (CAP) is a tyrosine kinase antagonist wherein the CAP sequence is selected from the group consisting of SEQ ID NOS: 90, and 138.

[0328] A CA protein (CAP) is expressed on a cell surface, wherein the CA protein is selected from the group consisting of SEQ ID NOS: 6, 12, 18, 24, 30, 36, 42, 48, 54, 60, 66, 72, 78, 84, 90, 96, 102, 108, 114, 120, 126, 132, 138, 144, 150, 156, 162, 168, 170, 172, 174, 176, 178, 180, 182, 184, and 186.

[0329] Certain aspects of the present invention are described in greater detail in the non-limiting examples that follow.

### EXAMPLES

[0330] The following examples are put forth so as to provide those of ordinary skill in the art with a complete disclosure and description of how to make and use the present invention, and are not intended to limit the scope of what the inventors regard as their invention nor are they intended to represent that the experiments below are all and only experiments performed. Efforts have been made to ensure accuracy with respect to numbers used (e.g. amounts, temperature, etc.) but some experimental errors and deviations should be accounted for. Unless indicated otherwise, parts are parts by weight, molecular weight is weight average molecular weight, temperature is in degrees Celsius, and pressure is at or near atmospheric.

### Example 1

[0331] Insertion Site Analysis Following Tumor Induction in Mice

[0332] Tumors are induced in mice using either mouse mammary tumor virus (MMTV) or murine leukemia virus (MLV). MMTV causes mammary adenocarcinomas and MLV causes a variety of different hematopoetic malignancies (primarily T- or B-cell lymphomas). Three routes of infection are used: (1) injection of neonates with purified virus preparations, (2) infection by milk-borne virus during nursing, and (3) genetic transmission of pathogenic proviruses via the germ-line (Akvr1 and/or Mtv2). The type of malignancy present in each affected mouse is determined by histological analysis of H&E-stained thin sections of formalin-fixed, paraffin-embedded biopsy samples. Host DNA sequences flanking all clonally-integrated proviruses in each tumor are recovered by nested anchored-PCR using two virus-specific primers and two primers specific for a 40 bp double stranded DNA anchor ligated to restriction enzyme digested tumor DNA. Amplified bands representing host/virus junction fragments are cloned and sequenced. Then the host sequences (called “tags”) are used to BLAST analyze the Celera mouse genomic sequence. For each individual tag, three parameters are recorded: (1) the mouse chromosome assignment, (2) base pair coordinates at which the integration occurred, and (3) provirus orientation. Using this information, all available tags from all analyzed tumors are mapped to the mouse genome. To identify the protooncogene targets of provirus insertion mutation, the provirus integration pattern at each cluster of integrants is analyzed relative to the locations of all known genes in the transcriptome. The presence of provirus at the same locus in two or more independent tumors is prima facie evidence that a protooncogene is present at or very near the proviral integration sites. This is because the genome is too large for random integrations to result in observable clustering. Any clustering that is detected is unequivocal evidence for biological selection during tumorigenesis. In order to identify the human orthologs of the protooncogene targets of provirus insertion mutation, a comparative analysis of syntenic regions of the mouse and human genomes is performed.

[0333] An example of PCR amplification of host/virus junction fragments is presented in FIG. 1. Lane 1 contains the amplification products from normal control DNA and lane 2 contains the amplification products from tumor DNA. The bands result from 5′ host/virus junction fragments present in the DNA samples. Lane 1 has bands from the env/3′ LTR junctions from all proviruses (upper) and the host/5′ LTR from the pathogenic endogenous Mtv2 provirus present in this particular mouse strain. This endogenous provirus is detected because its sequence is identical to the new clonally integrated proviruses in the tumor. All four new clonally integrated proviruses known to be in this tumor are readily detected.

### Example 2

[0334] Analysis of Quantitative RT-PCR: Comparative C_{T} Method.

[0335] The expression level of target genes is quantified using the ABI PRISM 7900HT Sequence Detection System (Applied Biosystems, California). The method is based on the quantitation of the initial copy number of target template in comparison to that of a reference (normalizer) housekeeper gene (Pre-Developed TaqMan® Assay Reagents Gene Expression Quantification Protocol, Applied Biosystems, 2001). Accumulation of DNA product with each PCR cycle is related to amplicon efficiency and the initial template concentration. Therefore the amplification efficiency of both the target and the normalizer must be approximately equal. The threshold cycle (C_{T}), which is dependent on the starting template copy number and the DNA amplification efficiency, is a PCR cycle during which PCR product growth is exponential. With a similar dynamic range for the target and normalizer, the comparative C_{T} method is applicable.

[0336] An example of the comparative C_{T} method of gene expression for quantitative RT-PCR is shown in FIG. 2. In the first step, assays are performed in quadruplicate on a normal tissue and several sample tissues. In these tissues, the means and standard deviations of C_{T} values are determined for housekeeper genes (chosen as controls if shown to be biologically stable among various samples, irrespective of disease state) and for the target gene. FIG. 2 shows an example of average C_{T} values for a housekeeper gene and target gene. These values can fall within a range from upper teens to 40 depending on the intrinsic expression level of the gene in the particular tissue. The coefficient of variance of all replicate sets cannot exceed 1.5%.

[0337] An assessment of how the ΔC_{T} changes with template dilution verifies that the efficiencies of the target and housekeeper amplicons are approximately equal if the log input amount of template RNA versus ΔC_{T} plot has a slope <0.10. With the relative efficiencies verified for target and housekeeper, the ΔΔC_{T} comparative calculation becomes valid, as mentioned above. An example of the calculated difference between the C_{T} values of target and housekeeper genes (ΔC_{T}) for various samples is shown in FIG. 3. The ΔΔC_{T} is calculated for each sample by subtracting its ΔC_{T} value from the ΔC_{T} value of the baseline (calibrator) sample. If the expression is increased in some samples and decreased in others, ΔΔC_{T} will be a mixture of negative and positive values. The final step in the calculation is to transform these values to absolute values. The formula for this is:

Comparative expression level=2^{-ΔΔCT}

[0338] The final value for the calibrator should always be one. FIG. 4 shows the ΔΔC_{T} and comparative expression level for each sample from FIG. 3.

### Example 3

[0339] Detection of Elevated Levels of cDNA Associated with Cancer Using Arrays.

[0340] cDNA sequences representing a variety of candidate CA genes to be screened for differential expression in cancer are assayed by hybridization on polynucleotide arrays. The cDNA sequences include cDNA clones isolated from cell lines or tissues of interest. The cDNA sequences analyzed also include polynucleotides comprising sequence overlap with sequences in the Unigene database, and which encode a variety of gene products of various origins, functionality, and levels of characterization. cDNAs are spotted onto reflective slides (Amersham) according to methods well known in the art at a density of 9,216 spots per slide representing 4,068 sequences (including controls) spotted in duplicate, with approximately 0.8 μl of an approximately 200 ng/μl solution of cDNA.

[0341] PCR products of selected cDNA clones corresponding to the gene products of interest are prepared in a 50% DMSO solution. These PCR products are spotted onto Amersham aluminum microarray slides at a density of 9216 clones per array using a Molecular Dynamics Generation III spotting robot. Clones are spotted in duplicate, for a total of 4608 different sequences per chip.

[0342] cDNA probes are prepared from total RNA obtained by laser capture microdissection (LCM, Arcturus Enginering Inc., Mountain View, Calif.) of tumor tissue samples and normal tissue samples isolated from patients.

[0343] Total RNA is first reverse transcribed into cDNA using a primer containing a T7 RNA polymerase promoter, followed by second strand DNA synthesis. cDNA is then transcribed in vitro to produce antisense RNA using the T7 promoter-mediated expression (see, e.g., Luo et al. (1999) Nature Med 5:117-122), and the antisense RNA is then converted into cDNA. The second set of cDNAs are again transcribed in vitro, using the T7 promoter, to provide antisense RNA. This antisense RNA is then fluorescently labeled, or the RNA is again converted into cDNA, allowing for a third round of T7-mediated amplification to produce more antisense RNA. Thus the procedure provides for two or three rounds of in vitro transcription to produce the final RNA used for fluorescent labeling. Probes are labeled by making fluorescently labeled cDNA from the RNA starting material. Fluorescently labeled cDNAs prepared from the tumor RNA sample are compared to fluorescently labeled cDNAs prepared from normal cell RNA sample. For example, the cDNA probes from the normal cells are labeled with Cy3 fluorescent dye (green) and the cDNA probes prepared from suspected cancer cells are labeled with Cy5 fluorescent dye (red).

[0344] The differential expression assay is performed by mixing equal amounts of probes from tumor cells and normal cells of the same patient. The arrays are prehybridized by incubation for about 2 hrs at 60° C. in 5×SSC, 0.2% SDS, 1 mM EDTA, and then washing three times in water and twice in isopropanol. Following prehybridization of the array, the probe mixture is then hybridized to the array under conditions of high stringency (overnight at 42° C. in 50% formamide, 5×SSC, and 0.2% SDS. After hybridization, the array is washed at 55° C. three times as follows: 1) first wash in 1×SSC/0.2% SDS; 2) second wash in 0.1×SSC/0.2% SDS; and 3) third wash in 0.1×SSC.

[0345] The arrays are then scanned for green and red fluorescence using a Molecular Dynamics Generation III dual color laser-scanner/detector. The images are processed using BioDiscovery Autogene software, and the data from each scan set normalized. The experiment is repeated, this time labeling the two probes with the opposite color in order to perform the assay in both “color directions.” Each experiment is sometimes repeated with two more slides (one in each color direction). The data from each scan is normalized, and the level of fluorescence for each sequence on the array expressed as a ratio of the geometric mean of 8 replicate spots/genes from the four arrays or 4 replicate spots/gene from 2 arrays or some other permutation.

[0346] Normalization: The objective of normalization is to generate a cDNA library in which all transcripts expressed in a particular cell type or tissue are equally represented (S. M. Weissman, Mol Biol. Med. 4(3):133-143 (1987); Patanjali, et al., Proc. Natl. Acad. Sci. USA 88(5):1943-1947 (1991)), and therefore isolation of as few as 30,000 recombinant clones in an optimally normalized library may represent the entire gene expression repertoire of a cell, estimated to number 10,000 per cell.

[0347] Total RNA is extracted from harvested cells using RNeasy™ Protect Kit (Qiagen, Valencia, Calif.), following manufacturer's recommended procedures. RNA is quantified using RiboGreen™ RNA quantification kit (Molecular Probes, Inc. Eugene, Oreg.). One μg of total RNA is reverse transcribed and PCR amplified using SMART™ PCR cDNA synthesis kit (ClonTech, Palo Alto, Calif.). The cDNA products are size-selected by agarose gel electrophoresis using standard procedures (Sambrook, J. T., et al. Molecular Cloning: A Laboratory Manual, 2d ed., Cold Spring Harbor Laboratory Press, NY). The cDNA is extracted using Bio 101 Geneclean® II kit (Qbiogene, Carlsbad, Calif.). Normalization of the cDNA is carried out using kinetics of hybridization principles: 1.0 μg of cDNA is denatured by heat at 100° C. for 10 minutes, then incubated at 42° C. for 42 hours in the presence of 120 mM NaCl, 10 mM Tris.HCl (pH=8.0), 5 mM EDTA.Na+ and 50% formamide. Single-stranded cDNA (“normalized”) is purified by hydroxyapatite chromatography (#130-0520, BioRad, Hercules, Calif.) following the manufacturer's recommended procedures, amplified and converted to double-stranded cDNA by three cycles of PCR amplification, and cloned into plasmid vectors using standard procedures (Sambrook, J. T., et al. Molecular Cloning: A Laboratory Manual, 2d ed., Cold Spring Harbor Laboratory Press, NY). All primers/adaptors used in the normalization and cloning process are provided by the manufacturer in the SMART™ PCR cDNA synthesis kit (ClonTech, Palo Alto, Calif.). Supercompetent cells (XL-2 Blue Ultracompetent Cells, Stratagene, California) are transfected with the normalized cDNA libraries, plated on solid media and grown overnight at 36° C.

[0348] The sequences of 10,000 recombinants per normalized library are analyzed by capillary sequencing using the ABI PRISM 3700 DNA Analyzer (Applied Biosystems, California). To determine the representation of transcripts in a library, BLAST analysis is performed on the clone sequences to assign transcript identity to each isolated clone, i.e., the sequences of the isolated polynucleotides are first masked to eliminate low complexity sequences using the XBLAST masking program (Claverie “Effective Large-Scale Sequence Similarity Searches,” Computer Methods for Macromolecular Sequence Analysis, Doolittle, ed., Meth. Enzymol. 266:212-227 Academic Press, NY, N.Y. (1996); see particularly Claverie, in “Automated DNA Sequencing and Analysis Techniques” Adams et al., eds., Chap. 36, p. 267 Academic Press, San Diego, 1994 and Claverie et al. Comput. Chem. (1993) 17:191). Generally, masking does not influence the final search results, except to eliminate sequences of relative little interest due to their low complexity, and to eliminate multiple “hits” based on similarity to repetitive regions common to multiple sequences, e.g., Alu repeats. The remaining sequences are then used in a BLASTN vs. GenBank search. The sequences are also used as query sequence in a BLASTX vs. NRP (non-redundant proteins) database search.

[0349] Automated sequencing reactions are performed using a Perkin-Elmer PRISM Dye Terminator Cycle Sequencing Ready Reaction Kit containing AmpliTaq DNA Polymerase, FS, according to the manufacturer's directions. The reactions are cycled on a GeneAmp PCR System 9600 as per manufacturer's instructions, except that they are annealed at 20° C. or 30° C. for one minute. Sequencing reactions are ethanol precipitated, pellets are resuspended in 8 microliters of loading buffer, 1.5 microliters is loaded on a sequencing gel, and the data is collected by an ABI PRISM 3700 DNA Sequencer. (Applied Biosystems, Foster City, Calif.).

[0350] The number of times a sequence is represented in a library is determined by performing sequence identity analysis on the cloned cDNA sequences and assigning transcript identity to each isolated clone. First, each sequence is checked to determine if it is a bacterial, ribosomal, or mitochondrial contaminant. Such sequences are excluded from the subsequent analysis. Second, sequence artifacts, such as vector and repetitive elements, are masked and/or removed from each sequence.

[0351] The remaining sequences are compared via BLAST (Altschul et. al, J. Mol. Biol., 215:40, 1990) to GenBank and EST databases for gene identification and are compared with each other via FastA (Pearson & Lipman, PNAS, 85:2444, 1988) to calculate the frequency of cDNA appearance in the normalized cDNA library. The sequences are also searched against the GenBank and GeneSeq nucleotide databases using the BLASTN program (BLASTN 1.3MP: Altschul et al., J. Mol. Bio. 215:403, 1990). Fourth, the sequences are analyzed against a non-redundant protein (NRP) database with the BLASTX program (BLASTX 1.3MP: Altschul et al., supra). This protein database is a combination of the Swiss-Prot, PIR, and NCBI GenPept protein databases. The BLASTX program is run using the default BLOSUM-62 substitution matrix with the filter parameter: “xnu+seg”. The score cutoff utilized is 75. Assembly of overlapping clones into contigs is done using the program Sequencher (Gene Codes Corp.; Ann Arbor, Mich.). The assembled contigs are analyzed using the programs in the GCG package (Genetic Computer Group, University Research Park, 575 Science Drive, Madison, Wis. 53711) Suite Version 10.1.

### Example 4

[0352] Detection of CA-Sequences in Human Cancer Cells and Tissues.

[0353] DNA from prostate and breast cancer tissues and other human cancer tissues, human colon, normal human tissues including non-cancerous prostate, and from other human cell lines are extracted following the procedure of Delli Bovi et al. (1986, Cancer Res. 46:6333-6338). The DNA is resuspended in a solution containing 0.05 M Tris HCl buffer, pH 7.8, and 0.1 mM EDTA, and the amount of DNA recovered is determined by microfluorometry using Hoechst 33258 dye. Cesarone, C. et al., Anal Biochem 100:188-197 (1979).

[0354] Polymerase chain reaction (PCR) is performed using Taq polymerase following the conditions recommended by the manufacturer (Perkin Elmer Cetus) with regard to buffer, Mg²⁺, and nucleotide concentrations. Thermocycling is performed in a DNA cycler by denaturation at 94° C. for 3 min. followed by either 35 or 50 cycles of 94° C. for 1.5 min., 50° C. for 2 min. and 72° C. for 3 min. The ability of the PCR to amplify the selected regions of the CA gene is tested by using a cloned CA polynucleotide(s) as a positive template(s). Optimal Mg²⁺, primer concentrations and requirements for the different cycling temperatures are determined with these templates. The master mix recommended by the manufacturer is used. To detect possible contamination of the master mix components, reactions without template are routinely tested.

[0355] Southern blotting and hybridization are performed as described by Southern, E. M., (J. Mol. Biol. 98:503-517, 1975), using the cloned sequences labeled by the random primer procedure (Feinberg, A. P., et al., 1983, Anal. Biochem. 132:6-13). Prehybridization and hybridization are performed in a solution containing 6×SSPE, 5% Denhardt's, 0.5% SDS, 50% formamide, 100 μg/ml denaturated salmon testis DNA, incubated for 18 hrs at 42° C., followed by washings with 2×SSC and 0.5% SDS at room temperature and at 37° C. and finally in 0.1 ×SSC with 0.5% SDS at 68° C. for 30 min (Sambrook et al., 1989, in “Molecular Cloning: A Laboratory Manual”, Cold Spring Harbor Lab. Press). For paraffin-embedded tissue sections the conditions described by Wright and Manos (1990, in “PCR Protocols”, Innis et al., eds., Academic Press, pp. 153-158) are followed using primers designed to detect a 250 bp sequence.

### Example 5

[0356] Detection of CA Sequences in Human Cancer Cells and Tissues.

[0357] DNA from human cancer tissues, normal human tissues and from other human cell lines is extracted following the procedure of Delli Bovi et al. (1986, Cancer Res. 46:6333-6338). The DNA is resuspended in a solution containing 0.05 M Tris HCl buffer, pH 7.8, and 0.1 mM EDTA, and the amount of DNA recovered is determined by microfluorometry using Hoechst 33258 dye. Cesarone, C. et al., Anal Biochem 100:188-197 (1979).

[0358] Polymerase chain reaction (PCR) is performed using Taq polymerase following the conditions recommended by the manufacturer (Perkin Elmer Cetus) with regard to buffer, Mg²⁺, and nucleotide concentrations. Thermocycling is performed in a DNA cycler by denaturation at 94° C. for 3 min. followed by either 35 or 50 cycles of 94° C. for 1.5 min., 50° C. for 2 min. and 72° C. for 3 min. The ability of the PCR to amplify the selected regions of CA genes is tested by using a cloned CA polynucleotide(s) as a positive template(s). Optimal Mg²⁺, primer concentrations and requirements for the different cycling temperatures are determined with these templates. The master mix recommended by the manufacturer is used. To detect possible contamination of the master mix components, reactions without template are routinely tested.

[0359] Southern blotting and hybridization are performed as described by Southern, E. M., (J. Mol. Biol. 98:503-517, 1975), using the cloned sequences labeled by the random primer procedure (Feinberg, A. P., et al., 1983, Anal. Biochem. 132:6-13). Prehybridization and hybridization are performed in a solution containing 6×SSPE, 5% Denhardt's, 0.5% SDS, 50% formamide, 100 μg/ml denaturated salmon testis DNA, incubated for 18 hrs at 42° C., followed by washings with 2×SSC and 0.5% SDS at room temperature and at 37° C. and finally in 0.1×SSC with 0.5% SDS at 68° C. for 30 min (Sambrook et al., 1989, in “Molecular Cloning: A Laboratory Manual”, Cold Spring Harbor Lab. Press). For paraffin-embedded tissue sections the conditions described by Wright and Manos (1990, in “PCR Protocols”, Innis et al., eds., Academic Press, pp. 153-158) are followed using primers designed to detect a 250 bp sequence.

### Example 6

[0360] Expression of Cloned Polynucleotides in Host Cells.

[0361] To study the protein products of CA genes, restriction fragments from CA DNA are cloned into the expression vector pMT2 (Sambrook, et al., Molecular Cloning: A Laboratory Manual, Cold Spring Harbor Laboratory Press pp 16.17-16.22 (1989)) and transfected into COS cells grown in DMEM supplemented with 10% FCS. Transfections are performed employing calcium phosphate techniques (Sambrook, et al (1989) pp. 16.32-16.40, supra) and cell lysates are prepared forty-eight hours after transfection from both transfected and untransfected COS cells. Lysates are subjected to analysis by immunoblotting using anti-peptide antibody.

[0362] In immunoblotting experiments, preparation of cell lysates and electrophoresis are performed according to standard procedures. Protein concentration is determined using BioRad protein assay solutions. After semi-dry electrophoretic transfer to nitrocellulose, the membranes are blocked in 500 mM NaCl, 20 mM Tris, pH 7.5, 0.05% Tween-20 (TTBS) with 5% dry milk. After washing in TTBS and incubation with secondary antibodies (Amersham), enhanced chemiluminescence (ECL) protocols (Amersham) are performed as described by the manufacturer to facilitate detection.

### Example 7

[0363] Generation of Antibodies Against Polypeptides.

[0364] Polypeptides, unique to CA genes are synthesized or isolated from bacterial or other (e.g., yeast, baculovirus) expression systems and conjugated to rabbit serum albumin (RSA) with m-maleimido benzoic acid N-hydroxysuccinimide ester (MBS) (Pierce, Rockford, Ill.). Immunization protocols with these peptides are performed according to standard methods. Initially, a pre-bleed of the rabbits is performed prior to immunization. The first immunization includes Freund's complete adjuvant and 500 μg conjugated peptide or 100 μg purified peptide. All subsequent immunizations, performed four weeks after the previous injection, include Freund's incomplete adjuvant with the same amount of protein. Bleeds are conducted seven to ten days after the immunizations.

[0365] For affinity purification of the antibodies, the corresponding CA polypeptide is conjugated to RSA with MBS, and coupled to CNBr-activated Sepharose (Pharmacia, Uppsala, Sweden). Antiserum is diluted 10-fold in 10 mM Tris-HCl, pH 7.5, and incubated overnight with the affinity matrix. After washing, bound antibodies are eluted from the resin with 100 mM glycine, pH 2.5.

### Example 8

[0366] Generation of Monoclonal Antibodies Against a CA Polypeptide

[0367] A non-denaturing adjuvant (Ribi, R730, Corixa, Hamilton Mont.) is rehydrated to 4 ml in phosphate buffered saline. 100 μl of this rehydrated adjuvant is then diluted with 400 μl of Hank's Balanced Salt Solution and this is then gently mixed with the cell pellet used for immunization. Approximately 500 μg conjugated peptide or 100 μg purified peptide and Freund's complete are injected into Balb/c mice via foot-pad, once a week. After 6 weeks of weekly injection, a drop of blood is drawn from the tail of each immunized animal to test the titer of antibodies against CA polypeptides using FACS analysis. When the titer reaches at least 1:2000, the mice are sacrificed in a CO₂ chamber followed by cervical dislocation. Lymph nodes are harvested for hybridoma preparation. Lymphocytes from mice with the highest titer are fused with the mouse myeloma line X63-Ag8.653 using 35% polyethylene glycol 4000. On day 10 following the fusion, the hybridoma supernatants are screened for the presence of CAP-specific monoclonal antibodies by fluorescence activated cell sorting (FACS). Conditioned medium from each hybridoma is incubated for 30 minutes with a combined aliquot of PC3, Colo-205, LnCap, or Panc-1 cells. After incubation, the cell samples are washed, resuspended in 0.1 ml diluent and incubated with 1 μg/ml of FITC conjugated F(ab′)2 fragment of goat anti-mouse IgG for 30 min at 4° C. The cells are washed, resuspended in 0.5 ml FACS diluent and analyzed using a FACScan cell analyzer (Becton Dickinson; San Jose, Calif.). Hybridoma clones are selected for further expansion, cloning, and characterization based on their binding to the surface of one or more of cell lines which express the CA polypeptide as assessed by FACS. A hybridoma making a monoclonal antibody designated mAbCA which binds an antigen designated Ag-CA.x and an epitope on that antigen designated Ag-CA.x.1 is selected.

### Example 9

[0368] ELISA Assay for Detecting CA Related Antigens.

[0369] To test blood samples for antibodies that bind specifically to recombinantly produced CA antigens, the following procedure is employed. After a recombinant CA related protein is purified, the recombinant protein is diluted in PBS to a concentration of 5 μg/ml (500 ng/100 μl). 100 microliters of the diluted antigen solution is added to each well of a 96-well Immulon 1 plate (Dynatech Laboratories, Chantilly, Va.), and the plate is then incubated for 1 hour at room temperature, or overnight at 4° C., and washed 3 times with 0.05% Tween 20 in PBS. Blocking to reduce nonspecific binding of antibodies is accomplished by adding to each well 200 μl of a 1% solution of bovine serum albumin in PBS/Tween 20 and incubation for 1 hour. After aspiration of the blocking solution, 100 μl of the primary antibody solution (anticoagulated whole blood, plasma, or serum), diluted in the range of 1/16 to 1/2048 in blocking solution, is added and incubated for 1 hour at room temperature or overnight at 4° C. The wells are then washed 3 times, and 100 μl of goat anti-human IgG antibody conjugated to horseradish peroxidase (Organon Teknika, Durham, N.C.), diluted 1/500 or 1/1000 in PBS/Tween 20, 100 μl of o-phenylenediamine dihydrochloride (OPD, Sigma) solution is added to each well and incubated for 5-15 minutes. The OPD solution is prepared by dissolving a 5 mg OPD tablet in 50 ml 1% methanol in H₂O and adding 50 μl 30% H₂O₂ immediately before use. The reaction is stopped by adding 25 l of 4M H₂SO₄. Absorbances are read at 490 nm in a microplate reader (Bio-Rad).

### Example 10

[0370] Identification and Characterization of CA Antigen on Cancer Cell Surface

[0371] A cell pellet of proximately 25 ul packed cell volume of a cancer cell preparation is lysed by first diluting the cells to 0.5 ml in water followed by freezing and thawing three times. The solution is centrifuged at 14,000 rpm. The resulting pellet, containing the cell membrane fragments, is resuspended in 50 μl of SDS sample buffer (Invitrogen, Carlsbad, Calif.). The sample is heated at 80° C. for 5 minutes and then centrifuged for 2 minutes at 14,000 rpm to remove any insoluble materials.

[0372] The samples are analyzed by Western blot using a 4 to 20% polyacrylamide gradient gel in Tris-Glycine SDS (Invitrogen; Carlsbad Calif.) following the manufacturer's directions. Ten microliters of membrane sample are applied to one lane on the polyacrylamide gel. A separate 10 μL sample is reduced first by the addition of 2 μL of dithiothreitol (100 mM) with heating at 80° C. for 2 minutes and then loaded into another lane. Pre-stained molecular weight markers SeeBlue Plus2 (Invitrogen; Carlsbad, Calif.) are used to assess molecular weight on the gel. The gel proteins are transferred to a nitrocellulose membrane using a transfer buffer of 14.4 g/l glycine, 3 g/l of Tris Base, 10% methanol, and 0.05% SDS. The membranes are blocked, probed with a CAP-specific monoclonal antibody (at a concentration of 0.5 ug/ml), and developed using the Invitrogen WesternBreeze Chromogenic Kit-AntiMouse according to the manufacturer's directions. In the reduced sample of the tumor cell membrane samples, a prominent band is observed migrating at a molecular weight within about 10% of the predicted molecular weight of the corresponding CA protein.

### Example 11

[0373] Preparation of Vaccines.

[0374] The present invention also relates to a method of stimulating an immune response against cells that express CA polypeptides in a patient using CA polypeptides of the invention that act as an antigen produced by or associated with a malignant cell. This aspect of the invention provides a method of stimulating an immune response in a human against cancer cells or cells that express CA polynucleotides and polypeptides. The method comprises the step of administering to a human an immunogenic amount of a polypeptide comprising: (a) the amino acid sequence of a huma CA protein or (b) a mutein or variant of a polypeptide comprising the amino acid sequence of a human endogenous retrovirus CA protein.

### Example 12

[0375] Generation of Transgenic Animals Expressing Polypeptides as a Means for Testing Therapeutics.

[0376] CA nucleic acids are used to generate genetically modified non-human animals, or site specific gene modifications thereof, in cell lines, for the study of function or regulation of prostate tumor-related genes, or to create animal models of diseases, including prostate cancer. The term “transgenic” is intended to encompass genetically modified animals having an exogenous CA gene(s) that is stably transmitted in the host cells where the gene(s) may be altered in sequence to produce a modified protein, or having an exogenous CA LTR promoter operably linked to a reporter gene. Transgenic animals may be made through a nucleic acid construct randomly integrated into the genome. Vectors for stable integration include plasmids, retroviruses and other animal viruses, YACs, and the like. Of interest are transgenic mammals, e.g. cows, pigs, goats, horses, etc., and particularly rodents, e.g. rats, mice, etc.

[0377] The modified cells or animals are useful in the study of CA gene function and regulation. For example, a series of small deletions and/or substitutions may be made in the CA genes to determine the role of different genes in tumorigenesis. Specific constructs of interest include, but are not limited to, antisense constructs to block CA gene expression, expression of dominant negative CA gene mutations, and over-expression of a CA gene. Expression of a CA gene or variants thereof in cells or tissues where it is not normally expressed or at abnormal times of development is provided. In addition, by providing expression of proteins derived from CA in cells in which it is otherwise not normally produced, changes in cellular behavior can be induced.

[0378] DNA constructs for random integration need not include regions of homology to mediate recombination. Conveniently, markers for positive and negative selection are included. For various techniques for transfecting mammalian cells, see Keown et al., Methods in Enzymology 185:527-537 (1990).

[0379] For embryonic stem (ES) cells, an ES cell line is employed, or embryonic cells are obtained freshly from a host, e.g. mouse, rat, guinea pig, etc. Such cells are grown on an appropriate fibroblast-feeder layer or grown in the presence of appropriate growth factors, such as leukemia inhibiting factor (LIF). When ES cells are transformed, they may be used to produce transgenic animals. After transformation, the cells are plated onto a feeder layer in an appropriate medium. Cells containing the construct may be detected by employing a selective medium. After sufficient time for colonies to grow, they are picked and analyzed for the occurrence of integration of the construct. Those colonies that are positive may then be used for embryo manipulation and blastocyst injection. Blastocysts are obtained from 4 to 6 week old superovulated females. The ES cells are typsinized, and the modified cells are injected into the blastocoel of the blastocyst. After injection, the blastocysts are returned to each uterine horn of pseudopregnant females. Females are then allowed to go to term and the resulting chimeric animals screened for cells bearing the construct. By providing for a different phenotype of the blastocyst and the ES cells, chimeric progeny can be readily detected.

[0380] The chimeric animals are screened for the presence of the modified gene and males and females having the modification are mated to produce homozygous progeny. If the gene alterations cause lethality at some point in development, tissues or organs are maintained as allogeneic or congenic grafts or transplants, or in in vitro culture. The transgenic animals may be any non-human mammal, such as laboratory animals, domestic animals, etc. The transgenic animals are used in functional studies, drug screening, etc., e.g. to determine the effect of a candidate drug on prostate cancer, to test potential therapeutics or treatment regimens, etc.

### Example 13

[0381] Diagnostic Imaging Using CA Specific Antibodies

[0382] The present invention encompasses the use of antibodies to CA polypeptides to accurately stage cancer patients at initial presentation and for early detection of metastatic spread of cancer. Radioimmunoscintigraphy using monoclonal antibodies specific for CA polypeptides can provide an additional cancer-specific diagnostic test. The monoclonal antibodies of the instant invention are used for histopathological diagnosis of carcinomas.

[0383] Subcutaneous human xenografts of cancer cells in nude mice is used to test whether a technetium-99m (^{99m}Tc)-labeled monoclonal antibody of the invention can successfully image the xenografted cancer by external gamma scintography as described for seminoma cells by Marks, et al., Brit. J. Urol. 75:225 (1995). Each monoclonal antibody specific for a CA polypeptide is purified from ascitic fluid of BALB/c mice bearing hybridoma tumors by affinity chromatography on protein A-Sepharose. Purified antibodies, including control monoclonal antibodies such as an avidin-specific monoclonal antibody (Skea, et al., J. Immunol. 151:3557 (1993)) are labeled with ^{99m}Tc following reduction, using the methods of Mather, et al., J. Nucl. Med. 31:692 (1990) and Zhang et al., Nucl. Med. Biol. 19:607 (1992). Nude mice bearing human cancer cells are injected intraperitoneally with 200-500 μCi of ^{99m}Tc-labeled antibody. Twenty-four hours after injection, images of the mice are obtained using a Siemens ZLC3700 gamma camera equipped with a 6 mm pinhole collimator set approximately 8 cm from the animal. To determine monoclonal antibody biodistribution following imaging, the normal organs and tumors are removed, weighed, and the radioactivity of the tissues and a sample of the injectate are measured. Additionally, CA-specific antibodies conjugated to antitumor compounds are used for cancer-specific chemotherapy.

### Example 14

[0384] Immunohistochemical Methods

[0385] Frozen tissue samples from cancer patients are embedded in an optimum cutting temperature (OCT) compound and quick-frozen in isopentane with dry ice. Cryosections are cut with a Leica 3050 CM mictrotome at thickness of 5 μm and thaw-mounted on vectabound-coated slides. The sections are fixed with ethanol at −20° C. and allowed to air dry overnight at room temperature. The fixed sections are stored at −80° C. until use. For immunohistochemistry, the tissue sections are retrieved and first incubated in blocking buffer (PBS, 5% normal goat serum, 0.1% Tween 20) for 30 minutes at room temperature, and then incubated with the CA protein-specific monoclonal antibody and control monoclonal antibodies diluted in blocking buffer (1 μg/ml) for 120 minutes. The sections are then washed three times with the blocking buffer. The bound monoclonal antibodies are detected with a goat anti-mouse IgG+IgM (H+L) F(ab′)²-peroxidase conjugates and the peroxidase substrate diaminobenzidine (1 mg/ml, Sigma Catalog No. D 5637) in 0.1 M sodium acetate buffer pH 5.05 and 0.003% hydrogen peroxide (Sigma cat. No. H1009). The stained slides are counter-stained with hematoxylin and examined under Nikon microscope.

[0386] Monoclonal antibody against a CA protein (antigen) is used to test reactivity with various cell lines from different types of tissues. Cells from different established cell lines are removed from the growth surface without using proteases, packed and embedded in OCT compound. The cells are frozen and sectioned, then stained using a standard IHC protocol. The CellArray™ technology is described in WO 01/43869. Normal tissue (human) obtained by surgical resection are frozen and mounted. Cryosections are cut with a Leica 3050 CM mictrotome at thickness of 5 μm and thaw-mounted on vectabound-coated slides. The sections are fixed with ethanol at −20° C. and allowed to air dry overnight at room temperature. PolyMICA™ Detection kit is used to determine binding of a CA-specific monoclonal antibody to normal tissue. Primary monoclonal antibody is used at a final concentration of 1 μg/ml.

[0387] All publications and patent applications cited in this specification are herein incorporated by reference as if each individual publication or patent application were specifically and individually indicated to be incorporated by reference.

[0388] Although the foregoing invention has been described in some detail by way of illustration and example for purposes of clarity of understanding, it will be readily apparent to those of ordinary skill in the art in light of the teachings of this invention that certain changes and modifications may be made thereto without departing from the spirit or scope of the appended claims.

What is claimed is:

1. An isolated nucleic acid comprising at least 10 contiguous nucleotides of a sequence selected from the group consisting of the polynucleotide sequences of SEQ ID NOS: 5, 11, 17, 23, 29, 35, 41, 47, 53, 59, 65, 71, 77, 83, 89, 95, 101, 107, 113, 119, 125, 131, 137, 143, 149, 155, 161, 167, 169, 171, 173, 175, 177, 179, 181, 183, and 185 shown in Tables 1-28, or its complement.

2. A host cell comprising a recombinant nucleic acid of claim 1.

3. An expression vector comprising the isolated nucleic acid according to claim 1.

4. A host cell comprising the expression vector of claim 3.

5. The polynucleotide according to claim 1, wherein said polynucleotide, or its complement or a fragment thereof, further comprises a detectable label.

6. The polynucleotide according to claim 1, wherein said polynucleotide, or its complement or a fragment thereof, is attached to a solid support.

7. The polynucleotide according to claim 1, wherein said polynucleotide, or its complement or a fragment thereof, is prepared at least in part by chemical synthesis.

8. The polynucleotide according to claim 1, wherein said polynucleotide, or its complement or a fragment thereof, is an antisense fragment.

9. The polynucleotide according to claim 1, wherein said polynucleotide, or its complement or a fragment thereof, is single stranded.

10. The polynucleotide according to claim 1, wherein said polynucleotide, or its complement or a fragment thereof, is double stranded.

11. The polynucleotide according to claim 1, comprising at least 15 contiguous nucleotides.

12. The polynucleotide according to claim 1, comprising at least 20 contiguous nucleotides.

13. A microarray for detecting a cancer associated (CA) nucleic acid comprising:
at least one probe comprising at least 10 contiguous nucleotides of a sequence selected from the group consisting of the polynucleotide sequences SEQ ID NOS: 5, 11, 17, 23, 29, 35, 41, 47, 53, 59, 65, 71, 77, 83, 89, 95, 101, 107, 113, 119, 125, 131, 137, 143, 149, 155, 161, 167, 169, 171, 173, 175, 177, 179, 181, 183, and 185 shown in Tables 1-28, or its complement.

14. The microarray according to claim 13, comprising at least 15 contiguous nucleotides.

15. The microarray according to claim 13, comprising at least 20 contiguous nucleotides.

16. An isolated polypeptide, encoded within an open reading frame of a CA sequence selected from the group consisting of the polynucleotide sequences of SEQ ID NOS: 4, 10, 16, 22, 28, 34, 40, 46, 52, 58, 64, 70, 76, 82, 88, 94, 100, 106, 112, 118, 124, 130, 136, 142, 148, 154, 160, and 166 shown in Tables 1-28, or its complement.

17. The polypeptide of claim 16, wherein said polypeptide comprises the amino acid sequence encoded by a polynucleotide selected from the group consisting of SEQ ID NOS: 5, 11, 17, 23, 29, 35, 41, 47, 53, 59, 65, 71, 77, 83, 89, 95, 101, 107, 113, 119, 125, 131, 137, 143, 149, 155, 161, 167, 169, 171, 173, 175, 177, 179, 181, 183, and 185 shown in Tables 1-28.

18. The polypeptide of claim 16, wherein said polypeptide comprises the amino acid sequence encoded by a polypeptide selected from the group consisting of SEQ ID NOS: 6, 12, 18, 24, 30, 36, 42, 48, 54, 60, 66, 72, 78, 84, 90, 96, 102, 108, 114, 120, 126, 132, 138, 144, 150, 156, 162, 168, 170, 172, 174, 176, 178, 180, 182, 184, and 186 shown in Tables 1-28.

19. The polypeptide of claim 16, wherein said polypeptide comprises the amino acid sequence of an epitope of the amino acid sequence of a CA polypeptide selected from the group consisting of SEQ ID NOS: 6, 12, 18, 24, 30, 36, 42, 48, 54, 60, 66, 72, 78, 84, 90, 96, 102, 108, 114, 120, 126, 132, 138, 144, 150, 156, 162, 168, 170, 172, 174, 176, 178, 180, 182, 184, and 186 shown in Tables 1-28.

20. The polypeptide of claim 16, wherein said polypeptide is expressed on a cell surface, wherein the CA protein selected from the group consisting of SEQ ID NOS: 6, 12, 18, 24, 30, 36, 42, 48, 54, 60, 66, 72, 78, 84, 90, 96, 102, 108, 114, 120, 126, 132, 138, 144, 150, 156, 162, 168, 170, 172, 174, 176, 178, 180, 182, 184, and 186.

21. The polypeptide of claim 16, wherein said polypeptide or fragment thereof is attached to a solid support.

22. An isolated antibody or antigen binding fragment thereof, that binds to a polypeptide according to any one of claims 16-20.

23. The isolated antibody or antigen binding fragment thereof according the claim 22, wherein said antibody or fragment thereof is attached to a solid support.

24. The isolated antibody or antigen binding fragment thereof according the claim 22, wherein said antibody is a monoclonal antibody.

25. The isolated antibody or antigen binding fragment thereof according the claim 22, wherein said antibody is a polyclonal antibody.

26. The isolated antibody or antigen binding fragment thereof according the claim 22, wherein said antibody or fragment thereof further comprises a detectable label.

27. An isolated antibody that binds to a polypeptide, or antigen binding fragment thereof, according to any of claims 16-20, prepared by a method comprising the steps of: (i) immunizing a host animal with a composition comprising said polypeptide, or antigen binding fragment thereof, and (ii) collecting cells from said host expressing antibodies against the antigen or antigen binding fragment thereof.

28. The monoclonal antibody according to claim 24, wherein the monoclonal antibody binds to the extracellular domain of the CA protein.

29. The monoclonal antibody according to claim 24, wherein the monoclonal antibody binds to at least one human cancer cell line.

30. The monoclonal antibody according to claim 24, wherein the monoclonal antibody is prepared by a process comprising:
(a) providing a hybridoma capable of producing the monoclonal antibody; and
(b) culturing the hybridoma under conditions that provide for the production of the monoclonal antibody by the hybridoma.

31. A hybridoma that produces the monoclonal antibody according to claim 24.

32. The antibody according to claim 22, wherein the antibody is a humanized antibody.

33. The antibody according to claim 22, wherein the CAP is expressed on a cancer cell surface but not on a normal cell surface.

34. The antibody according to claim 22, wherein the CAP is differentially expressed on a cancer cell surface relative to a normal cell surface.

35. The antibody according to claim 22, wherein the antibody is linked to a therapeutic agent.

36. The antibody according to claim 24, wherein the antibody is linked to a therapeutic agent.

37. A pharmaceutical composition comprising the antibody according to claim 22 and a pharmaceutically acceptable excipient.

38. A pharmaceutical composition comprising the antibody according to claim 35 and a pharmaceutically acceptable excipient.

39. A pharmaceutical composition comprising the antibody according to claim 36 and a pharmaceutically acceptable excipient.

40. A kit for detecting cancer cells comprising the antibody according to claim 22.

41. A kit for detecting cancer cells comprising the monoclonal antibody according to claim 24.

42. A method for detecting a presence or an absence of cancer cells in an individual, the method comprising:
contacting cells from the individual with the antibody according to any of claims 22 or 24;
and detecting a complex of a CAP from the cancer cells and the antibody,
wherein detection of the complex correlates with the presence of cancer cells in the individual.

43. A method for inhibiting growth of cancer cells in an individual, the method comprising: administering to the individual an effective amount of a pharmaceutical composition according to any of claims 37, 38, or 39.

44. A method for delivering a therapeutic agent to cancer cells in an individual, the method comprising: administering to the individual an effective amount of a pharmaceutical composition according to any of claims 37, 38, or 39.

45. A kit for diagnosing the presence of cancer in a test sample, said kit comprising at least one polynucleotide that selectively hybridizes to a CA polynucleotide sequence selected from the group consisting of the polynucleotide sequences SEQ ID NOS: 4, 10, 16, 22, 28, 34, 40, 46, 52, 58, 64, 70, 76, 82, 88, 94, 100, 106, 112, 118, 124, 130, 136, 142, 148, 154, 160, and 166 shown in Tables 1-28, or its complement.

46. A kit for diagnosing the presence of cancer in a test sample, said kit comprising at least one polynucleotide that selectively hybridizes to the sequence of a polynucleotide sequence selected from the group consisting of the polynucleotide sequences SEQ ID NOS: 5, 11, 17, 23, 29, 35, 41, 47, 53, 59, 65, 71, 77, 83, 89, 95, 101, 107, 113, 119, 125, 131, 137, 143, 149, 155, 161, 167, 169, 171, 173, 175, 177, 179, 181, 183, and 185 shown in Tables 1-28, a fragment thereof, or their complement.

47. An electronic library comprising a polynucleotide, or fragment thereof, comprising a CA polynucleotide sequence selected from the group consisting of the polynucleotide sequences of SEQ ID NOS: 4, 10, 16, 22, 28, 34, 40, 46, 52, 58, 64, 70, 76, 82, 88, 94, 100, 106, 112, 118, 124, 130, 136, 142, 148, 154, 160, and 166 shown in Tables 1-28, or its complement.

48. An electronic library comprising a polynucleotide, or fragment thereof, comprising a CA polynucleotide sequence selected from the group consisting of the polynucleotide sequences of SEQ D NOS: 5, 11, 17, 23, 29, 35, 41, 47, 53, 59, 65, 71, 77, 83, 89, 95, 101, 107, 113, 119, 125, 131, 137, 143, 149, 155, 161, 167, 169, 171, 173, 175, 177, 179, 181, 183, and 185 shown in Tables 1-28.

49. An electronic library comprising a polypeptide, or fragment thereof, comprising a CA polypeptide sequence selected from the group consisting of the polypeptide sequences of SEQ ID NOS: 6, 12, 18, 24, 30, 36, 42, 48, 54, 60, 66, 72, 78, 84, 90, 96, 102, 108, 114, 120, 126, 132, 138, 144, 150, 156, 162, 168, 170, 172, 174, 176, 178, 180, 182, 184, and 186 shown in Tables 1-28.

50. A method of screening for anticancer activity comprising:
(a) providing a cell that expresses a cancer associated (CA) gene encoded by a nucleic acid sequence selected from the group consisting of the sequences SEQ ID NOS: 4, 10, 16, 22, 28, 34, 40, 46, 52, 58, 64, 70, 76, 82, 88, 94, 100, 106, 112, 118, 124, 130, 136, 142, 148, 154, 160, and 166 shown in Tables 1-28, or fragment thereof;
(b) contacting a tissue sample derived from a cancer cell with an anticancer drug candidate; and
(c) monitoring an effect of the anticancer drug candidate on an expression of the CA polynucleotide in the tissue sample.

51. The method of screening for anticancer activity according to claim 50, wherein the CA gene comprises at least one nucleic acid sequence selected from the group consisting of the sequences SEQ ID NOS: 5, 11, 17, 23, 29, 35, 41, 47, 53, 59, 65, 71, 77, 83, 89, 95, 101, 107, 113, 119, 125, 131, 137, 143, 149, 155, 161, 167, 169, 171, 173, 175, 177, 179, 181, 183, and 185 shown in Tables 1-28.

52. The method of screening for anticancer activity according to claim 50, further comprising:
(d) comparing the level of expression in the absence of said drug candidate to the level of expression in the presence of the drug candidate.

53. The method of screening for anticancer activity according to claim 51, wherein the drug candidate is an inhibitor of transcription and further wherein the nucleic acid sequence is selected from the group consisting of SEQ ID NOS: 5, 11, 17, 23, 29, 35, 41, 47, 53, 59, 65, 71, 77, 83, 89, 95, 101, 107, 113, 119, 125, 131, 137, 143, 149, 155, 161, 167, 169, 171, 173, 175, 177, 179, 181, 183, and 185 shown in Tables 1-28.

54. A method for detecting cancer associated with expression of a polypeptide in a test cell sample, comprising the steps of:
(i) detecting a level of expression of at least one polypeptide selected from the group consisting of SEQ ID NOS: 6, 12, 18, 24, 30, 36, 42, 48, 54, 60, 66, 72, 78, 84, 90, 96, 102, 108, 114, 120, 126, 132, 138, 144, 150, 156, 162, 168, 170, 172, 174, 176, 178, 180, 182, 184, and 186 shown in Tables 1-28, or a fragment thereof; and
(ii) comparing the level of expression of the polypeptide in the test sample with a level of expression of polypeptide in a normal cell sample, wherein an altered level of expression of the polypeptide in the test cell sample relative to the level of polypeptide expression in the normal cell sample is indicative of the presence of cancer in the test cell sample.

55. A method for detecting cancer associated with expression of a polypeptide in a test cell sample, comprising the steps of:
(i) detecting a level of activity of at least one polypeptide selected from the group consisting of SEQ ID NOS: 6, 12, 18, 24, 30, 36, 42, 48, 54, 60, 66, 72, 78, 84, 90, 96, 102, 108, 114, 120, 126, 132, 138, 144, 150, 156, 162, 168, 170, 172, 174, 176, 178, 180, 182, 184, and 186 shown in Tables 1-28, or a fragment thereof, wherein said activity corresponds to at least one activity for the polypeptide listed in Table 29; and
(ii) comparing the level of activity of the polypeptide in the test sample with a level of activity of polypeptide in a normal cell sample, wherein an altered level of activity of the polypeptide in the test cell sample relative to the level of polypeptide activity in the normal cell sample is indicative of the presence of cancer in the test cell sample.

56. A method for detecting cancer associated with the presence of an antibody in a test serum sample, comprising the steps of:
(i) detecting a level of an antibody against an antigenic polypeptide selected from the group consisting of SEQ ID NOS: 6, 12, 18, 24, 30, 36, 42, 48, 54, 60, 66, 72, 78, 84, 90, 96, 102, 108, 114, 120, 126, 132, 138, 144, 150, 156, 162, 168, 170, 172, 174, 176, 178, 180, 182, 184, and 186 shown in Tables 1-28, or antigenic fragment thereof; and
(ii) comparing said level of said antibody in the test sample with a level of said antibody in the control sample, wherein an altered level of antibody in said test sample relative to the level of antibody in the control sample is indicative of the presence of cancer in the test serum sample.

57. A method for screening for a bioactive agent capable of modulating the activity of a CA protein (CAP), wherein said CAP is encoded by a nucleic acid comprising a nucleic acid sequence selected from the group consisting of the polynucleotide sequences SEQ ID NOS: 5, 11, 17, 23, 29, 35, 41, 47, 53, 59, 65, 71, 77, 83, 89, 95, 101, 107, 113, 119, 125, 131, 137, 143, 149, 155, 161, 167, 169, 171, 173, 175, 177, 179, 181, 183, and 185 shown in Tables 1-28, said method comprising:
a) combining said CAP and a candidate bioactive agent; and
b) determining the effect of the candidate agent on the bioactivity of said CAP.

58. The method of screening for the bioactive agent according to claim 57, wherein the bioactive agent affects the expression of the CA protein (CAP).

59. The method of screening for the bioactive agent according to claim 57, wherein the bioactive agent affects the activity of the CA protein (CAP), wherein such activity is selected from the activities listed in Table 29.

60. The method of screening for the bioactive agent according to claim 57, wherein the bioactive agent is a modulator of ion transport and further wherein the nucleic acid sequence is selected from the group consisting of SEQ ID NOS: 41, 83, 113, 181, 183 and 119 shown in Tables 1-28.

61. The method of screening for the bioactive agent according to claim 57, wherein the bioactive agent is a modulator of amino acid transport and further wherein the nucleic acid sequence is selected from the group consisting of SEQ ID NOS: 41, 53, 59, 175, 177, and 119 shown in Tables 1-28.

62. The method of screening for the bioactive agent according to claim 57, wherein the bioactive agent is a stimulator of apoptosis and further wherein the nucleic acid sequence is selected from the group consisting of SEQ ID NOS: 149, 155 and 161 shown in Tables 1-28.

63. The method of screening for the bioactive agent according to claim 57, wherein the bioactive agent is an inhibitor of cell adhesion and further wherein the nucleic acid sequence is selected from the group consisting of SEQ ID NOS: 17, 77, 95, 179, 101, and 125 shown in Tables 1-28.

64. The method of screening for the bioactive agent according to claim 57, wherein the bioactive agent is a modulator of signalling and further wherein the nucleic acid sequence is selected from the group consisting of SEQ ID NOS: 35, 47, 107, 143, 149, 167 and 185.

65. The method of screening for the bioactive agent according to claim 57, wherein the bioactive agent is a tyrosine kinase antagonist and further wherein the nucleic acid sequence is selected from the group consisting of SEQ ID NOS: 89, and 137.

66. A method for diagnosing cancer comprising:
a) determining the expression of one or more genes comprising a nucleic acid sequence selected from the group consisting of the human genomic and mRNA sequences outlined in Tables 1-28, in a first tissue type of a first individual; and
b) comparing said expression of said gene(s) from a second normal tissue type from said first individual or a second unaffected individual;
wherein a difference in said expression indicates that the first individual has cancer.

67. A method for treating cancers comprising administering to a patient an inhibitor of a CA protein (CAP), wherein said CAP is encoded by a nucleic acid comprising a nucleic acid sequence selected from the group consisting of the human nucleic acid sequences in Tables 1-28.

68. The method for treating cancers according to claim 67, wherein the inhibitor of a CA protein (CAP) binds to the CA protein.

69. The method for treating cancers according to claim 67, wherein the bioactive agent is a modulator of ion transport and further wherein the CAP sequence is selected from the group consisting of SEQ ID NOS: 42, 84, 114, 182, 184 and 120 shown in Tables 1-28.

70. The method for treating cancers according to claim 67, wherein the inhibitor of a CA protein (CAP) is a G-protein coupled receptor antagonist and further wherein the CAP sequence is SEQ ID NO: 12.

71. The method for treating cancers according to claim 67, wherein the bioactive agent is a modulator of amino acid transport and further wherein the CAP sequence is selected from the group consisting of SEQ ID NOS: 42, 54, 60, 176, 178, and 120 shown in Tables 1-28.

72. The method for treating cancers according to claim 67, wherein the bioactive agent is a stimulator of apoptosis and further wherein the CAP sequence is selected from the group consisting of SEQ ID NOS: 150, 156 and 162 shown in Tables 1-28.

73. The method for treating cancers according to claim 67, wherein the bioactive agent is an inhibitor of cell adhesion and further wherein the CAP sequence is selected from the group consisting of SEQ ID NOS: 18, 78, 96, 180, 102, and 126 shown in Tables 1-28.

The application's sequence listing, which the Patent Office published only in electronic form, follows.

SEQUENCE LISTING (186 sequences)

SEQ ID NO: 1 - DNA, 49087 bp, Mus musculus
taaattagaattaaggtgtatgttgtggttaaaactgcacaaaagcttgtgaagttcttgaccggtgtgattttcttctacacatgctaggcttttattattcattagctaaatatttttaaacttcattgactttgaggattttctttaaaaaatcaagttgtctaaagaagtgcttttagggtaaaaggtgtgtcctgtattcttttttaacattcttgtgttcagaagtcagcaggccttgcctgtgtaatgcagggtgtcttagggtacccccactcttcccaccttcgcattttctaagtcacttgtagtcttggtttagaactttacttagtgttatgttcttaagatttcaatgttactacagttgatccatcgtaggaaacaattattttttcctgcagcactttcttttctgaccttatatttccttagatagcatccttgtcacttcttttctcctagatattaaaatccaaatctgctctgtgcttcggattttagttaccagagggaaatgaatttaagtctttgtgcagggatttgtacagttttcttataggttagaaatgattaaggctggtaagttagattgcagttttgtacgagattgctaaatgcttgaactgagtcaattcacttgttcaacaattagaaggccctagtggctcaaagtgataattagccccaaagtttcctggtggagaagtagcctctgtgttgccagcagcgtcagaacgtctgccagtgtttgaaaagcattaccctgggacatgtggtcattgctctgactcccacgctcaaaaggatcattttaactggcagttcttgtgaatggcaagatggtgtaacatcaaggaaatataactgataccatggtgaaaagggaaaatacagaggggggcggtaaagatgggtacatggtgaaaccgtccaccctggtagttccaagaatgaaggaaggcatctcatctcagccattttgtaaggaaggctgtgtgcacagggaacaaaaaggagtcaaagcctttactgaagagtaacaaaagccatacatttcaaaagctttaaggcatttcaataattactgactggaaggcatctcagctagggagcttttgctcatttcaggtattccttgtatccataagtagaaaagactagcaaaaattaatgttatcttccgacggcatgtttaaggatgcctgtaataaaagatgaaagtgcagaaataaaagtaatgtacagatatttaataaatgtacattagtgaatacaggaatacagtattggggtaatatgctgtttattgtagttttgttggatatgttgtttaatggggtatcttaaatcaagacatagatgtttatagtctgttttttaagttatagggaagtcaaacactgaattatactcatgttcagtgaacacatctaccattgtcatgtgaatgagcctcgtggaaagattaagtgattgctttattatgtttaatttagttattgaaagttttattggcatcctaaactgtggacatggctttgggaggttagatggctggtcacatgggttacagacacaaaccactgtactgctggagtgttctgtttctttctgagagctccatactgcagtgctgtgtccttaagtaactttgtaatgcttggatgagtccctcctactcctgctgacattgaacgatcctgatacctcttggctgtgctagttggtcctactcatgcccttgtaacattttaataacagtcttttgagctatgactaagggtcttctctcactagttttgtactttatatagttttaagtcaaacattagccgtatcacatctaattatggtaatgtcttacattggtagacctaattgtttcccagagcagttttgtatgcattatgttagttctcttggtagatgagcatagatgttattgacttcattttgctgaggatagtcagtagcagtgatatggtaaataagtgagtatttttgatttctggtctgcaatgctttctataagatgatgcatctagtgagtccatgaggaatgaggatgaacaccaagtaatacttgcacataaggaacatgtaaatgatgcaacataggaagataaaaacgaaagcctttaccacttaaaactgtagtatgaatttttattttgttttgttctgggttaactataaaacaagcaaaggtcagtagccccatgttataagtgataagaattaaaagatgttactgtttactgaaggactcataactaataaggcagctagtcatgaacaaatctttaaaaaattttaattatatatttacttttctatgtgcctgtacatggagatgtgtgtgtctatatgtatgtgtgtgtgtgtgtgtgtgtgtgtgtgtgtgtataggtaattggtgcatagtacatgtgtagaaggcacaggacagctttgcagagccagctctcttgcaggttctgagagtgaaactgggtaaccaggcgtttgcagaagccttttctcctgtcttgctggcccttctaaccgacctgactctggctgatcctcccacaagctgattcactcccacaccgcaccttttctgctcctactgtttgatcaaaagaaagaacctacttgtgttttcctgaacaagtgctgtgatgaaatcttttaagatggacatttaaaacattttaaactgtgggttcattttctgaagggattttcacgtgtgtactaacagtgttatatacttataaaatcccagttgagcagtttaatggtttctctttgaatttctacctctttgcctttcaaaataacaatgaagaacatttaaaaggttagcataatgaacttataatactttattgttagtatttattgcatgcatgtctatgagagaactgggctgaggtattaactgtattcttcaaaaatacactctaaaatgctttttgtaaccctctttaatttttaaaaatgaaataattaggtgatatgtggagtttatatccagttgattgccctttctagaagcctagtgctggaaataggattcattagtatttactagtacttttttcctatatcagtcacaattagtatctaattgaatgactttggtttatattgtttatattggctaagtgctattagatgatttcttatccctttaaaatagtttttgttttgtattagatatagtaatagtattagatgagtcactttcctagtgtcccatctacattctggttatggtgtgtgaaatacaattatatggtagaaagaggccctgactgtcccgtgaggtcagtgctgcagtcttgaaatctcatcttaattggagggtataccctcaaggttaacgattctccagagtgtttcatctttaattttgtacatttacatgtatttgtgtagaataaaatatctatcagatatgtgtaaaatatctatcagaaagtttgtaataatagcagttagtgtataaggtgctgtgcactatttgcctgaaaaattgaagtgtgtaacttgacattatatagtttaaaagcaaaacgtcaatagaatcactaattgaacaattttgtaagcctttatggaagaatatcctattaaatgtctcaaactttctctttctgtaaattgacatgaatcatctttattgtatatgtattttgattcatgtttgcattgtaaactgggtaagtcaggccagttaacattgttctctacagtgagaaagaacacctgaaatcacaaagcacttaagtgtgtcttgcacagggtctgcctaatctacctgtgtcctgtcagctgtagtgcaagcgttgacctgagcacctggctgtatttcatgtaaggatctgggtagattttcttttatcaacaacatgtcctgttaagcaagacagataatatcttttccttctctgactaaaagtgttttgggttattttcttttttttttcttttttgcatataaaatgtgatgacagtcaagtgtttttttatagctttaacatttattcatatcagtcttttggttttgaacatggcctgagattatgtaagaacactggggaaagctgactggaaggtgttgtgggaatagaggagctgtctttagaactgttgaattttaaactatttcaagataaatttaaaaaaaattcacctgtgtaaactgtttctaattttttgttttgtttcattttttggtcttttgtttttttgtgttttgtgttcctttgatccagagttgaagtttatattctttggacagtcttaaaataagcattggttgaatgacaacacccttgtagggaagtggctaagtgtaaaagtcagccgttctcatgaagtgacaactgctcacgtggccagcacccaggtaaagagatgagtgaacagtgacgcagggttaggatatagccagagtgtgagcacagctgtgctgggaggatacaggacattaaggaacttcgtgtttttcttttcatccaaagaaattgttttgggatactgtaattgcttaatgatgacattgcctcattataaatgaaccttcttaattagaaattatacaaggatggaatatttaagctttggactgtgatgttatatgccatatcaacagcgaagtgtgaacacaagtttatgatgacaactgctaggtaatttattgtccagagctcatcgttccatttctggtgagtgaagtaggattatatatgcctgcagagctagcagaagtcttgccagctaaaaactatccttaactataaaattaatactctcaacatatcaagcctgaggaactcaaaaactgagacatagtggaatattttttcaatgtacagccaagtcctctgaaggtgaacttgtatatttaaggtggagtagtatataagcttgcctgatgttttatttatttatttatttttaatgaggtattttcctcgtttacattttcaatgctatcccaaaagtcccccgtacccacccccccaatcccctacccacccactcccctttttggccctggagttcccctgtactggggcatataaagtttgcaagtccaatgggcctctctttgcagtgatggccgactaggccatcttttgatacatatgcagctagagacatgagctccggggtactggttagttcatattgttgttccacctatagggttgcagttccctttagctccttgggtaatttctgtagctcctccattgggggccgtgtgatccatccaatagctgactgtgatcatccacttctgtgtttgctaggccccggcatagtctcacaagagacagctatatattcctaccgtacagatgctctttgggagttaaaaaattctcaacttccatggaatttttaggaagttccacaaattggaggtgcagctagatttcccagcctctgtgctgaggctggtagctgcttccaggttgaaaggaagaaaagtataacgtccatttccccagctgtgagagtggatttcgcaacctgctgttttctttttgtttcttcccatcatctgagcaggcgtccatccatggaaggttgatgtgtctgaataaccagagcagggaaattcttacagttggaatagtaagagactgttgggtgacagaaaagaacttgctgattccttttgggaaagctctctgcagagcttctgagcctggtcaaatgagtgctccaaacacatcagcaaccatagtactgaagttgctcttgagtcacttatggacttacatacctgttactctcttttgaatgcagtaattaagagactcaggattagaatcttcccaatacattcaattctttacacaattgtaaactatagagataggtgtcaacataagtcatgtatatgatgcataggaatattcatttggtacttttgagtatacacttactatcattgctttctagtcatggaagaacagtgagaaaatacacattagagaaaccttgtgaagtttgtgtatcagagtaacggataaactcagactctcaccttacctagcatctcagtggaaacctgaggtatacctgcagggagagtgatggacagagaggaatgggaatcatctttttaataatgatcactaaaatcatccatggcctttcattttcattaatatacaagtaaaattaatttgattttatccaggtcaaacaatttatctctgaattattctcttgaacatttcagtgcttataaaataaagacaaaacccatatggttataaaagtgtcttcactgggctccatgggtgactgttgcctcagaattctttctcatttaaacattaaaatgtctaggtgggggataagctgaatgaaataaatagaaggatttgttttgactttgctagcaaagaggacacacaggccagggagcctgttgctttgattagcatgtccccctaccacaacacacctctgctgctcatcctgttgtgtttgagaatttgacattctatccttctttttcatggagtatttaactttaattctaaattgtatggcattctatttaatccacaactggttattactgcttagatgtagtcagatacccagagttgacatcctgatcttgctaattttctgtgagtccttctattgctttcctaagggttctgtaacagagtacctcagattcatgatttaaccaacagtgctttactgtcctacatgcctggaggctaaataaggtgccagacacaggctctcagagatgtcgaagggagaatcctcagttgcctcattgccctttccttgcttctggtggtttccagctctgtgacttctagtcacatcactaaattaaacattttttaatagtgattttatcaatgagactaagacattgaagtgtttagattaaaagtcaaatctcactgtagttttggaatgaaatgcaatttgcagattgtaaaaattcttaactgctacatgtcacagataattcaacctgatatattcagataattataacttttgattgactatagtatctaggagtgtttgagaattttttggtatacattgttaggcctcaaattttaactggtttatatcagactcagtagaaaaactggactaaaacattgcccataaccaagatgtttatgtcccaggtctgagtagggtgtgataacttctacttgtaactccaacatgatcttgatgttactgatgctattccattgttacctcttgttaacactggatcaggctatatagtgcacaggaaaacagtgaacacatccgtcctgttaggtgttaacagttttcacagagtgcttcagagcatcttctctcctttttttgaaagaaaaagtcctatgaactacggaatgtgcgtgcttctgttgctccttctcttctttccttccttcctccaaagtgagctgctccagagtgtaatctctactgtccagctgcacatgttcatctcaaaagggaaagctttcttttcttttgtgttttagcatttttttttaaccttctaagatagggtttctctatgaaatgctggctgtcctggaactagctctgtagactaggcagggcctcaaatctcagagcctctgcctcctgggtgcttggaataaaagttgtggctaccaccacccagcacatattttggcatgttttaaatcacatatacgtgataagtatgtatctttctgctcccatctgctcatggtaatcatctcctactacatggtttgctttttaaaagatgctaataaaaagtagttttattaactctttgagaaactcatccaatgcattttgattttattcacctcctttcccacttcctcgaagaatcattccaacctccacacctacgacttgctttttgtttttttgtttttttatttccagagatgcccttggaatagaaatccttaattttaatgtagtcagtgacaccagttttgcttttcagtgacttctgtctcctttcttgacgttctcagtttctcaagtaacttttttaggtctgcgctttatagtaacagtggtcagtagtcacatgtgactgctgggcaattgaaatatgcttagtctgaattttaagatgtgctatatgtcatattatgcaggatgtaaaatacctagttaacaagtttcagatgttagttagctagaatgtagctacataacaagtttgtttcatatgtatactctagaaaaactccaaataacaaaactagctcacattgtatttctagattctagaagtatacttttcagtagaacttactgtggtgttgattgtattctttgtctgtgctgtcccagacggggacccttagctgcatgtggaggaacgacattttaaatgtggctatgataactgagaaacttaattttaaatttaaattcaactcatttagatttgagtacccacattcttctaatagctcctctattgactcttttggacactctcctgtttaagcattcatttctgaaatttagcctccaatttttatctgtggttgattctgtctatggtgttagatagaggtcaacaagggtatttctttcttctatatgcaagttgagccagccaaataccaaggaaaacaatatttaagactaccctttgttcctttggtggtctccttttttatttttacatttttaattttaaactcttacctgctccctgcccccatgccacacaagtttgccatggccattcttacccctgactgttttcacataaatattaaatatacttcattgcttttcacaaagaattttccaggcttttgattgagattgtattggatctgtagtttacctattcataagcataacatagctatatattttacttacatatttaattttgctcaataatgtgtgacttttttctatgggccttacatatgttttattagattatgcctagatatttgtttgctattaataatttattactagtttcatgttctagttcttctggtatatagaaatatatttgattttaagttattcttatatcaagaatctatagaaaattaacttactcttggatttttattgtattcaattctaagcatttgtgaatactgagaaaattttcctggtttttaaaacaattttactcatttttaaaaaaaatattacttgtgtggatatatgtgtgtgagttcatttacccatagagactggaagaaagaagatactagattctcctggagctgaagtttcagctggttgtaagctgtgcaatactgcagctcgtaactgatttgagtcctctgcaagaggagtatatatttatttatttattattattattttttaatctttttttttaattaggtattttcctcatttacattttcaatgctaccccaaaggtcccccatacccacccccccaatcccctacccacccactccccctttttggccctggcgttcccctgtactggggcatataaagtttgcaagtccagtgggcctctctttgcagtgatggccgactaggccatcttttgatacatatgcagctaaagacaagagtatatatttgttctaactgttgatccatctttctaaaccccatttcagttatcttatttgttctcatattgctgccctaaccagaacctcaagtgcaagaaccagcaaacttcattttaagcaaacaataaaaatgtatatggagtcttcagtgttttaaaagtagtcaaagtagtcctatgtcctgagaagtttgtattaattaaaaggactgtacactaatacaattaaataaaaggggctatttttcatagaggatattggtgaaagaatgactatagtcataaaggaaatgagataaaatacttggttaatggattggcaattgcaaaataagttttcttatcttgagtatatgttggcatacactaatcagctgtctttttcaatccctgtaggaaaagtagaaatgaaggtgcatatacacacaaagttttgcctcatctgtttactgacatttattttccatcattgcaaccactgccatgaagaccatgaccatggccctgaggagcttcacagacatcatcgtgggatgacagagtcagagtcaagcaaattttcagtgcaggatgctgaaaatgaaaaaaagtactatattgaaaaactttttgaccgttatggtgaaaatggaagattatcattttttggtctggagaaacttttaacaaacttgggccttggagagatcaaagtcgttgagattaatcacgaggaccttggccatgatcatgtttctcacttagacattctggcagtgcaagagggaaagcatttccattcgcatacccaccagcattttcacaatcatttaaatgcagaaaatcatactacaaccagtgtgacatcaaaaagaaaccacaaatgtgatccagagaaagaggcagctgaactgcccatcaaagctgatgataaacacctgcatgaccgcaatcaccgcttccatcatcgccatcgtttgcatcatcacctggatcacaacactactcgtcacgttcataatgactccgttgctcacagtgagcatggggagcccggtcacagcccttcaccagagaccaataaaacacaagagcagtctgaagtgaagtcagtgaaggtcaggaggaaagaaaaagggaagaggaagaaagaaaactcggaggttaatacaccaggtttcctccccaaccatgatcacagtgaacaatatgagcataaccgggttcacaaacttgaccgtgtacatagccctggccatcctcatgcgcatcttcctgagcacagtggtcatgagcttggccatggacaccaagaacttgatcctgataatgaaggtgaacttcgacatactagaaagcgagaagcaccacatgttagaaaaagtgcaatttattccacccctagccacaaagaccagagtgaagacgaccgccagcatgaagtaggtatacaaggtggtgtgcagtggtgtctgtggtggctactcagtagttcttataggtgtggagcagttagataaggagaaggttaaccatagagcagtcgcatcacaactcagccatgtggagacttggggaacactgctagcagaattaaggaatcaaaatcaaggttggaaaattttaatcagggttttatttttatttattctcaaatttgggttcctcaagcctagtctaaatatttaagtgttgcttgataatatatcctttaattcattttattatttgttttatgaattctgactctccagtagcagtcttcactgctaatattgtagctggcttctaaataccagaaaattaaaacatgtttgctcttgttcaacatgatctttttagaaatagctaacttctcttgcataattactaacttattaaaagaagttacacttccaagtcattgttttagcttctgagtttttgtgaatgcattgggcttctcttctgtattactttttgataaggcctattgtgatgtcagtctttactgaggcccttcacagacctgggtgaatgcaaaatatataatgattggaaatcccaggccttctgatgcactcttgtttttctcctaaatcttcttacttttgaaaacttttctaccttcaattatgtccacagttctttaaaggtgtatttcctttttggtatatgtataccaatactattttttattctgattttgtaacaatcttattacaatttagaaatgtttgttttatgtatgtttctatgaatagtaagtggcaccatccaacatgggaaataaacatgtattgcttttgttactgctttgcagttaggttagtgtgcatctgagtaaattcagaccatttcttctttggctatgtcatcagatacgtgtttccagcagttataaacagtggttttaacaataaaatatataaaaatcttagtgagttttttaaagtgtacttttatcattgtaggtaagattgtagcaccttccctagatgaaaatggtatgcacatttactgtgtgtatcagagcctgaggtctgcattctcagtccgtggtctcgtcctcatggctctgaagccctgacacccaggagactttgaaaatgtctttggcattgagtagggtggtacttcaccattactaagacctaagagtaggttttgattttgtgtttatggttattttttgagttattgataaaatgaggtactatgtcagtaatgaagcatgcaaccagactgggtaaacacaagagaaaaaaaaagagttcagttctctctctctctccctctctctcttccttccttccttccttccttccttcccctctctctctctctctctctctctctctctctctctttctttctttctttcttctaaattaattcatatgagtacactgtagctgtctttagactcaccagaaaggggcattggatcccattacagatggttgtgagccaccatgtggttgctgggaattgaactcaagacctcttgaagagcagtcagtgctcttaacctctgagccatctctccagcaaccagttctttatcttaatttttatctagtgtttacttcatggtaaatccaaacttgggtatttctttcttctttgtctttgaaatgtcagtgggtaaatcttttttttttcctttttctttttttctttttgtgccaggattaaacccaagacctggcattgaggagagcctcagttcatggtctttctcatcttggtttccctcagctcacatcaggctagaatttattgatttattttttgtcttttggagtgtgtgtgtgtgtgtgtgtgtgtgtgtgattctgtgtgtgtgtgtgtgtgtgtgtgtatgtgtgcatgtttaatggattgttactattttgctcttatgataatcaaactcattgaactaaatgtgccccagcattcaataaaacatttcttctgcaatgcctttggcaggaaaaaatatatgtgctaatggattttgagtcactgatactgcagtttggtaaggcagagcccttctgatcctgtacgaatcttgggaacatggttgagtcatatttcatgtgttggaataggaaaaagaactctagaaattctctagtaatctagtagtatatctccctattttaattttttgcataaattcctatggaaagcatggctcttatgtgtttgtattacagtatttcaagtgatatttagagtattttaattgtacaataacattttctgcataatcttaaaaacctgcttatactcagtttgttttatccgtttccttgcagtgtttgaacgtcactcagttgttaaaacactttggtcttggtccgaactctcccatctcaccggatctattcacgtacctttgccctgcattgctgtatcagatcgacagcagactttgtattgaacattttgacaaacttttagttgaagatttaaataaggataaaactctggttcctgaagataagacaaatataggggcatcgggtaagaaagacttttttcctctttaaggtagtactcatactgtcccttaaattatttattaaaaagaaagactaaattgttagtttcatttcagtgtcagattttaatgatccaatcagatttagatatctatataagatattggaagacgccaagaggcttattagtatttttattttatttcctctggccctgtagaggagtgttttgttgaaaacagagaaaaagattaaaaaggaaatagaaatctttttgacaatcagccataaaatgggaactctgattaaagttattttccattatgttatttactctttagcaggttctggcttcatgaaaagcaaagatgattggattttaaagaagtaaaatggggaactagaggctaacagatgggagtgtctcaggcatgccacacgggtggcacgtgaacttagtcttggttactcttcctggttccagttagatgacaccaatactgttttgagactgtgcctaggctgggttggctgcccaacgtaactgtctagacagcgccactgtgatattcacacggcttctctcatgacattttaaaactccaccatgtgaaaatgtgtagctctcttggatctgaaccacttccattctttgatagaacctagaactttttgtttccctctgattttcttctttccctctttgtttttctgtagttaggagtctaatcatacatatcttctaactccatgcattctgttataaactttgcttgtagttatcttgtttttatctggctttttgattgtcgaaagcttcattaactttttgcctatgttcctacccctttcaagacatctcttgcgcttaaactagatttatattctaaaatcttaagtgagctcctccagcatagaagtttgtgtttacttgtgatggttagcgttacattaatactttagtttatttacattacaaacacgtattctaggcatctttctaaagtcagttaatgtgcttctcccagcagtcctgtaactttccattgcatagctgatactttatctttttctcatgtaaactgtactgtgccatatgatctctaggttagaacttagctttgcttggggctcaggctttctgtaccgctcacgtactttctgcctttgcatctgaatccctacataagtaatagaaatgcctcttatgtagcgttgaccataggtcctgctgttcctcactctgatttattaactcctcaaaaaagtgaggaggtggatacagttatatgtaatagcacattgacagacttgtagacctaagaagaaagttgtaaaagcgtactggtataactatggctctaagtgttgattagttgtcaagaaaatatactcaagaatgatgataagaactggatgtggcttacgtgccctgcagtcaaaagaacttagaaatcagagacaggtggctctgaatccaatgccagcctggtctacatagtgagacactgtctctaagagcgggaaggaaaggaaacccttcatcctgtaggctggaagagtagagacagtgagtccacagttgaatttgaatgttcattgtggaaaaaatacagtctgtcctcctccttgacctcacacatactattccttgtagatgagagactgtccttctcaccaacacaaaaggggagtcagagactaaacctaattgagaataaaatgtactttttctctatagggaaaaatggaaagtaacaagcttgtttcctttgaagttaaaaccaacagtgtttttattttgaaggagcctaaaaaaataattcagttcattgttttcatgccaggagtggattagggctttttaattagtgttgtctatgttgtaatgttgccataatgtatagattgaaataaagctgttgacaggtatgtaacaagtaatacaggaagttacagcttattcaatttgaaatccttagaggaaattgttttggaagcaagtatgttacaaatagggaatattgattggttgtttgcaggtggtttttagcattgttagaaatgcagcttgaattaattatgtcctgatagatgttaataattgttagagagaatgccccactagtaattatttttaatgactgctgcaccattaagaaaggttaacttgttttatataaatctcccatagtgactcagctactacctcattaactttattcaaagattgctgtaaaccaaataccctgaatagtgtgcatggtagaaatcgtttgtttcacaagattggctcatttagtcatagagttgaccctagcttaattaccaaggggggctgtgaataggctgctaagcattttctgccaattaaaatgctgaaacagtgtagaaaactgccgtcttgcacatgctttgcaccaagttaattagaaagtttccacagatgagcgcttctttttaaaagaatgcattttctctcctggtaatgaggaaaggagttggtgaataactaagcttgaagacctttaacgtttctagcaacctaatttgtggactaagtgaagcttgcttcagacacttagctctttttattacatatggtatcttgagtacaaataaagaaaacatttgctagttgtatttaatagtttgcatattgcttgttaggtatgagttttctaaaagatacctttccagctgtgttatactttgttttataccaaataaattgtgattagaaaaggacagtaatttgattagaaattggaaatttctgcattgctttttttcctctggtgtatttaaaaaaattaggagcttatgtaagctaaaaatcagtaaactgcctggaaaggtatttctaaatacagtatattaaaaactaaatataggtcaaaagacttgtttgtttttttttttcttaaaaaaaagattaagttgctagaaaaatgtatgctcaaatttatagtagtagaaaacagattatttctttgaaaaattaaaagtaaacaattgaaggaggaagtttctactagcaccatgtgtacaggagtgggttgtgctggttctaacatgaaacagttgtcatggagtattgtcaactatagaagatgtccgggtgtttctgagtgtttgtttgtttgctttaatgtgtatgcagtatgcctgcatatatgtctgtaccatgtgcatgccctgtgccctcagagaagacacggaatcccctgcaattagaggtccaaatgattgtgaattactgtgtcggtgctgggattgaacccagttcctcttcaagagcagcaagagctttaaccactgaaccatctctccagctgcctgactttattatatcttaggacgagcagaaacaggtgataattcacagttgataaattactaaccttactgctcatgtctagtgggcttgaataaagtgtaagtcctgtttttttttgtttggttggttttttttgttttttcgagacagggtttctctgtgtagccttggctgtcctggaactcactttgtaaaccaggctggcctcgaactcagagatctgcctgtctctgccagtaaattttgataattttatgaagttacgtaatgttgtcttcatctttatcataattagctcacatatgcaagacagtcatttaagttaacatttcttctttcaggcataatatacttaatttttcttacctatcatcttttgtgtatgaagctccctttagtaagtaaatcggggatatatataattcttggctaagagttctctgacagtgctatgatttgatgagaactgtaggattagagaactggctcaggtgtccttaccatcccttctttgactgctgtggccagccctgtctgtcctctgggatcttatgcttctggagcaaatccctagtcccatgcataattttgactttttaaaatagctaattttatgttagattttttttttttaccacagtttttaaaagttaagccaataaaatgggaatttttttcttccctttttagtgttaaaatataacaatttgatcttagttattattaagtgtacaatacactggtgtcaaatagactcataccaatacatctacaacgatctctacaactcttcatattgcagaactgaaactttattcccattaaaccatagtttctcatccctcccaccatgcagcctctagaaatactgtatctgtattcactaaatactatgaggccagcataatgacccagtagcaaagccaggcaaagaccctatgtggaaattagagcccagtgttccttacaaacatacatgtaaagtttctcaacaatataccaaagatcaaccttcaaagtttctgatgagaaatctgctgatagccccactggggagccctgttgtgtgatgggtgagttgtttcatcttgtaacttttaaagttcctctttgtttcttgggagtttgcgtatattgtgccgtagtgtggatttcctcctaaaattcatcttccgtcttccctctacttttatatttctgcttgttgtccgtcaactttgtgacgtgtttagccttgcttcttcacatactcttttttgttgcttctttctggaactccattgtgcatgccagtcattgtgatggtgacccaaaggtcccttgcaggttgtactcacttttgtcagcctgttttctttctctctctccacctcagttaccattgtcctgtgttctaggtttgttgtttcttctgcctcctcaaacctgcctttagatcctagtagccggtttttacttcctttattattattatatttcactggcttcagggctcctttagtattttatttaggttttctgcctctttatttccattttgtttatatattgttggctgtatatcatggttttgttctgctttggagcacagtgatgtcataagctttctcatatgtgggctaggcaagatggcgtatctccttgactcacttatctccttcctattggctttttagagctttccttttgtgctgttgactaacgctgactgtttccctacagcgtggatctgtggcatcatatctatcaccgtcattagtctgctttccttgctgggtgtgattttggttcccatcatcaaccaaggatgcttcaaattccttctcacgttccttgttgcactagcagtaggaacaatgagtggagacgcccttctgcatctactgccccatgtaagaaattgttttaatctgccaaaagatacaaatttgtggtactagtgttgagtgtccttgggtagtgttgctatgtacttgtacttgtacactgtatttatacactaatagtgtacacaagtttgctaaattgtatgttcttataggttgaagtttgtttttctcatttttgcagttttaattgaagtatttttaaataaattgaatcattgggttttaaatgggaccaggagtgaaaggtcatctgatctttctatacattaagaaaactgttagaaaagtgcatatggtatgttgtaacgatggtatatatagccaggagggtacagtggtgaactgctttgaaatagctggcgattttgttttatttttactaagtatttgtgattaagtggtattaatttatgtttacaaaggactcattaatttttgttattttgggttcattcactcactagtatttttctaacccttagaggcatttgtttataatgaagtataataatgtccaggtaataagccaaggaaattaactgcaagacaactttatatactgtcaatgaagcactttgagatttaaaaagttatgaaaccttgagctcatagaaggtgaaactagaggaacgtgaaggacgagggaagggctgggtgggggttgtattgtcagtggttcataagttatgttatgtgggagatgtaagctctgcatataaggggactgtaggtaaggatgaagtgaagacaggtggaatataggtaaggatagtgtgtgcgtgcttgtgtgtgtgtatgtgttagtgaaaggactccagaagttttttcaccgtaaagaaatgataaatgtttaaagaaacttaatatgacttaaacattgtataatacatgcatgtatcaaaatattcatgaaacccgataagtctgtataacttttatataccaaccagaagcttaaaattagattaaaaattttaaatctagaggataatctttctatgtcaataagatgttgcagtcaaaaatctgaagtaatttgagttattttcttcattatctaatagtctcagggtggacatgaccacagtcatcagcatacgcacggacatggtcattcacatgggcatgaatctaaggagtttttggaagaatatgatgctgtgttgaaaggacttgtggcgctaggaggcatttacttactgttcatcatagaacactgcattcgaatgtttaagcactacaagcaacaaagagtaagtgctgctcacaaggttgtttacttaggtacagatctgaagaaaaagcacctctttctgaacacattttcttaactatgatgttggtgtatagtgtatctctattctttatttttcctgtttctgatctttgtcactttgtgccattgcgtttactttggcatttataatcaagatacagcagtgtctgagatagcttgtgtttcatcatacctcacaagttaagaagaatgggaaaagctggtgacctgtttttaaataagcatatataaatgaaaaagaaactggtctcatcagtctatcttacaatgaagttttttacataacacctcctttaacagaaatacttcacttgtagtagaagtatccgagggaagacgaggtcagaataatagggcacactcaggaaacagtagagacactgacagagagaaataatggaagcactaaatctttagtattgatccaccatttgggagaacttgactcagcaaccctggttttcatgcagctgtctttgatgtttcacctatgaaaacatcccccagaaaattggtttaaagcccctactgttctctggtttaactgagttcacatttgttcattggcataagcagcctatcacagtccatgctagtggcatggtcaaggtagtgacacacagatggctcgaggatattagattatatttaagtaaaactttccacaaatggacaagagttatacatttctatcttgttaattccaaatattcttttcgagttctctgggtagtcataattttgcttgtttgcatttctgcatgcacaaccacatttttgtatgtatttaagacaaaagtgacttggcaaagatctgtgaactgggatcaggagagtgattctagtctgtgcagacattagctatgtgactgtctttgatcttcatgatctccagttaccatctaaacagggatacattttattccttagcttatcacattttaaatcatgtacttaattttgattgcttatctccaaaggagtactgattaagatgaggatcccagaaaaaaatattttctttggcctggtagaagaagctaaaaaaggaaggggttaagagaaaagtgaagtgaatctaattatataataatgtaatctaattgcatattatgcctgaaaggctatgtgaaggatacaataattatttctaagagatgaatggacagtaatttggtactgaggatgccaaagcagggctggctggagggatacaggagctgttgatggaaccactgcagagtaatgtggaaggcaggtgataggaacttgggccagaaggtgctgataggaattgttgaagtagtattggtaagagagttggtgaggcttgataagtgattagatgaagtaaaggagagttgaagaccatgtctcctaaaaagcatctgactatctcagcagatgcaggaaagaaacctggtaaaatcatcatcattattattatcattttatttttgtgtgtgtgtgtgatcaaaaagacatcgtttgagtacagaagtcaagtgcacctcagcacttcagcaggtgtttgtgataaacccgcagccaacatgatgctgagttgggaaagctgagaatgtatttctttcctgattcagaccaacagtatggtactagaaatcttagttatggtggtccaagaagagacagtaacaacagaaagcatacatgcaggatggaggaattcatagtattccaatttgtagaagatgagattctgttcacaagaaaacctagaaattctaccaaaagattagcaaaactgataaatgcattcagttaggtttcatgctcaaaatcagctgacaaaatactacatgagccttgtgagaagggcactatgcaagaaatcccgttacaacagctaccaggttgagagggggaaattaggaaacagctgctttcagaagaattagtattgcttccatgttcataaaacccagaccaatctgcagattccatgaagcactcattgtggggaatggcaatccttgtagatctagagaagtcatttgtggaattcatgtgggagcagactccccagtgccaacacagtctgaaacaacaggaacaaagaagctggagggctcacagttatgacttcaagacaggctccagagctatgataaccaaaacaacagtaaacggtgctggaaatcctcaggcaaaaggttgaaactagagacctgagagcataaaactgctaggagaaaacaagggctattggtctaaactgtgattttttttaaaatttatttatttatttttaagtatgaagcccaaagtataggaaataaaagcaaaaattgattagctgtgtcatggtgaattgtaaaagcctcccgcacagcatagaaaacaacctgcaggatgtgagaaaatactcaaaatgatcatttaatggactaatgtccagaataagcaactcaaaagcacttagcaacacaaacaatccagttgaaaacagcaagataggcatgtgtattagacacagtcaatataaagataacaaatactgacaaggatgtgggcaaaagaaaatcattgcatggcagaggaagacacacaaaatactctagccattatgcaaactgtctgaaggttcctcagaaaactaaaaatacacccaccacatgatcccacaatcccagtactagatatatatatccaaaggaagtgaagttagtattaaggaaacacctgcagtccagtgttgtagcataatagctaggaatagcctaagcgtcccatgatgaatggaaagcgaaattatagaatatatgcaccatgggatactatttatacataaacatgtgtatgctacttgcaacaaggtgtatgggcctagaaattgttcaggttaatgcatagtaggttgacaataagcaagagtaatgcaccttacagttttaaaagcttcaggaggtcttgcatattccttctacaagagatagggtttgaggtgataaatgggcttaacctgctttagataatcagtgtatccttggatgaaaacacaatgtaatatcccatggatatgtagtttttattttttaatttatatgttagaatgggcaaatgatatgaatagaaattctcaagatgtatgaattaccaagaaatacatgaaacagcaaacaacttcctaagccttcgagtatagttccttatgaaatgtatgctcagtgtgtgaggccctgggcttaagcttcagaaccaccaggaaggaaaaactagtggagttaccatctcacccagtcacgtggctttagtcagtatagtaatcttgtggtaacaatgtgctgtgaaaaggactcccccagtgttgatggcagtataagtgctatggttatggtggaaaggagagaagatccctccacaaactaaaagtaaatgtactatgtaaaccagctgccccacctcttagtatgtctaaaagaaatgaaaccagctaaaaaccagttcctgcctgtcatatatattgctgcacgactcacagtagctataataaggaatcagcccttgtgaatggagaagtagctggtatagataaagaaaagaatgtttcaaccacaaagaaaagtgaaattttatcaagatacatgggacatgcagatacgggatgctaaatgagctaagcccagaaagacaaatactgcagactcttgtgtattgacactgacagcttgcatgtagaatagtggtttccagtgggaagatggaaaaaaataactgaaaccacaactcagaaagaataagtttcagtgtttttggaacctagtggtaactgtcgttcagagtgatgcagtctgtagatgatgaagctcctgaagagaggaccacaaaggctttcaataataaatgataaagaggcgggaatattgattaccctgctttggtcagtacataccaaatatcaaactgaactccactgatatgcatagtgactgtcttttaaaaggaaaggatgctcatatatttaagtaaagtagaacaaagcactaggaagatacgatagccagtaaagtgcttgccatgcgagcaggaggcaactttagtctccataccccacagaagctgggcatggtggtgcacacctttaatacatcaggctagcctgaagttccagcccagtgagagaccaagtgtcagaagaacaggaaaatattgggtggatactcctgaggaacaacacctgagatggacctctggcctcctgcagataggtacccatgtgtccacccacatatacacactcacacatgcatgtctacatacacaaaagaagagaaaaaacccacaagactatagtaaaaactatattacagagtatgctgtattgtgttggtcaaggccagccaaaattctaggccctaggatagacccatatccttataagatgcagcaggggacttacatggggagaaaagtagtgcctatttttggagactgcttcaggcccaagtagccgaacaagcatacacacagcagttagaatgatcacacacctgccttggagtttacatctgagaaaccatcctgaaagtgcacttggccaggcaggaagcactccctgagagcatgagctcattttcactgctgtaccatacatgcttctttaaatcaggatgggaggaaagcagaagttctaatgggaagagttcttagtattggtagttacagtgacaaaactatggagtaaaaagccacattgctaagtcagagagaagagttcaacctaacccatgcagggcagcagttagtaccttaagcagttgagaatggaatcatacagttgtctgcttacaaggtcagaaggaagaccacttggattcttaatgatttttttgttaagctgttaagaatcggtgattgtcatactgcttccatttggcaggtgagttgtcacatgttctgtgttaataagcgtaaaccttgcacatctcagaagccagctacagacggagagttcaggcttaggtttgactccttcatggtcatgcctcatccagagaagtgagagattacattgtaaggtgagagtgagcgtgaagattagggactcactgccacttgatactattgcagtggaattcgatgcagtagttcacacatttcatttgggttgcataatagtttggtactttgcactctattaaagtagatgaaccgagccagtgagatagcttagtgggtaaagaagtttgcagccaatcctgacttctatacccagcatccatcttatataaaaatgggatgataaataagtaatctaaattgttagcatcaattgctcctaaaaggggggggtaataaaggcatatcattactagttattgctgcagattttatgccaataccaatttgtttatttgtttgtttgtttgttttaaattcccacagggaaaacagaaatggtttatgaagcagagcacagaagaatccactattggaagaaagctttcagatcataagttaaacagcacaccggatgctgactggctccaactcaagccccttgctggtatcaaactattccaatgaaaaacctaaaattgaaaagttgttcctatacaatgtgtttgaaatttcttttctttgtggttttcctactgtgatcctcctttaatgtgagtgtgtcttgtaattacaattctgttcatgcaatggaaccaggtatattaggagcaaggcaaacttgccgcttccttttgaaaaaatacgtgagagaagtgaaacaagggtcaggcctggtggcgctcacctgtaatctcagcatctggaaggctagggcaggaagatcttcagttcaaggcctgcctaagttacttagcaagagccctctgtttcagtgtctcaaaaagaagaaataaaatgcaaagccactctgtatcaaaactagaccaacccacagaattcagcagtcttctgtgtcagtgttagaactctccgccctctgcctcagttttcccagtactgggattgcaggtatgcattaccacgttcagtgagcggtactcttcttgacagggtgcagtttcctttatccgtaattgggtatagaaggaaaatgaaaagttgcctctgtaattaaagaagaatagcttgcccttgtatttacaatccacatgttatctaacagaacaaggtggctcagacagttaagattttcttactctataccttcagcttgcatttgagtttctctttctcctccatgtgtcagtggttctcagcatagatggcagccttccctagctgtccaactctcccaaaagacaattgggagttatcccggtctctgtcataaaacaaatagttctggaaaataatctttttaaaatgacttaccagctgtggccagaacattccaatgaagacctctgaatagtatattgttggtggagcacatgtgtagagaactttgccatcagctgacttgggcaagtaatttaaattttagctgatgggctttagaaaaattattctaatggattgagttttaaaatgcataagggaaatatattcatttaagcggtgttgacctcactgctgtcctgcccagggttagattagcacttgctagatcagcatatcctttattctgatgtaggaacggatgactcggtagtctctgaagaccggcttaatgagactgaactgacggatttagaagcccaacaagaatcccctcctaaaaattacctgggtgtggaggaagagaaaatcatggaccattctcacagtgatggactgcacaccattcatgagcacgaggtccacgtgacctcacataaccaccatgatgaggataaagcagtgctgaggaagcacagccaccagtggcaccacagacacgcccatcattctcacgggccctgccactccggctcagacctgaaggaaacaggaatagccaatatagcctggatggtgatcatgggtgacggcatccacaacttcagtgacggcctcgccattggtaagtgtcctggagcttgggttacaatgtatcctttaagcatattttcccattcctactaagttcctactaaccttacaagctacaatctatacggttaaaatttacctacaagttttgaatgtccagctgtatattattactgccatttctattttctctgaaagatatggtatttgaaagtttaaaaaaaaatgaaattttagtactttttagttctattgaagcaaagtcagattactgaaactgctattttaacataatcgaactcatagacacccctataagagtccagtataatttcagtcttgaatttaataaaattttcacagcttttgaaaagtttcacattaaagcccacaataacaaattgacatacatgtatgaactatacatgccgttgctggaatataaactaatgactaatttagaacattaactgtcaccagggcatgattctctttgggatctttcccccccccgccccccccgggcccctgcccccatgaccggatttctctgtgtagctcactttgtagaccaggctggctttgaactcagaaatccacctgcctccgcctcccaagtgctgggatcagaggcatgcaccaccactgcccggctttgggaatctagattttattagtcagaaataagctttggtttccttcagaaagcaaaggctgtatttttttttataatcatagtagttactgatactaaagcatactgacatctgctagtgggatgagaccttacacccccagtgtatgttgagaagccatgatgtataagtggggtgagtcaagtacagttgaagttcctgcagatagaaggagcatctcactgacagtggaggaagcgggaggcctgaggctcactcactcactgagccctgtgttcatcatcctctccaggggcagctttcagcgcggggctgactggaggcatcagcacatccatagccgtcttctgtcatgaactgccacatgaattaggtatgagcctcaaaagtcttactgcctttcatcaaatctaggcttccttcagttgtaaaatgtatgaaactgcggagatgctaagacagaaaatctgctgacaggtgcagagtgccatctatggccaggcatatcccaatataagactaaaagtaactgcttcttgtgtggaagtatcagcgcctgtgtgctttttactgctgtaacagtggtactgttaaaaaggatcatacaggggctggagagatggctcagtggttaagagcactgactgctgctcttcctaagttcctgagttcaaatctcagcaaccacatggtggctcacaagcatctgtaacgagatctgatgccctcttctggtctggtgtgtctgaagacagctacagtgtgcttacatataataaataaataaattataaataaataaattgggccggagcgagtagacggagtgagaaggagaaaaaaaaaaaagaaggatcatatataatgactaggttggcaatcataaattaaaaggaaatatttctccaatgcctgattgtggtgttaacccttttttattttatttcatgtgccatatacgttttattttcttaaaggaacagggtaaagttttctattacataattgaaaattgaaccagaggaacctaagacagttatttcatcacagatgatggaaagatcacactgttgtccagacactaaatagaatgttgtttaaagagacttgggtgtgtggatggttattatagcaactggaaaatagtttctgactgtcactctttaaagaccactgaggttttggaataatcattaacttctagtcgtttcttttttttaaaccatcagctttgatgtttgcacaatcttgtgggcacgggtgcgtgcctgtgtgtgtgtgtgtgagtcttacatgattttaataaagtaggaccctcaaaatgctttcagggtctttctctctctctctttttaacattttcttgctcatgattgtatatatgatgatctcaatatccaaactgttttgtgcaggttcttattttcctactcatttcaatttccctgtcattattgataatgatgtcttctgtttattttataattgttattaaatgttacagtgagaggtttggggatttgttttgtgttggtgagataggatctaccatataacccttgcagctctggaacttgctagggagacaaggctgctctgtgtcagcagtcagctttgccttgacctcccaagggttgggattagaggtgtataccactatgcttgacccaaacgccctctgatgctaagcagtgtgtttagcaggaaagcaatcacatttgataaatgaatcatgttattaggactcagctcagataagctgtgcattttccaatccccctcaagtacagcagagattaaacttaagttctctgtaacatgcttaattgtctaaggagttgtctaaggaaagttgtccattcactatttagatctatacagagttttatcttagtctttattcatttttgacatgtagatggtttgctgtatgcatttctgtgcactatgcacatacctagtccccaaggaggtcagacgacgttttcagatcctctggctctagaagtacagatggttgtgaaccaccttgtgagttctgtgaatcaaacccaagtactctggaagagcatgcagtcttcttaactactaagctctttcactaacccgtataatttttaaatatacaatggtaaagaatatcaaaattaactcttttaaaaatcacagtaattattgttagtaaccatattattggatcacactcattaacagctttggcaggcactctccatttgttgtgctaagaaatgttgtgagaagaaaagaatactgatatatatatatatgatgtattttatttttcaacagaggtacaaagaaaattccacacaggtaggcttcagcaaatggtacttcagtgtgggatgttcaaaagtagaagctgtcagagtctgtgactcacaccccacaccatgaatcaaaattaactcaaaacaaaccattaatccacacagtctgggatagtaaattcctagttgtgtcttcttaggcacattactaaaaatataatccatcaagaaaataaaatagatgactccagacacatttacaatgtaacaagacattgttttagagagtggggaaaatttttataaaaagccattaggaccatagtatttaagtcttcttaggttagtgataggaaactctctagacacccccccccaaaaaaaaaaatcacacaaaaaccttgaatagacatttactaaagaagataaaacttggtatctaaatgtgaaatttcagttcctgggtttgttatatgttgtccaggatgtgaacaactatagtcttattatatttgatgggaatggaatttcttacaaaatagaaatataatgaataaactggctttattgaagagaaaggaaaagttgagctgatacaaaagcctgtttactgtatacagtgatttcataattgccccaaatgatacttaagctaaatgttcttcagctggtaaataaagtgtgatacatctgtgggctgaagagtgctgagtaatacaatgtaatttcctgacatagagtgctgagggttagtcttatttgcattatggtaagtgataaaaatccagatacaagggctggagagatggctcagtggttaagagccctcactgctttatgaaggtcctgagacaaatgccagcaaccacatgggggctcacaagcatccataatgagatctgatgccctcttctggggtgtctgaagacagctacagtgtacttacatataattaattaataaacaaacaaacaaatcttttaaaaaaaaaaaaagacccaaacaatgcatattgtctgacttttcatacaaaattttggaaaattcatacaaaattctgtggaaaacacacaaaaaagcaacacaaaacaatttgtttgctgtgttagtggtaaagggcccaggggattggagagcatgtgaagtagtagagtttcttagtagttgtgattacatggtatgtgtgttggcaaagatctataggggtctaagaagaaaagaggagcagcttttgcgagtcatacttttatgaagcagagctagagttcataaaaagaaagttttaattaaattacggacaggctccgttgagagaaagaccccaagagacctacacagaacacatgtgtgcatgctttaagaaaatgacagttgtacccaccactggaaggacagaggccactatatcttatttttgtaggaactaaataataattccttctgaagggtccaaagttcaaggccagcttgggttgcacgaggttctgccttggcaaacacctttgggattctgattggttaattcatcctcctactttctcaagaatgaagtagatcatcccgctctcctccttgtcgtagcaggaaagactgggcgtttgatgcagttccacagtttgtccgtcaccagtgctcattaaggattcaatcgtgctcctttccctcagaatcgcatttctgaaactataaaggaaacaatgtgcttcaaaacaacctacaggagatgccagcaatttcattttactcagctccctactaaaaggtccccctttaatttagcgcaattggttcagcatgaattactgcaagtacaaaggagaaatgaatggagaagtcagtgaggtagctccttccatacaggaacctagagaaggctggacaaataaagcagactccagggaagaatggagagaaacagcctgcacagggctctgcaagaggattgggaagcagttgtcctagcgaattttatgtcaccttgatacaagctgtggtccagagagaactaggactgagaaaatgcctccaagagaactggaaactgggcattttctttcttaagtttcttgtcttttttaaagacaggatttccctggttagtcctgtcctgaaactagctctgtagaacaggctggcctcaaactcagagatctgctcccctcagatataggaggaccctgtccattgtgggtggtaccaaccctgggcatgtggtccctaacttccacgcatgccacacgcagcaaggtacagtaagcagcactcttctctgagtcagctcttgcctgcaggttatacccacctccctattttgagttcccaccttggcttctctctgtagactgtgactctcatgtgtaagccagacaccctttccttcccaagttgcttttggtcatgttaccctaagttacagcagcaggaaccctaggagaaaggagggaaaggaataaggggacgagtattaaatagaaactagagaatggcaatgttgaagactttggaagagcttctaattttcaaataaatataataattgaaagatagtgctgtttgtagctgatagcagtttattggaatatggagaagtaatactttgaaacagttttactgttgttaacttcttacttgctgtaaatgaaaactttgtagccgtgagagtttctttaagaacagagccctatcagtcatctacataacacttgcatataccgtttattgtttggttggaggcttggatattcaataactagaacaaagaacactgttacagtaagtgaaggtagaccttgggtctctcagcttgaagactctgtccagcagcatttgtatccctctgagtaactgcttttcccagtgttctgttagatgaagagaaaatggctttctttttggtttctttcttcttgttgctgtctgttaaacagccccagggttcctcctcctgtgccctcgggtctgctccccttccagcagtgtgctgctctgcacagctgggtggagcagtcccataaacatgatgaagaggaaggggaaagctcttttctctccttacattttgtttttttgttttttgtttttttttttctaattaaggttttattgttatttcttggggaaaaaaactagtgcatatgtagcataaaatatatataagaaactattactactcttctaactttgctcatttcctactgaagagcagaaatgaactttgagttgttacttttaaaagggcataggtatatttattctctccttccattttgtcttggttttagtttgttttttgcttttttaagacaggctttctctttgtagccctagcagtgttggaattcagtctatcgaccaggtggcctcaaacacaattaagccaggtgtagtgtcaagattaaaaatgtgtgacactacacctggcttaattggcttggtatgtacaattgcttggctctccatgttatgtaattgtaccacatacaggatgtagaacaattctatcacccctatagcttttgctctactgttaatgctgtgtctttataatgcattcttaatttttaaaaaagtttttgtccactcaaagttatgctttcaaatcctgtgcttttaaaaataacttctcccatgatatctgaattgcaggtgattttgcagttcttctaaaagcaggcatgaccgtaaagcaagcaattgtgtacaatctgctctctgccatgatggcttacataggaatgctcataggcacggcagtcggtcagtatgccaacaacatcacactctggatcttcgcaatcactgccggcatgttcctctatgtggccttggtggatatggtaagatgctttagatgacttctctgttgtactgaacttgcaaatagaatacagccttcaaaaatggaagacatatttggaagtggttggaaactgcagtgtatttttaaggaatatggccaattttaaagactgacatctaaataacaattagaaaaaccatttaccttagaatttcctggagcagctgaaaatttctaaccgattgtgtcacaagtcaactaatagtaggatttagagatacaattacagaataattagactcattgctttattgccaagaagaaagcagacctcctatgtgcattctagtctgtaaagttactaacagcagcagttggtcgtttccattttacaccagtacttcacatggtagacagtgtttctgtggggctgccagtttctgtaggtttcatttttacattttaagtagataatacttttacctttctccctggcaaaactttcaggtccaagaacagcatccctaagttcctacattgacttgccaggctttcaccatcttgtcgactctgtgctctgtcacttcctctctgtgtcacagatcacctttcttgaggggagaaactcctgcttcttgcagacccttcatgctttgcctcctcatttcttaggcagcacatctgcactcctcgggtgtggaacccactaattcctgctgagctttctgtccttggcacttgtgtcttgatctattgataacttaccaactgtttgactttatttctcaagtttagtgcttctcccacaaagagatggttctagtgggacagacattattgtcatcattattagttgtcatctgccactggaaatgcagttcacagccactaggatgctagcgatcagaagaaatattttacagtaagaatttgtggtttttttttttttttaaccaccatttttatttattccttgataattttatgcaatatattctgaactccttccctagctccaccaagacccttccccaacttaggtcaaggtctacattacatttgcaactgctaaaaaagctgactgaaaagagaattagggaacttgttttgttttgttttttaataataggaactctgggctttgttttaaagactgtggaagagtttatgtacacactgtcaggtacagtacgtaaactgtgaattatagaaaaccttgacagggctacagagtagaaagcatgaccacatctttattttagctacactgccttgactataagaaagattacttacccaaagccagtagaaggcattcaggtaggtattggcaatacacaggtattggctttacttcacgttcctaaaggagcctctgtggaaatgcctgtttggggaactttgggtagtgctatttagcaaccactatggaaataattctctttccttctttgtgtgtgtgtatgagtgtgagtgtgtgcatgtgtgtgttacagatagccataccaaacagaggtccttaggaataccagtcaggctgtatcctggagcccatctttgtaaacagtcatagtgctgtgtaccaggagcccctgatcagctctttgctgggttatgaccgttgaggtgacattcaggtaaaacttttaaatggcagagacccagcattgtttcagtcttgctgccaacaggaatccagagggcatgtttgtgaaacatgtatgttgtttatgcttcaatattacggggagtcagaaggaaaagtttttgttacagtaaaaacctagggaaaggaagaaaaagcagtgcaataataataataggcttactaggactggatatctgaagttgccagtctgtaagcctttcagattttaagtgtctttgttaaggtgtgtttctcctttcagcttccagaaatgctgcatggagatggtgaccatgaggagcatggcttctgtccagttgggcagttcattcttcagaatttaggactgctgtttggattcgccatcatgctggttattgccctctatgaagacaaaattgtgtttgacatccagttctgaccattcccagcatctctgttgattgcgagaatgctcgtgcagcttgcctctgttccttgtactgtatgcacgtcgctcagagaatccagtggcctgcactatttacaggttctgtagatttgagcctaaccacgaaagactggtgttcagtactgttttctctgcatgaatgggtcttttaaaagtttgcgataaagtcagaacatggaactccgtgtaccaatattgatagaagtttaagagaatcatataaaacactagtctttttattagtagaaacttctgttgctatgcagaaatagaaattaaaccaaaaaaatcatttaaactttaaaaatattttaaatggacattgagcagacatttttgcgtgtgtgctatgaatgattttagtgccctctattcagctaaatacatacatatgggattaatagggatcaacttgacacaactttgaaactgtataaagttgattttaggaactagagggaagcccaggctgcactagagtatggatttagcattggggaaagcccttattcttgaatctagagttactatttttgtatatatttgcatagtgttcaaacttgcagcctaaactactgaaatttgtgattgtatgtttgtgtgaacttcagtttaatgaaagattcataatggttctttgcatactatacttggtgttggatttttctttttaactttgtttttatggggggggtgagtcagaggatgtagtcagatacctttttcttaacattactgctctagaaaaatatcaaacaaatggcattccatttccctagtactaactaggttaattggaaattttaagttctgggtgttcatgttattttaccagtttggcatttggaactcggagcacatgctgtggctggtagtaaaagccaagtttgccatgcctatagtctgtatatagaatgtcagctaaatgcttactgcactggtaccatagctactttggtaccaagtatatgactaagccaaaatcacttctatcattttgtgccaagatacactgctggtgcctgaaatggagcggtcagtgtttgggtgcctgctcttacaccactggggcagtgatgtgtgagaagtctaagtcacgtttcgtctgattgtgactcataacttgtagactagtcatgtgcatacagctgtttacatcccatgccacccactcttcatttatacaggcaaatgtctgaaccgtgtgcagctagctctattttaactgcttggcagccaggatatcccttgggaaaaaccacataagagccaaaccctggcctttccattttaaatatttttattcagtcccttctctggttcttttcctcttactctgattttccttttaagacaaaaacaaaaatttgagggcaacacatgcgaccaggtgtcagaggtcaatctccaatatttctttgatatgttataagcaagggttatttggtcttacagcagttgtctctttctcagccctccttgcagtaagtggttttgcacacaagttttcagcactgggcatgcctacgacagtcattacttcacctcattgcttggccctttgagcaaccttgctaaaaggtgctggtgtgctcagtgctgtcaacttcaagtgactgggatattttgctttcaaaaccaagatacacttatccttcagttttgagtttgattttcaaggagggttgtgcattccagcattacatctccttcatttcaaacaactgcgggaatatactcccactctaaaatgcttcacaaagctgttatgcctacaatatacaaagttttatattctcaaacaaatggtattatctttatttgctagattttcttagtcatttcagggggctttaacagttgctgctagtattttgatagtgttccaccagtatttagtttttacatcattctagtgtatagtttcaggtctcattagacaatcctaattccactacatttctgtttgactccaacattccacttagcttgactagcctaattttaacatgcttgttggaggtcaccaatattacttgtatgatgctgtcaccatgtgacatccataaagattttggtgtataccacattgcattcaaccagctgtgattatgcttagaaatactatagtaactagatgcagtgtgaaccttttccattaacagtaagtcagtggcttcaatgtgattatggtcctgcaaggtgatacttgctaaaatatctaaacatttttgttgttgtgactgaatcatttttttttaaatttataaagctggaagtgatgaaatgctgttttttcattgtcaacagtggtgtgtcattttatatatgttcctaatgcttacggaactctcccaaaataaagttattcagaaagtgtgtggtgtgttttcattgtctgtctcataacactgaatcttcattggtactttaaagaggccagaataaagtcataattaagaacattaagtttatttaagccaaagcaaaatttaaacggtaaaatgtgttttattcagtctaacaagaagttgcaagagatgatgccaccttcagattatgagtttagttgacacagcagtgccacaccccgtccaatccagtgttccttgggttggtcagagggaagaatcatggcaatcacgaaatttgtagagtggccagtggtggagagtgtgcccctcctctcgcttgtcttatacagtggagcaacataacttggtcgtttggatatgtctgactttttgcatggctttagccacatctggaagaaagcacaaacacctctaagtcagagccattaaccatcatgtactttagctactgtgatagttccagagtaaggttatgtctaaaacctatgccctacatagattgtattttttgtcaacagtgaaatgattgttcgaatataaagatgcctaactatctcagaaccagtatacaaagagaaaacagtttgcctctgttagaagtatagtgcccactcgtgtatgctttcgatattatttggtttaattggactagccttggaaatgttaccatttttactctttttctacaaagaaagtattcttagtaaacttaattataacccatacttagtagtggtttcttaacaggttgtatgcaaaatgtttttacagtgaacagttactttatacaatactgcattgtgccataataaagactaattgcttaaaagcatattacccaactgttcatcacctcttccctgggggttatttctggtgcttttagtaacaacaaaattctatatatttaccaaagagagatgctactatttatactcagaatcatatgacttatttatttaaaaccaatacattctggcaacagttattttatttgaatcacctccccattgtggatggataatatgcatatgtgctgtgtttaacaactgtgaaccaggcaagggggttcaatagaggcacctagcaatttacctgctcctctacaagaactaaaccaagcctgaatagttgaatgactttgggaaaacacttgaattcagttatcaggatacaaaaacattgtagaatgcagacctgggacagcagcaagtcaagagaaacttcccacctgccacccagtttcatagctttgggaggggctcacttccagcaaatgtcctgtacatacactgtgaagttacccagtacttccaagtgtacagcctaagagataaggcctgcctgaattcagtccatataggttgacttcacccctccagcagatctctaaggtactatagtcagtagtcaccctaagaagaggcctgactgactggattgttctaagggtcagacaccttcacacagtctcatcttaaactttgcagcctttctctaccatcctggcttagcaagagatgtgctcaacaggctgagattactactacatggtgatgaacaggtgcaatgtagagggagccaaaggtgccctccacaagaacctgggtataaatgagcctgcctgtgataggatccctggtgtcacatgattcctcaaagcaagtataagaaatattccaccgcctccagcctatattgtgtctgccaacaccccccctccctggctgtaggcctgccccagaagcattgtcctggcaagtctcaacaaacaagtcagagctacaatggcagttcaaatgaaatggagagaataatgtacctacagcagccctcagtgtacatagccaagagtatagctaagaactgtcaaacacatatccctgctgtccttccggggagagccctgggagaggggttttgcctgaccttggccatgacctactgacactcaattattggtgctattgccatcacacattatatctattacatatatacataatagtatttcatattactgttgctagaacaatctggaagaaaagctccaggagccacagaaatacttcatcagtccccaggaatgcacaggcagggacctacctgtagtagtagatagctactgggtagacatacccaaagtagtagcaaaaaaataaactaccccactgcacctgtcctgggcccctgcatcagttgcctcacttacttggtcacacactgctcacaaggaaaggtgagtactacagggggtgggaggaattctgactcgtgttgctccctgtgaagcaactgtacttgtagagtgtcaaatcaagagtgcttagacccttcactgttgttgagcagccaagactagagcccattcaaaaagcagccagtatcaacagtacctgagaagccccaccactggatgaaaaccagtattcccattaccagaggagctatataggagcactctcctacctacttcattaatgcctaaactgttagtgtccctctcatgggttatccatagacagatgatctgtctctcttgaaagtatgtgctctgccaaaacttaataactacagtcaaaaaagctacaaggacattgtaacattgaactgcaatacacagtggaaagtgaattcagcaaagcatagtgaactaacaccctgatacacatctttaaaagaaagtcatattctaagaagtctatctcatataagagacaatccacctcactagatgcacagatttcaacatatacacaagaaacttcaaatagtttaaaataataatctcctaaaaaataactccctagtgacagattccaaagatactgaggttgatgaaatacctgatagattctaaagaatggttgtgggaaagcttagtgataagtctggggctaggggtggggtttaggaaaattggtatagtgttttcttagcatgcacaaagccctgggttcaattctcaataccacacaaagccaggcatggtggcaatagacctgtaacatttggacgatggaggtaggatgctcaggaattcaaggtcaccctcagcatggagttcaagttcagcttgagctgtatggaaccctgtatcatgcaaagaaaatctcaatgacaaatgagattcaagaagacacacagacacacacacacaaattaggaagacaatacagatatgaatgaggaactatcaaacacagaaagaaagattgctgtgagttcaaggccagcctgggctacatagtgagagtctctcttgaaagtcaaagaaaatgtaggtgcaagtctccaaatctcccggaggtcatgagttcaaatcccagcaaccacatggtggctcacaactatccgtaatgagaaacaaaaacaacaacaacaacaagaaaaactatgggccagagcgagcagagacccagagctagtgggagaaagggaagagagaaaaatggaaaaaaaaaaaagaaaaagaaaaaagagagatcatggcagaatgaaaagactaccgctctttgtagcactagtaaaatgtcaaatgtctgcataattgacatacttgaaggaaaaaaagactaaagacagagaaaaatcagttccatagaataagagcagatgtatttacagatgggaggtcttagattctgacattgcacattacacattacagtcaacatgcaaaagtacagtacaaagtaggtatggggcagggcatgtgttatgtattcatatatgcatgcccagaggtgtcaaaggatgtgagacatcttcctctctcatgttctaacctggcttttgaaacaaaatctgtcgtttgactttgaagctcagtgatggctgaccagcaagctctaggatctgtctgtctccatctcctaacatggttgcaggtgtgtgctgtgcctgtggctatgtgaacttgggttttcttgctatctatcacagcttacccatgaagccatctcatctcccagagatagttttaaaactttcaagagggaaagcaccaaatcacactgaagggcagccctggtggacacctacaagttctcagcagaaaccctacagaccaggacatgggataacatatttgagtttggaaagaaaatgattgctactcaagctacctatatccagcaaagctctcctgtagaattatcagaacacagtccaagggtggagtcctgtaagaagaattctgaggccttgtgaaaaaaaaactccaagtaaataagacaagaattgttatttgtttatatgcctctacaggtaaacatgtttttgccatgttgggcttgcccttgtgattgtaaactttactagtgtgactcttcttaaccctcagagtataaattgtctgatgctctgaataaagttgtctgttgcataagattttagtccacctcatttatcagctccattctcctcctggtcccactaccactagagcagtaaacaagaatgaagatcttccaaaaagatcttccaagataaataaaaactaaacaccatttataaccacaaaaccaaccttactaaagatgcttttaagagaactccatatccagaagtaaacaaacagaaactatcatcatgagcacattaagtataagttccacagaaagagtaggtacacagtgagaaagctaaaacaacaaagttatggatacaatcaaaccacagagataaatataaattaggcaacacgaattaatgctctaaacagaagaaaacagaaaacatgaaaggcataccataccttacataacttggaatgaccatgcccttaattcttcagttaattgatacaaaattttagatggattaaaaagcagacccaaagtacactgcccacaagaaactcagctcaaccacaaagacacacagactggaatgaaagagtggaacatgatatcccaaacaaatggaatccaaatccaagaatgagtagttacatataacaaagtagactttaagtctaagaaaataagaagagacaaagatcactgcataacaatcaaagaaacaattcatcaagaagatatattgtttataaatatttatgcatgtgatatcagttatcaattttataaaacaatgcttctagataaaaatggagaatgggctccaatataacaatagcaggggatgtcagtacctcatgcccaccaatgaatagtcatccaaaagatgcatctacacagaaagatcaaagttaatccacatggtaggtaaatggattctttacttacagtacattgcacccaaacactctagagatatgaaaggccacgcgatgtgcatctgtgtagtgctactactcagcttttttgctcccatcaaatttagtgcacagcaatcaattatgtcatcactttacctgtactggctagttttgtgtcaacttgacacagctggagttatcacagagaaaggagcttcagttgaggaaatgcctccatgagatccaactgtaaggcattttctcaattagtgatcaagggggaaaggccccttgtgggtgggatcatctctgggctggtcccacccacaagggttctataagagagcagactgagcaagccaggggaagcaagccagtaaagaacatccctcatggcctcttcaccagctcctgcttcctgacctgtctgagttccagtcctgacttcttttgctgatgaacagcaatgtggaagaataagctaaataaatcctttcctccccaacttgcttctcggtcatgatgtttgtgcaggaatgggaaccctgactaagacacttactcctgttccccctagcttttaattacaccttcgtctttgttctttcatttcctctttatgtttcttttctatttttaaagtccttgatgatttaatacactgtatactgagtttggtatttatgcccctccactcccctccagtgccccttctcatctctctgcactttcctctggtgaagcttttctttccaaccagcccctcctcctatatgttcatactttgcaacctactgagtttgtagttgattatatgagcatgagtaggaaatcactgagaaaggggcaacttatcagtggctacaccactgaaaagaaagactctccctgagccatttattgctgtctcaagtacctgagctcaagtgatcaggaattctaacttaaaatttttcttcacttttgtatattgttagggagtgctttcttctctcttcttttcatgtgtgttatatatttgtccaataattattcacatatgtgtgggtacacatgtatgtacagggacatatgtgtctctgtgtgtgtttatgcctgagattaatgtctagaatctcaattacaacttcagtttattttctgagatgggatctgccagtcaaacacagagtttactgatatactgctgttaattcttcatggaactagaaacatcctattcccttgggagcccagatgacccagaatagccaatgaaacctgaagcaaaaggagcaagtctgcagtctcccaattcacatttgggaggaatgctccaaaagcacgctaaggaaagcatcatggtgtttacatacagatggcacagcccatgaaaacagaatggaaaacccaaagaggtacccattcctgtgctgccaactaacctgaccaaagtatcaaactgtatctcaaagaaagacagcttcttcagaaagaccattttttatattattattgtattattttttattagatatttttctttatatacatttcaaatttcaaatgctgtcccgaaagttccccataccctccccccacccactccccaacccacccactcccatttcttgaccctggcattcccctgtactgaggcatataaagtttgcaagaccaatgggcctctcttcccagtgatggccgactaggccatcttctgacacatatgcagctagagacacgagctccgggaggtactggttagttcatactgatgttccacctatagggttgcagatccctttagctccttgggtactttctctaactcctccattgggggccctgtgatccatccaatagctgactgtgagcatccacttctgtgtttgctaggccccggcatagcctcacaagagtcagctatatcatggtcctttcaggaaaatcttgctggcgtacgcaatggtgtcagcgtttggaggctgattatgggatggatccccgggtatggcagtctctagatggtccatcctttcgtctcaggtccaaactttgtcttggtaactccttccatgggtgttttgttcctaactctaagaaggggcaaagtgtccacactttggtcttcgttcttcttgagtttcatgtgttttgcaaattgtatcttatatcttgggtattctaagtagaaagagcattttcttaacataagttagtgcagtctctataaaatagtagaggtttcacaaaagaagtaaaataggctgattatgggataccatacccggggatccatctcataatcagcctccaaacgctgacaccattgtgaacgccagcaagattttgctgaaaggaccctgatatagctgattcttgtgaggctatgccggggaaagggaaccagagcagaagagaagcagatggacatgtcaaagcacaacgtatagatgtatggacatatcatagtgaatcctattttctgcatgatgtgtgctattgattacaattttcccccagccaagttattaaagcagtgtgtaacacataattttctaacttacataaaaatataacatagttccattcttcttttagttacaatacaccacatttttttagtcatttaagcaagtttctagaatattacccatataatttattgtagaatatggccagtctttagaacaagatttaaaagccagctggcctttgacttatgaaggcaaagagcaaactaaaaccataagcatcttttagggtttgaccaaattaatttatctcatagtaatgagtagtcctttggggttcttaggtcaaacacaaccacatgaaggagccagtgactaagacccaggggtatccattcctcccaggtcactgtaggacccttgttgtgggggatggacaagctgtagcttaacagcaatataactctcaaaaacactttcaacttaaacttaaatgaacaatgcacttcactttaagcaaagaatggatttcactcattagaatttctattcctcactgacttctttgttgaagaagaattatccctttgtagatgtactcccgccttctgttccctgcaagctaattgaggatgtcctcagaaaggaaaggaattgtaacccagccagctcctgaaatggcaaatgtttgtttcacttttggggtctcctatcctaagccttctctgcccagagcatcatggtatgtagaaaagaggatctttctaggtttggactagcccctccctttatggctgctatgatgagttttcacctgtctttaagcttctcacagaattctataatccatgtgactctaatagtctttgttttatcttaccatcctggatgtgcccttcggattatataaaaatatattttgtcatgatgtagttacacacagaaacaattatatggcattgctcctcaccattcattaattcttcatttcatgaaacatcaaaattaattcctcattctataatcaaccctggcactgtgtttacagttattaactaacatggaatttgagttgtctttatcccacaaccacatgtctatagctggaccatgggaaatcctacttccgtattttcagctcttttaactataaacaactgtacttttcatggtctattttgtgctcagttgttaacattccttgctttgttggcattccattgtttaaaataacttacaggccagaggctgcagcacaggccagtgttgctatgtgcaagaaggctgagggatgagcttaatccagcgagagtcacagtgctactgactgtgagataatgtatactaaataagttttctttaaacagaaacagtacatcggtatgtaacaatcaactaacagaaatgcagataccatagaaactaaattcataagctcattaagagcaaataaatccagtagtgcagcattgggaacagctttatagagcaaagttaccatgaacaacaagaacagattgaatgtgcatatatccatatccgtgcacacgtgcatgtaacccttagtaaatactaaccacggggactgtgtcatacagaactttaggatgtgattctgcaagtttcttggtcttcctgtcccaggaagctccatccaaaaacaatccatgaatgtaaacacctaaataacaaagaaagaagttagcattcaaaaatgataggtgactgagcccagcatctgagattcctgtctggggagagcaggctgacatagtgccagccatagcttctcaggttctcttcctctctacctccccttccacaatccatacagtaaattactgagtcctcctagatgtaactagcaattcagataataagaactgtgggtaatacccttggaatcaccgacactaaacagtaaataaactgccagtggcttcctcaattccctgtgacatttagttatcaatttacttatttatctgtggagacaaggtttcaagggagtctcacaggctgtaagcgttcaatacccctgtctcagattcctaagtgctagtgtttcatgtctttcaacacactggacaccacttagctcttagaaaacagggcaagcctgacttgtaaggccagagaactggaagcagacacacattaaagtatacaaaaagagaaaggtggaggttgtggggaaactcagatggtgtctgtgagccctctctccaagggtcccattgagaaaggaatttctttaggaaaatcctaactttctcatttttgttcaagtaattgatgaagtaagatgaaataagcatttttttcctggcaaaaaaatgtacaagtatgtttgtgtgcatataaaataaaattaataatttaacaaacatctgtcctcaatgatactactccgggtggacacactgaaatttagtaaagtggtttgcttagctgaaggccactcagctaagctcattactgagcaattttgatataccaagtcatctatactaatcattcgataaatcctgtttcatgtgctactcaaccactctcaaaataatgctggagttttagtgcctgaaaacctgcttcctgaggtaacacatagatgcagactggtaaaaaggaaaacaaagaagtctgtctaatctctatgctcgatgcatacaattccacaggttgagtatgggcaatttaactactttaaaaactttatgcaatgctttcataacttaaacattttagctgggtctaaaaattgtatagggtcatcacttccactgggatgtcaatgggaatgctgatttttttttcctatgtcagaaggacactgagcaaagttaggagggataaagtcctgaatatggaagtaaccatagtttcatcaagacacttttcatgagaatgcattgttttcaaactccttcatgaagtcttgagcatggtaggctgggaaggaaacagttgtgcatgtggccagagggcctgctcctaatgctactgtgagcccttgggggaggtgtttagcctccctgagcccaagtgtctgcctatgtaataaagactgtggtgcctgttactatgaggattagacataaagggctgggcagtttctgtggcacagatgtgcaagagaacactaccaca

SEQ ID NO: 2 - DNA, 5748 bp, Mus musculus
gaaaagtagaaatgaaggtgcatatacacacaaagttttgcctcatctgtttactgacatttattttccatcattgcaaccactgccatgaagaccatgaccatggccctgaggagcttcacagacatcatcgtgggatgacagagtcagagtcaagcaaattttcagtgcaggatgctgaaaatgaaaaaaagtactatattgaaaaactttttgaccgttatggtgaaaatggaagattatcattttttggtctggagaaacttttaacaaacttgggccttggagagatcaaagtcgttgagattaatcacgaggaccttggccatgatcatgtttctcacttagacattctggcagtgcaagagggaaagcatttccattcgcatacccaccagcattttcacaatcatttaaatgcagaaaatcatactacaaccagtgtgacatcaaaaagaaaccacaaatgtgatccagagaaagaggcagctgaactgcccatcaaagctgatgataaacacctgcatgaccgcaatcaccgcttccatcatcgccatcgtttgcatcatcacctggatcacaacactactcgtcacgttcataatgactccgttgctcacagtgagcatggggagcccggtcacagcccttcaccagagaccaataaaacacaagagcagtctgaagtgaagtcagtgaaggtcaggaggaaagaaaaagggaagaggaagaaagaaaactcggaggttaatacaccaggtttcctccccaaccatgatcacagtgaacaatatgagcataaccgggttcacaaacttgaccgtgtacatagccctggccatcctcatgcgcatcttcctgagcacagtggtcatgagcttggccatggacaccaagaacttgatcctgataatgaaggtgaacttcgacatactagaaagcgagaagcaccacatgttagaaaaagtgcaatttattccacccctagccacaaagaccagagtgaagacgaccgccagcatgaatgtttgaacgtcactcagttgttaaaacactttggtcttggtccgaactctcccatctcaccggatctattcacgtacctttgccctgcattgctgtatcagatcgacagcagactttgtattgaacattttgacaaacttttagttgaagatttaaataaggataaaactctggttcctgaagataagacaaatataggggcatcggcgtggatctgtggcatcatatctatcaccgtcattagtctgctttccttgctgggtgtgattttggttcccatcatcaaccaaggatgcttcaaattccttctcacgttccttgttgcactagcagtaggaacaatgagtggagacgcccttctgcatctactgccccattctcagggtggacatgaccacagtcatcagcatacgcacggacatggtcattcacatgggcatgaatctaaggagtttttggaagaatatgatgctgtgttgaaaggacttgtggcgctaggaggcatttacttactgttcatcatagaacactgcattcgaatgtttaagcactacaagcaacaaagaggaaaacagaaatggtttatgaagcagagcacagaagaatccactattggaagaaagctttcagatcataagttaaacagcacaccggatgctgactggctccaactcaagccccttgctggaacggatgactcggtagtctctgaagaccggcttaatgagactgaactgacggatttagaagcccaacaagaatcccctcctaaaaattacctgggtgtggaggaagagaaaatcatggaccattctcacagtgatggactgcacaccattcatgagcacgaggtccacgtgacctcacataaccaccatgatgaggataaagcagtgctgaggaagcacagccaccagtggcaccacagacacgcccatcattctcacgggccctgccactccggctcagacctgaaggaaacaggaatagccaatatagcctggatggtgatcatgggtgacggcatccacaacttcagtgacggcctcgccattggggcagctttcagcgcggggctgactggaggcatcagcacatccatagccgtcttctgtcatgaactgccacatgaattaggtgattttgcagttcttctaaaagcaggcatgaccgtaaagcaagcaattgtgtacaatctgctctctgccatgatggcttacataggaatgctcataggcacggcagtcggtcagtatgccaacaacatcacactctggatcttcgcaatcactgccggcatgttcctctatgtggccttggtggatatgcttccagaaatgctgcatggagatggtgaccatgaggagcatggcttctgtccagttgggcagttcattcttcagaatttaggactgctgtttggattcgccatcatgctggttattgccctctatgaagacaaaattgtgtttgacatccagttctgaccattcccagcatctctgttgattgcgagaatgctcgtgcagcttgcctctgttccttgtactgtatgcacgtcgctcagagaatccagtggcctgcactatttacaggttctgtagatttgagcctaaccacgaaagactggtgttcagtactgttttctctgcatgaatgggtcttttaaaagtttgcgataaagtcagaacatggaactccgtgtaccaatattgatagaagtttaagagaatcatataaaacactagtctttttattagtagaaacttctgttgctatgcagaaatagaaattaaaccaaaaaaatcatttaaactttaaaaatattttaaatggacattgagcagacatttttgcgtgtgtgctatgaatgattttagtgccctctattcagctaaatacatacatatgggattaatagggatcaacttgacacaactttgaaactgtataaagttgattttaggaactagagggaagcccaggctgcactagagtatggatttagcattggggaaagcccttattcttgaatctagagttactatttttgtatatatttgcatagtgttcaaacttgcagcctaaactactgaaatttgtgattgtatgtttgtgtgaacttcagtttaatgaaagattcataatggttctttgcatactatacttggtgttggatttttctttttaactttgtttttatggggggggtgagtcagaggatgtagtcagatacctttttcttaacattactgctctagaaaaatatcaaacaaatggcattccatttccctagtactaactaggttaattggaaattttaagttctgggtgttcatgttattttaccagtttggcatttggaactcggagcacatgctgtggctggtagtaaaagccaagtttgccatgcctatagtctgtatatagaatgtcagctaaatgcttactgcactggtaccatagctactttggtaccaagtatatgactaagccaaaatcacttctatcattttgtgccaagatacactgctggtgcctgaaatggagcggtcagtgtttgggtgcctgctcttacaccactggggcagtgatgtgtgagaagtctaagtcacgtttcgtctgattgtgactcataacttgtagactagtcatgtgcatacagctgtttacatcccatgccacccactcttcatttatacaggcaaatgtctgaaccgtgtgcagctagctctattttaactgcttggcagccaggatatcccttgggaaaaaccacataagagccaaaccctggcctttccattttaaatatttttattcagtcccttctctggttcttttcctcttactctgattttccttttaagacaaaaacaaaaatttgagggcaacacatgcgaccaggtgtcagaggtcaatctccaatatttctttgatatgttataagcaagggttatttggtcttacagcagttgtctctttctcagccctccttgcagtaagtggttttgcacacaagttttcagcactgggcatgcctacgacagtcattacttcacctcattgcttggccctttgagcaaccttgctaaaaggtgctggtgtgctcagtgctgtcaacttcaagtgactgggatattttgctttcaaaaccaagatacacttatccttcagttttgagtttgattttcaaggagggttgtgcattccagcattacatctccttcatttcaaacaactgcgggaatatactcccactctaaaatgcttcacaaagctgttatgcctacaatatacaaagttttatattctcaaacaaatggtattatctttatttgctagattttcttagtcatttcagggggctttaacagttgctgctagtattttgatagtgttccaccagtatttagtttttacatcattctagtgtatagtttcaggtctcattagacaatcctaattccactacatttctgtttgactccaacattccacttagcttgactagcctaattttaacatgcttgttggaggtcaccaatattacttgtatgatgctgtcaccatgtgacatccataaagattttggtgtataccacattgcattcaaccagctgtgattatgcttagaaatactatagtaactagatgcagtgtgaaccttttccattaacagtaagtcagtggcttcaatgtgattatggtcctgcaaggtgatacttgctaaaatatctaaacatttttgttgttgtgactgaatcatttttttttaaatttataaagctggaagtgatgaaatgctgttttttcattgtcaacagtggtgtgtcattttatatatgttcctaatgcttacggaactctcccaaaataaagttattcagaaagtgtgtggtgtgttttcattgtctgtctcataacactgaatcttcattggtactttaaagaggccagaataaagtcataattaagaacattaagtttatttaagccaaagcaaaatttaaacggtaaaatgtgttttattcagtctaacaagaagttgcaagagatgatgccaccttcagattatgagtttagttgacacagcagtgccacaccccgtccaatccagtgttccttgggttggtcagagggaagaatcatggcaatcacgaaatttgtagagtggccagtggtggagagtgtgcccctcctctcgcttgtcttatacagtggagcaacataacttggtcgtttggatatgtctgactttttgcatggctttagccacatctggaagaaagcacaaacacctctaagtcagagccattaaccatcatgtactttagctactgtgatagttccagagtaaggttatgtctaaaacctatgccctacatagattgtattttttgtcaacagtgaaatgattgttcgaatataaagatgcctaactatctcagaaccagtatacaaagagaaaacagtttgcctctgttagaagtatagtgcccactcgtgtatgctttcgatattatttggtttaattggactagccttggaaatgttaccatttttactctttttctacaaagaaagtattcttagtaaacttaattataacccatacttagtagtggtttcttaacaggttgtatgcaaaatgtttttacagtgaacagttactttatacaatactgcattgtgccataataaagactaattgcttaaaag

SEQ ID NO: 3 - protein, 836 aa, Mus musculus
KVEMKVHIHTKFCLICLLTFIFHHCNHCHEDHDHGPEELHRHHRGMTESESSKFSVQDAENEKKYYIEKLFDRYGENGRLSFFGLEKLLTNLGLGEIKVVEINHEDLGHDHVSHLDILAVQEGKHFHSHTHQHFHNHLNAENHTTTSVTSKRNHKCDPEKEAAELPIKADDKHLHDRNHRFHHRHRLHHHLDHNTTRHVHNDSVAHSEHGEPGHSPSPETNKTQEQSEVKSVKVRRKEKGKRKKENSEVNTPGFLPNHDHSEQYEHNRVHKLDRVHSPGHPHAHLPEHSGHELGHGHQELDPDNEGELRHTRKREAPHVRKSAIYSTPSHKDQSEDDRQHECLNVTQLLKHFGLGPNSPISPDLFTYLCPALLYQIDSRLCIEHFDKLLVEDLNKDKTLVPEDKTNIGASAWICGIISITVISLLSLLGVILVPIINQGCFKFLLTFLVALAVGTMSGDALLHLLPHSQGGHDHSHQHTHGHGHSHGHESKEFLEEYDAVLKGLVALGGIYLLFIIEHCIRMFKHYKQQRGKQKWFMKQSTEESTIGRKLSDHKLNSTPDADWLQLKPLAGTDDSVVSEDRLNETELTDLEAQQESPPKNYLGVEEEKIMDHSHSDGLHTIHEHEVHVTSHNHHDEDKAVLRKHSHQWHHRHAHHSHGPCHSGSDLKETGIANIAWMVIMGDGIHNFSDGLAIGAAFSAGLTGGISTSIAVFCHELPHELGDFAVLLKAGMTVKQAIVYNLLSAMMAYIGMLIGTAVGQYANNITLWIFAITAGMFLYVALVDMLPEMLHGDGDHEEHGFCPVGQFILQNLGLLFGFAIMLVIALYEDKIVFDIQF

SEQ ID NO: 4 - DNA, 100944 bp, Homo sapiens
gataagcagcagcattaaattctcatgggagcacgaaccctatggtgaaccgtgcctgtgagggatctaggttgcacactgcttatgagaatctaatgcctgatcatctcaggtggagcagtttcatcctgaagccatccccctgccatctgtggaaaaagtgtcttctaggagactggtccctggcgccaaaaaggttgggggactgctgccttagcttgtggctccctttattcagcaacattttatctctctgagtgtcatttctctttatcttcctctgactctcctcttcttccctcttccatttttagagtctcttatgattaaatcgggcccatttggataattgaaactaatttgttcatttcgaggtcagttggttagcaactttaattccatctccagcctttgtaccctttgccatgtaatctacatgttcataggatccagggattagcatgtggatgtctttatgggggaggcattattctgtctaccaccctagtcgtatgataatatgatttcccttcttgcccatgatcacgtcacttgcccaccgaaaattcttcaatggcccttgttgccctcagggtagcattcagactcattcaggctccttaatgtgatacacaaaggccttccttaccagtcctgtctcatctctcccaactccccatgcccaaaacacacaacaagattgtgtgtttcacttccccaaactgaaaaccaggcattcactcatctcattcatctgcttgtttgctcttttcccagccttttatctgactctactactcatccataagtcagacttcagatgtgacttcctttgggaagcctgagtgtatccccaaattttggcctttgctaccgttgcaagctatacctatatctaacatagcacttgccatgcgatactgtaattatctctttaattaccatccaccaccaccaccaccaccaccaccacgagactacaggcaacttaagggtcagcctctcatttgttcacccttgtatcagttacttatcagagtggcttgcacacaataaaaacacaaactttctattttttaaagcaaccctattaactgagaagcacaaacttttgcttaaagatatatcccttaatatttatgtgtctctttttccaagacagacttatagaggatgtagagtcatataaatctaaggactgaaaagtaaatgtacctttaatcctccaaatggatttcatttaattaatgaattaatttactgaggcaaggtcccactctgtcacccaggctagaatgcagtgacaaaatcatggctcactgcagcctccacctcctgggctccagtgatcctcttgcttcaccctcccgagtagctgggaccacaggtgtgtgacaccatgcccatctaatttttaaaacaatttttttgtacagaagaggtctcgctatgttgtccagactggtcttgaactcctgggctcaagcgatcctcccatcttggcctccgcctatgctggaattataggtgagctactgaactcggcccttatctggcttcttatatcaagactgtgcacaggtcactatttttgcaagaatttctataccacttcctctgaaaatgttggtaatttaaaaaagaaacagccagacatggtggctcacacctgtaattccaacactttgggagatggaggtcggccaattgcttgagcccaggagttcaagaccagtctgggcaacatgatgaaactgtgtctctacaaaaaattcaaaaattagccaggcatggtggtgcatgcctgtggtcccagctactcaggaggctgaggtgggaggatcacttgagtttgggaggtcgaggctgcagtgagccaagagatagtgacactgtatactccagcctgggcaacagagctagaccctatctcaaaaaaacaaaaataaaaataggttggataatgtaagagttaagaacagagactctagagccagcctgggatcctggctctgccatattttatgtaaccatctcagttttcttcatttgtgaaatagacacagtaatatccacctcagagggttactgtagaattaaatgagttccatttagagcatttaaatggtgcctggcacattttaaataataccgcttcatgtggttagggtgggaaggaagattgtaaaacataaatgcttagagaaagcaactgtcgttgtaattaaaatgaaacttgggtgtgatgaaatcattggaggctgtaggtgagatcatctatgagaaagaaaaagccaagcatgatgggtcgctaaccaccgggcactgccagaagcatttctcatgaaacattaggaagtttccaaatcttctctaaagacgtgtgcttgaaaaaacaaaacaaaaaaagaatgacaacaacaacaaaaagatatgtgctggaaagaagagatgggattctatgaagaatgtgaaagtggcttattgtatgaaatacaaaatataatccaagctttacctagaaatagtacaagaaaaattcagaaatccctgcaagctattcttgttttgacaattcatttctcgccttccctaatatttagaattttgctgcattgttgccatcaaatattttttaagaaataaaggtaagcagtatttgctaagacagaacacgtgtgtcttgattttagaagatgtacttgattattttcataaatgtcaggtgtgaaatgggtcaccttattaattaaagccttaggcaaaatttgaaatttgatcttatgtgatgacattttaaaatggatgtattaatttcaaccagtttaacaaatgagcctttttaaaaaaatttacgtggtaacttattgttaattcatttccatgttgacagttttccttaaattgaagtgtaatcacccacaaatacttttgaagtttgccatattcatgtggatatttatgccacttttttctaattcctttggactaggagttatgttctgaaaagtcaatttctgctgtgccagtagagttgcaaacgacctaaaatggctacctaccacacctgtttttcttcatcttactactctgtgagtgaatgagcttgcctggaagcaagattgagaagttagcaatttgtctacagtttttcttctttccctttgtaccacactaccctcaagaatctagacaaccgtgttttctcttttcttagaacttcctctttagaaaaaacctaaggaaaatatattctcacggaggtataaataggtaatacaactgtagcaatttccctccaagttcttccggtttcaaggcccagggatgaaatgctaactgtgtaattgtaggaattggcaagtacactaaaaatacaaaaaattagccgggcatggtggtgggcacctgtagtcccagctactcaggcggctgaggtgggaaaatggcatgaacccgggaggcggagcttgcagtgagccgagatcccaccactgcactccagcctgggcgacagagatggactcctcctccaaaaaaaaaaaaaaaagaaaagaaaaaaaattggtttagggtgagaagtcttcatggcactatgacgtgggcaaatgtgtggtcaacgtgttagtctggctctggctctgagttttttgcttttgttcattcttctgagtaggtctttctctttctcttgagcctggtctcatctgtattttcgaaaggacttgccatggtcaatcagaggctttaagcttctctgttattgtctgtcttccaggagagatgcctaatgctaacaccttttatttgtattgccatggcaatacaaacccttaaactaagggttctggttattcttaggttaggatcatgtaggcagatcataaaaaagttaatttttctcccctgggtgagaagttgcttaaatttttgtgtcaattgtttcatttctccaatctatttttgtctctgcaaatagcctgaaactcggttttattgcacaagcctaccaattcagaatgatctcaggcgcatcagacaagtttgtccctcaccagagttgtattggtttatttctccctgccttcgtgtgcccatctcaaaatggtggggtctgtggaagaggatggccttcccagatatgcaatttttgctctttagaaaggagtttaaaaaaaaaaaatcccagctactgtgtggggaaggcgaaggaggtgggaggtggaaggattttgcttgagcctgggaggttgagtctgcagtgagctgtgattgcaccactgcactccagcctgggagacagaatgagaccccgtctcaaaaaaaatgtttttttttttttatttagaaaggagtataaggggagctgtgctcctctagtgagaactcccatggacttctaaaggcccatttatcctaccttagtctttagagcttgccaaaaatgagatggtagagccataatttctcagggatcagaaaaagactaccgcgtgggtccaacttccccattctgacagtgtgtttgccgtgttagatgttacacagtgccacaggtctcgaataatggaaataatttgtatcctttaaatatctctggcatcagttttagagctggagcttcaatccccaggctgaaatagtctctaaaaatgaatagtagctattaagtttgaggcctcagtttggaattttacctacatattgctgacatcttcctttcccaaatctctttttttttgagacagagtcttgccatgtcacccaggctggaaagcaggggcatgatctcggctcactgcaacctccacctcccaggatcaagcgattctcctgcttcagcctcccaagtagctaggattgcaggcgcttgccatcacatccagctaatttttgtatttttagtagagatgggttttcatcatgttggccaggctggtcttgaactcctgacctcaagtgatccacccgctttggcctcccaaagtgctgggattacaggtgtgagccactgcccatggcccccttttccaaatcttaacacctgttctggtacttaatatccccacaccccaccacattggtacagcaatataatttagtcttccttgtactcctaatgacttcatcaatgaaaagagtcaaattctgtaacttatttgaagatatttttttctgagccaaacatgagtgaccaatggcctgtcacacaaccccaggaaatccttagaatgtgtgcccaaggtggtagttaagcaacagcttggttttatacattttagggagatataagacacaatacatgtacgatgtacattggtttggtccagaaaagtgggacaactggaagcaggggctggttgccaggtcttaggtggattcgaagattttctgattggcagttggttgaaatagtttatctaaagacctggaatcaatatgagggagtgtctgggttaagataaggggctatgtagaacttggggataagtagtcagaaaagaaataaaatttagcctaggcgtggtggctaacacttgtaataccagcactttgggacgccgaggcgggtgaatcacttgaggtcaggagtttgaaaacagcctggccaacatgggagaaaacccgtctctcccccaaaatacaaaaactagctgggcgtggtggtaggtgcctgtaatcccagctactcgggaggctgaggcaggagaatcgcctgagcctgggaggcagaggttgcagtgagccgagatctcgccactgcactccagcctgggcaacagagtgagactcatcttaaaaaaaaaaaaaaaaagaaagaaaattttaaaaaaaagtataaggggttatggagaccaaggttcttattatgccgatgaagcctccacctagcaggcttcagagagaataaattgtaagtgtttcttacagactttaaaagacgccagactcagttaattctctcctggatcagggaagagacttggaaagggaaggggattctctacagcaggggtcccccagccactagactggttcaggtgcatgggctgttaggaacggggccacacagcaggaggtgagtgtcaggcagtgagcattactgcctgagttccacctcctgttagatcaatggtggcattagattctcataggagcacaaaccctattgtgaactgtgtatgtgagggatctaggttgtgcagtccttatgagaatctaactaatgcctgataatctgaggtggaacagtttcatcccaaaaccatccccacccacccccatctgtggaaaaattgtcttccaggaaaccagtctctggtgccaaaaaaagttggggactgctgctctatagaatgtagatgtttcccacaagagacagttttgcaaggccatttcaaaacatgtcaaagaaatatattttggagaaaaatacttagaattctttcagagcctgctatctgtcatgttggtatcattgctacaaaaagtctctttcatcagtcttaaggtctgttttaatgttaatactggtcatctgtgcctgaattttttttttttttttgagacagagtcttcttctgtcacccaggctggagtgcaatggcacaatctcaactcactgcaacctctgcctcctgggttcaagcgagtctccctgccttagcctcccgagtagctgggattacaggtgcccgccaccatgcctggctaatttttgttatttttagtagagatgggattttgccatgttggccagctggtctcgaactcctgacctcaggtgatccacccgccttggcctccataagtgctgggattacaagcgtgagccaccacactcggcctgtgcctgaattttaaagtgaggagaatataatgaggcatgtttaaccatccattcccatcatgcctggtactagtgtttcaggttaactttggaatgcccttggcaaagaagaagtgaccattcagttagttgggaggcttaaaattttatttttggttcacagcctctctaggcatagctttgtctaaagtaaacttttaggccatgtaaaagtaacagtttaaactggagatgaatttaggaaggggtctttatcattggttattactaatcttgaatcacggaaagaacaagtgagtttgaaaggcctgatttcttagaattagtcgtgttcttttttttgtttgttttgtttttttgagacggagttttgctcttgttgcccaggctggagtgcaatggcatgatctcggctcaccgcaacctccacctcccaggttcaagcgattctcctgcctcagccttcccaagtagctgggataataggcatgtgccaccaagcctggctaattttgtatttttagtagagatggggtttctccgtgtgggacaggctggtctcaaactccggacctcaggtgatccgcccacctcagcctcccgaagtgctgggattacaggcgtgagccaccacgcctggcagaattagtcatgttctttatagatttcattaaagactcttaattttgttgtgtatgatgactattttctcctctgtaagagggaaacccaggtttatgacatggacttccttcagccactgctaaagattggggtatgaagtaggtttcttatttcctcttttgtattaatagttggttcttttcaaatcctctgaggggcaaaaagacccttggatttactatatcatgtctcacaaaggtagactggtcacatttgaaattttagatatgtgaactaatattgtggctgaagcagcatgaataagctaaacaatgaaaggtaaaccatttacacataattcagtacctctctttcccccaggtactgaaaatcatttatactatttttatagttgagatgagcttctttatgaatcaagtgaggtggctggaaaaagaaaatgtcttacactttcagaaagttttatgattataacatattagaaagtctttaccctaacatatttcttatatataaaactggtaaagataaaatgaaattcatatattgttgctgtagtgtccattatttgactcagcaggtgattttgtgtaagcctgcaagtcattttctgagattccttttctcagtaggaaaagtaatatgctagtatgcagatgaatcatttattctatctgataattttgcttgaaaatctgcccaaatcagtgtgtatacacttgaaagtaaataaatgtttgggtgagtttaaaaagtgttaggagacacagtctctattttcaagttgcttaccacatagttttctatagggatgacatttaaaatatgtaacaattagtaaagaataggcaccaaccaagtagaatgggagtgactaataagagctgggtccaaagggctctatcttagccaggtattaacccactagttcctaaaatgtggaggtctggggaatcttgagaggaaggactggcacaggggtgagaagcatggggggataccactcagagttgcagctgttaaccaacttgcattgaagtatttcagtatttgattagttggttcagccgtacttgtgtgtaccagctgaacattagccttgtatatccataactaaaaaagcagtgtaggtgccctaaaatgtaaggactgcaagcgctatatcttattgatatttgaaagaaaggttatgtatgttttaagggtgttgataataatgtgttcaataaaataattatgagccataaaatatcaagctaatttggaagcttcttatgctttgcacacaaaggatgtactatcatgattttatgaactctaaggactttagttctaggatgaaccttagaatatatttaaaacgatccccttaatttatcaatgaatctgaggaccacagctattgtctcacatttagtggcaatggtgagacttgaaactaggactcaggcttaatctcttttctccacacctcaggacttctccctttgtaagcaggagtgaggtccatgctctggctttccaaacaaggaaaagggcatatgagtagttcagtgttctgaactacgtatggcaatcagtaggcatttatcaagcaccattttcgttgttttggatgttttttgtagagatacaaaacaaaaaataaccttctttcatgaaggtataatatgcaggttagcgggactacctagccgtccatactgaatgggtttggaaatcccaactcttttctctacctgctctgtgataccaggcaagttaaagtcttgtgtgcctcagtttcctacctcaccgtgttatggtgattaaattaatatatatgtggagtacttgacacacagtcaagcctgcgattactgctgttcatggttttattttctctactagacaccagtaaggcacccccagaactcgctgtgttaagcagattctggttggatatagaaacacaggcaccccaggcggaatgcagatacgcctcaacatgtggattaagtaagagccaggaagcagagtaatgaagcaaaaataagatgtccagagtcaccttttaagaaaatgtgggttggtggttgcttaagaggggaggagacaatttagatgggatgtatggcgtgagcaaagggcaagaatgagcacggtgtaggcacaagtccatggaactgcttggctggatcgggatttttttgtcatagagtgttaagaaatagtcgatcagttgaggagtagaggagtgaagaccttggaaagttgccaaaagcctcgagaatttctctacatgtgtgacatgttctcaggactcaactttttcttttaggtttggaagacccgcagtaagtgtgctttagaattaaatgggtgggaaggggagctaggcaaaacacctcgcacttagcactaaataaagttcgctgttgccctaagagactgaaaaggttactttaacaaagggggcggggttaacttaacgtagatgtttaactcgtatacagatgaacattccagttgatcactctgaagctttttggctaaagcgtttgggtttagagcttccattactcatccgccttgcccaaggcctcagcaaccgacgttcgaaagccaggagaaaaggcgaatgataaagggcgctccacgcatgcgttaagaagccgccccaactcccccgcggcgttctttcttggaacaaaactagcgcggagccacggaactccgcagtttgcgtagacttgaatttcctattcctcggacgatccatgtggaatccgtgagtagtgcgactcctttacgcaactggcgttatccgaagtgaatagctaggtggcgcgtgtacgcccatagcgtagcacccataggcggacggggtgcggctgcgcagggagctgagtggaccttgtacgccgcaagcgtagcagggtgtcagacgcgccggtttctgcgacgcagttagcgcagtctgctttggtgaatacacgatttggtgcagccggggtttggtaccgagcggagaggagatgcacacggcactcgagtgtgaggtaactataaaaccccgatttgtttacattccctcccccagaaccggccccgtgcgcggcggagactgcgagtcccgggacggcgtgggggtagaaagggagaacagaaccggggagtcggggctggttccctcggggatgcgggcgctggggttcccgcagctgctgcagtcggcggcggccagccgaagcagagcgcgtggtgggcagagtgttgggcgccgcggctcctcgtgtgcggtctgggctgctgcgggccgcgggatcgggagccggcggcgtccacttcgcgtgcggagcctcgcgcccccctcaccttcctgtggaggttggcggagcctcgcgggccgcgcccggggtgggggagtgaccgctgggcgggtggcggcggttagggggctgcgcgccggccgcggatggcgtcgcaggcgcgggcgggcgaggctttggggatctgtaggcaggtcttcgggggcttggcgaccagcgccccggttttttcttctccagtccttctctctggtctgtaatggggcgaggggaccccgggatggagcctcggcaccgctgttccggaccgaggctaacggacggcggcgcctctgctcctactagttttctcccggaccaaccgaaaagccgaggcggagcgcgggggtgtgaagatctcggcctgctgggggtccctggagctgagggtgagggtggggccgggtcggtgggacaggccgggtgggccggaggtggcgcggccgcacggctttgttccggaaagcccttaggtggagagcgatgtggggcgcggcagggggatcgcgtagaggaaccttcgcgcaccgcctctccgggtctgggaatctgctgaactccttgcctctcttggggtccctcgaacgccccagctaagaagggcgggggccttgccagggcgcgagcaacatgacgttcaaggtcttcctgtggcttctgtaaagaaatgttcacgtgggagcctgtccacatgggctgtactaaggatctggcacgaggaagaaatatcactgcagaacctgaagccctccgttggaagggtcgttcactcgagtacctattctaagtaacagtgacacaaaacacatgttagaaaaaaacaaaaagtatggtaggttatactgttttttaaaagaaacttttatttatgccttttgctgttaagtcctctaattttacattggaactgagtcattcttggagcaaaactagaataggtttgtatttgttttctttttggatgtgtatctaaattgtacataattaagaaaaagcaagtaatggaaaagctggagatgtagaacttagttccttctaacttagtatgcaattgaaagcctcaagtcaagactcctgtgtattgttttgtattaggactctattgtacaaatatttgagtaccttaatatgagtcagttactttttctagatcttggatccatgccagacaacgcacattctgcagacactggttactccagtggctccttactggaaacataatatcagtgataagtgctgtgaagaaaataaaacaatgatgtgctggtatggatttttaacttttttatgtgatgaaccacagaatgatggttttaaatgtatgaaatacatagaattgcaacagaaaccagttatgaaataatgaagatattaaatatgacatctatattttagtaaagcattagtgaggactgtaaatgatctttaaagaatttggcttaaatttaatctaaaattgctatcaggtatttcacatcgctgtaatttttgcctgcattcgtaactgaagagataagtaaatgtcagaggttaagataaatctttttctttttttacctgtccatatttacaaacattctgcgttccgtacatagacgcctggataagaacccctgtgcaagaatgactttggtgctactttaaaaaaagtggttggggaagacctcataggaaatgacatcaataatagattgcatgataacctatactagttcttactgttaccaatttaaattctaactgcttaaaagctaacacggtccttccctttttttgagcacctgatttgaagtactttgagtaggcctcaagtgtcgtatgcaagtactaatctagggggtgtgcctttttcaaaagtgatttttggagaagataggatgtagtattatagcaaggaaaattcagcatctgggatgatcatttccttctgattagagaaatttaccttgttaatattctgttcacccaacccttctaccctcagtgttgaccaatactggaaaaaatttagggctttggagtgaaattttaaaagttcaaaaccttgatctattaattagtttgcttaccttgaggaagttgcttatcttaatcttctatttgaacttcaagtacaaaaaccctactcacggacttaactgtgaccattaaatgagataaccaaaaggctgaagatgatagtgagttgattttaccttttttctacatacagatgtttcagttctttcattagtggttgaaggtctgcgttctttttctccctccactccctccttgactacccccagaatgagctttgatggtctctactgggcctttgggggggatacattatcctgttgtttttgttctgttacttatatataatactcatggatttatttctacttctcttccattttctaatttataataacatgtgcatcttgttttccctgccaaactaaatttcgtgagggggtacatactgcacagttttttttgtcacatactgcttatgacacatgaatatgcagagcttgtcaagctctttaattaagtttaaaatgctaattgagtgaatcaaaacttaaccattatggttaggctaaaaatgtcagcttgtgtttatatagtgcttacctcagtattggaaatgccatgagtttagtatcagaaggacattattactagtgcattttaaagtgataccagtcatagttgcaaaagaaagtacacaatgggaaatggaagagaaatgtagggaatcaaaacaactagttttttcctttataacggaagttttataattcatcttttatgtaagtgtaattctcattaaaaataccctaaagcttaaagtttgcaaggctgcccagcctaacccacaacagtttgatgctgccccctagcgtttgattcccttcaccttttgctaaaataaggtaatgtttaaattacaattagatttacttactgctgtaaatctggtctattttagtttcctctgggtagttagtgttgctaataagatggacgtaagtgtttttgaactggtgaattctgattgcttttagcccccagttttccaaataggggtgaattctgggtagagatagaacaatcaccaagttaccttgctccaaaaaagaaatttacgtatgggattgttttcaaagcgggaagttagctgtgtaaataacaacaattttatatatttaatctgggcttctccttatcttgaatgatataaaaatctactttctagattaatttagttccatataactttgtattgctttgactgtactgataataaagtttgaaagtgttaaatttacattgtgagcttttttttaaaattcgaatttattttctatgacttttatagaatgattcttaaaaaatagtttcaaggacctcttcatagccacaagatttccttttttatatcattaatattattttatgtgaatactataatgaaacccaagtattcagtttacacacagatattataacacaatataccactacacaaaggcaatgaacagataacattctacaaaatctactttacagaaaggattttctgtagtcaatgcaaactcttaaggttttaggttttatttagattattgcaatatcagtatttcaaactcttttttttctttttattatcccttataagttctatggataggccacaggataacttttagctttttctaaaatatccaaacatattctcaataaaaaattagtggaatgcttaaaagtatagtaggtatgaagaaatatagaatcaaaattacagttttaaataatagtatgtatttatttatatagagacaaggatcttgccatgttgtccaggctggtcacaaactcttgggctcaggcaatcctcccatcttggcctcccaaagtgctgggattacaggcatgagccaccgtgcccagccagtaatactaaattatttccaaattaactgcttaggagaccacatacaatgttcagacatgttaaaacaggacacaattcattgtatcacatcagtaattctgtgtcgaatactgttttcctatcagaacgtaagggtttttttggattgccagatacaaggagtggttatttaatagatttttaatggtagatatttttatgttaaaagatgttagaataggatgctactggtgatacaggtttgcaggcttgtacaagtataaggacaaaatctaaaatcttgctcaggtagtgtttattttcacaatctaaaagtaaatattttgtcataaccttttataatcatgttttataattactcatttttagatactgctgaaagggaggtatcagataatacttatccttgtattaatatttctaatcaattttacccttttatatactcgactttgggggacagcccatcccgttaagatttttagggattagaaaagcaagaatgttgtaggatgtatccttattaatatcattatgtacttccataggacgagaagtattgttataagaactgtgaactacgaaggaggttaattttaatcctctataatgaagatttaatcagtgatcactttaggttttagattttcattgaataaaggaagaagaaaaacctcagtcacttttagtgtagtaagaacatcagagatatgtatcctactgtggtgttcccttttttttttttttgtgagacagtatctctgttccccaggctggagtgcagtggtgagatcagggctcactgcagccctgacctcctgggcttgggtcatccccttacctcatccttcctagtagctgggaatacgggagcgtgtgccaccatgcctagctaatgttttgtattttttattgtagagacaagagtttcaccatgttgcccaggctggtctcaaactcttgaactcaagtgagctacctgccttggcctcctgaagtgctgggattacaggcatgagccaccgtgcccagcctatgctattactttaatatctataaataaaaagaaacaatttcagatattccttgccttcccacctctaggcttttttctaaattcacttttatatatttgaatttttgagttttaaaatagtggtttcccctataattgtctgctggattggcactttaaaaaaaaatctataaattaaatttggatcagcaaactatgggccaaatatccctgcttctgtaaattgttggaacaaaacttgcttattgatgtgtgtattgtctatagctgctcttgcggtaaaatactttagtagaaaaatgttcagtcaaatgatcaattcataggtaatgtgaatttgcaggtgttctttacctacatagtagagaagctttttgtctctttccgctttccatttttcctctgcagagggaattatgctttattatgcttggagtcggaaaaggaatgtgaagcccttggccttcaactgttggttaccaccgaactgtcacactgtttgtagctacttatgtagctctctcacagtttaccttttctaattgaaaagctgattgtgtcttccttgtaactctctcagagcaggaaatggatcatatttttatgccgcctatgtctcatgtcttctttcccttcccctttccctcctatcttctcactcccctcataaagcaattcaaaactgcatgcttacaggcctttaaacaaatattttggtatattaactcagtgcacttctactgaagatgactccttacattattttgcttgcatgtgaagaaatatactttgcactgtgttgtagaggaacatagcttcttgatgaaaggggctagggaaagatttatttaaatactttatcaatataaatgaaacaatacatggtgtgttactacattataaaatgagatcagtaaaacaatgtaagaaaacgtaataataagatagtataatatacacataacgtattctgtgtatatatacattataaggcagtgagatcatgttttctattcccatggaccttttttagaaaagcatatcatattttcataattttttaatgtttggaatatactgtttttaagattttgattttatggtgtttcaagaatatagaagttatgaaaaaaaaagaagagaaaagtaaattgtatattaaaacagaaaaaagatttgggttttaaattaggatagtctatagtttttttctttttttttttttcaacttttattttagattcagggggtacatgtacaggtttgttacctgggttatattgtgtgatgctgaagtttggggcatgaatgatcctgtcatccaggtactgagcatggtgcccaacaactagtttttcagccctttccctcctccttctctcccgttttttccaaataaagtgaataattgaatgtatataacatcttatgaaaacacatacagtgtacatatagaatttattttcaagcaaataatcatgccagttaaaaattgaaaatcagaaaggtatgctaaagttaaatcactgaaatatattaagaaaaaataagttcttataatttcatggaatatataatttctaaaacaaattcttaaatctttttctgtgaagatttttgcgtaaacacaagtacttaaggttttttagttaactgatatgtgtgtgaaagtgttggatgttagtgcaactgacatttttctttttcctaaaaaagaaatagatgttaggggttttagttttttaggagttatttttaattatagcttttcttttaaaaaaaaataagaaaatatacactaaaatatggggagaaaaaacttttaaaatttagcagcagtcatagaagaaattgcagaaaccttaataagtttcattgcatgtacatgaaaacatctatacatgaaagggaaaacatgatcaaaataaaaaggaacagaactgcagggtttttgcagaaaatgtgactgaatcatgttatgtaaaagctcatatatgttggaaaaaatattgagacatcaggaataactttaaaaatatgaattaaaaataaagtaagaccttttatttatttaaaaatttataataatgtgaatgagagtgctatgatcatactgctggtggcagtataaccaagcttaatttctctagaaatcaatttggaaagtaagtatatgacaaaacctgaaaagtgttaaagtttttatagtttttcccctcatcttggaattcattcgaagcaagtaatcaaagataatagcacaaattggaattaaaatgtttgcatattgtgtttcagactgcaaacaggctgggtgcagtggctcacacctgtaatcccagcactttgggaagccggggtgggaggattacttaaggccaagagtttgagaccatcctgggcaacatagggaaaccaccatctcgacaaaaaatttagcccagtgtgaggtcgggcacggtggctcacgcctgtaatcccagcgctttgggaggctgaagggggctggatcacctgaggtcaggagtttgagactagcctggccaacatggcgtctctattaaaaatacaaaaattagctgggtgtggtagcaggtgcctgtaatcccagctacttgggatgctgaggcaggagaattgcttgaacctgggagatggaggttgcagcgagcagagattgcgccattgcactccagcctgggtgacagagcgagactctgtcaaaaaaatgaataaataaaattagctgggtgtggtgctgcgcacctgtagtcccagctatgtaggaggatggcttcagcccaggaatttgagacttcagtgagctatcattgcaccactgcactacagcctgggcaacagtggaaacctgcctcaaaaaataaatacttgaaaaacccacagacaaatgcttgtgaaaatcttaaagctagaattcattttcttccacatgtgacattattttattggtttgtcaactaaaatttaatttataattgccaacttttaggtttttttcaaagttatacatgaatatagtttaaagaatcaaatagttgtgtgaagtttcttggggggaaaaatcagtcccctgtctgttcctttcatattctgcctagagagataaggaaccccttaattcctttagttgattattttgctattcattaccatgtctccagataacatgttcattacttgcagctgattttcagttctaaccattatctatttaatgaagaatgattttagtgctctttcacttctgtgcataccttcctatttcctgtactccagtttctccgtacaattttcattgtaattttggtttagaacagtaattggggttacatttttatgctataaatattattttatacaatgtgccattgtaataaatgactactttcctgcacaactttgttttttctggtaataattagcttgatttttttgtccttttatttaatatgcatatattaaaagaccccagctctgtgtttctgaatgtagctatataagaaaggggaatgtggtcaagactctatgttcaagaattttatgtagttttaaaaaattaattggacagaaagctcccatgttggggaataagtagcctctgtgttgtctgaaacataaaaaaagtcaatgttatacaaagattgacttggagattttttgattatttttttcccatgacgtcatggaaaagaacgatcattttagctggcagtttttacaatggcaagctggtataaaatcaaggatgtataacagtgacaagacactgaaaaagggaagggtgaaaatgcatggaataataaagatttgaggtagtgcagcagtagctatttttagaataaagacagctgtcagtgatgagtggaaagagaacaataagctgttgccaggctggagtatagtggtacgatcacagctcactgcagccttgacctcccgggctcaagtaatcctcccacctgagcctcccaggtagctgggactacaggcatgggctaccacacctggctaatttttaaaacattttctgtagagatggggtttggccatgttgctcaggatgctctcaaattcctgggctcaagccatatgcctgctttggtctcccaaagtgccgggattacaggtgtgagccactgcatctggctggttagcactgtaagtctgcttcataatgcatgtaactaaaatcataaacattttagtagcttcaaaagacatcccaacgactgcatttactaatctcagatgtttgtattcacaaatagcagaacagaggtagcaatattacaggtagctttctccaatatggttccaggttccctgtaatgaaaggctgaaaagcagaaatgcaggtaattgttttgacatttgatgagaaaatgtaggtttgtacatgaatgtatagaatacaataaagatagatatgatgtgttgttgattgatttgatactttaaatcaaggtataaatgtttatattctctctcaagttagtgaaacaggagaactgagttaatgcccaagcttaattagcatgcacttaactttttacatgaatgaatctcagtggaaagattgggttgcctgaactgtgcttttatttatttattggaagagttgcagtggcattccaaactgtgaatatgatttccagtagattagatagctggtgaagtagggggatgaaaaagcaaaccatgaagctgtaagaggattttgtggtccctgctgagaactcattactaaaatactttttatccctggaagaatattctaatgtcagtgaaactggtaaggtgtagtgagtctttccaacttctgctcagatactagtgaattgggtgcctcctgcaatctagagcaggtcttggatgtgctaacgatgcatgtgctcttgtaatattttgttagcattctttcaaaagagtcacaacagagagactcctcccccaccaccatactttttgtaatttaagtgaaagatacataatactacatctaataatggtaataccttaggttaatatatttaattgctttacaaagcagtttcgtatacattggtttatttggtggataagtgtaggtattattttccctgttttgcagagagaaaacagtggcacaaccgggatgaactagagacagaggtttctgattcctggttctgtactgtatacaaaataccacatttaatggatatacgagaagtagggacagaactcaatttatattattaatagcttgcacttaaataacatttaaatattgcaaataatgtaggaaaattaacaaatattttacaaaaatatgtacgtaattttattttgttcttatagttaccataaaatagaacagaaattaacagtcccactttataagtagtaataagacttaaagtggttaagggacttgctcaaggactcatagctaataaatggcagagtcagatctctaacatctttgactcctaggctaatctatcttcactatgcacacagcctcactgcttctctgttactctgtgtgtgccattactgaatcacagaaggaaactaaattgatatttgactacctacattgctgtcaagataaagtttgataaagccattcagtcatatagataccagctgtgtttatatgattgaggctataaaactgatttcaaccatttaaagtagtcctgtaatgaaacttttaaaaaatgaagtcctttatgaaattaggaaactgtatatacatttattgaatagattttcacattaagtttacttaaaacatggtatattatccaggatgagggttttagtgattaatcttttggtttctaccttatttaccttcagaatagcaatctggaacactgaaaaagcttgctttaaaaccttgctaagcaacttatagtatctttccccatcattattagcatattttgtgtgtttgtgtgcatgtgcacatgtgcatacacacatgggtatgaaagaaagaattgcgatacagataataacttctcattcttttatttggtcttcattttcctttaaaaaaatactcgctagagtaaaaagaggtttttgttgttgttgttgtttgtttgttttttggttgttggttttggttttagtgaaatgagttaagtagattacacacaggcaataagtactaaattgatcgggccgggtactgtcgctcgcacccagcactttgggtcacatcccagcactttgggaggctgaggcgggtagattacctgaggtcaggagttcaagaccaacctggccaacatagtgaaaccctgtctctactaaaaatacaaaaattagccaggcaggcgcctgtaatcccagctactcaggaggctgaggcaggataatcccttgaacctgggaggcaaaggttgcagtgagccgagatcgtgccactgtgctccagcctgggcaacagggtgactccctctcagaaaaaaaaaaaaaaaaaattactaagttgattggcctctccagcagttggaactaggattattttagtatttatctgctatttttcttactatgtcagacagtcattttgttaagtaatctaaatttattcacaatgtcttggttttttctattgagtaagtagtattaggagacaatttcttttcccttaaaaaaagtctttgtagtatattttagatgactttaataaagatctcacagtgttctggtttcaagatacacaaatatgctactgtagtagactaaagagcccctgtctttcaagtcagagaaatgccacagacttgaaataacagcttaatcacgttagataccttttctgggtcttagattccttgtacataacattatttagctaaatacacctgaggatttttaaaatctcaaacattctacatttttattatgttcatctatatgaaataaaaaacaatctaagacaaaatatctgtaggaagatttgtcatgttaaccatttgtatatattcctactgaacttgttatttaggtgtttaattttatttaaaatttttaaaatttgtagcttggcattttacacatttcaaaactacaatccaaagcctatagttaaggtttttgtaggctgggcacgatggcttacacctgtaatcccagcagcttgggaggctgaggtggggaggatcccttgagcccaggagtttgagaccagcatgggcaacatagtgagagctcatctctatatgaaaaataaaaatgaataaatgtctttaaaaaaggtttttgagctgggcgctgtgactcacacctgtaatcccaccactttgggaggccaaggcgggtggataacaagttcaggagatcaagaccatcctggccaacatggagaaatcctgtctctactaaaaatgcaaaaattagctgggtgtggtggtgtgtgcctgtagtcccagctactcgggaggctgaggcaggagaatcgcttgaaccctggaggtggaggttgcagtgagcggagatcatgccactgcactccagcctggtgacagagcaagattctgtctccaaaaataaaataaaaaagttttttgtaagcttttacaggagaaattgctatggagaatatcaaccctaattccttttttttttttgacaaaaatagtatatatttattatgtacaacatgtattttgagatatgtatacattgtggaatgtctaaattgagctaacaaatacattatctcacataccatgtttttttgtggtgacaacattcaacaatatagaccatttcacaaatttgcatgttatctttgtgcaggggctatgccaatcttctctgtattttttcaatcttggtgtatgtgctgctgaagcacacaccctaattcctttcatttaaggatctagttaacctttctcttaagtataaccatgtattttgttaagcaatatctttttattacaaaaatgccatttttttctggttagaaaattgattttctattacaatattttttagagtgtgtgtaaaacctgatgaaatttgaataaggttcgtagttaatagtatcgatgtcagtttcttggttttgaacatgtactacagttatgttagatgttattgggaaaagttggggaaagagtacatggaaactctgaactaattttacaacttcttgtgaatcttaaattatttcaaaataagttaaaaaaagcacatttccctttgcgtattattaagtatggatgtgtttctagaaattatgtgttactgattttactaattgaaggttggaataaacttcatgtggggaataaaaattaagttttggatgaaatataacacagctacagaaaagtactcaaatgttaagtgtaaaattcaagcagttttcatgaagtgaagtgcaaccatgtacccagcacccaggtaaggaaataggacattaataggaacccagaattcctctcatgattctgcccagtcactccccacaccaaagtataatcacttcactacacatttagttctggttttagtcttaaatacaagagaatattagtgaacttcattttttctttgcatccaaagcaaaatatttgcattcaaaatagtataataattagcacaatgattaagttcctaactgtaaattagccccactcttaatgcagaaattatacagtgatagaatacttaggcttttaactgtggttatgtattggaaatcaacagcaaaagatgaaaataaatttgttgtggcactgctagttatttaccggaatcccttttcccatttcttgtcagtagcctcatccattgatgtcgacagcacctagcagaactcttcagtagatgtaactcagctgaactgaaaaaatattatcaattataaaactaacatattcttaatgcataaaacttggaaaactccaaaacacaagagacataatagaatattttggcttgggcaaagctgtgtcctataaatgtcagtttttagggttgagtggtatatgggcttctaccatttcccccattcctgtctccatctcagagatcctctttgtgctgtcgatggaaaagattgttaacatctactggaatgcttgggaaactctgtaagttggtgagaccctggcctcctagccaattgagatcatgtgactaaccccttgccagtggaatgtgatgagaagtgatgcctgcaacttctacttcccttgatactgaagaagaaacttctgaacctggacttccattctttctctttccctgttggctggaatatcaactatgtaagaatgttatgtctctgaatgactggagcggagctgcactcagacccggagcagtcatcttttttttttttaatgtccaagtgatttaatatggagtagtcatcttcaactgttattgagagagacaaaaacttgcccatttcttaaaccactgccttttgagaggggtctctttgcaatcaatagctgcttagcctgtgataacaaaatgcatatttcatctaaatgattttttttttcttttgagacagggtcttgctctgtcacccaggctggagtgcacagcacagcacgatcttggctcactacagcctggccctcctgggttcaatcaatcctcccaccttagcctgttaagtagctgggagtacaggcatacaccaccacaccagctaattttttactttttttgtagagataagctctcagtatgttgcctaggctggcctcaaactcctgggctcaaccatcctcctgccttggcctcctactaaagtgccaggattacaggcatgatccaccatacctggcctaaatgattctgaaagcatacatctgctatagtagttctaaactaaagttgcaaagttagtgaatgatttactttaataaataaaaaaaagcacaggtttagtattacctcataacgttgcttgtatcattgtattcctatattctcttaaatgtaagtgattagagtactcaagatacttaaaatcttttccataatagagtatgatgtatttaaaaagtagagacaaatgacgttttaaagcttgtgtaaaccatctacagcttttgtgtttcgtggagtcattcatttgatgatgtctgatcaatatatatgaatgtcctgtttccacctctggtacctattcatttgacagtgagataacatgcattaaagaaacctcatggtatttacatatcagctgaatgaagcaacactcacacctttaattagcatcttctagtggaaaatcaaggtaactgcagggagtgtaacagggagctaaaggaatatgtatcttcctttgcttaacagtggtcttaatcacccacgcctttttatcttcattagtgtacgagtaaaattgatacaccgtttaaatggtgactttatccatgagactgtgagattaaaaaacatctcaaacttaatgctgctttggaattgttttataggctattttaaaaaatgcttaacctatatatgccatatatgataattcaacttaatttattcagatagatcataacattcagttgactaaactattatttattaatttattttgagacaatgtctcttattgcccaggctggagtgcagtggcaagatcagggctcactgcagccttgaccacccaagctcagatgatcctcctaccttggcttctgacacgccaccatgcccaactaattttttttgtattttttttgtagagatggggttctgccatgttgctcaggctggtcttgaacttgcgctcaagatccgccaacctctgcctcccaaagtgttggaattgcaggcgtgagccacagtgcccagcccaaagtatcattttagagaaatggaagtgtttggtaatttatttgtataaataggcactctcaaatgttgtctagcttgcatcaaactcactagaaaggctggataagtcattgctaatttatatgtgtaaataggcactctcaaattttgtgtagcttgcatcagactcactagaaaggctggataagtcattgctgggtcctatccctaatgtttctgttatagtaggtctgggtgggatgcaggaatttgcctttcagatttctagcaagcttatgctgctctcacaaccacagtttgattaaccactgatgcaggttatgtggtatcttttcagatttatagaaaagtacacagaagaataatcaagcacctgaatcccattatcttgctttaacaaatattaaatgttttatcatattgcattagatccctttcccttttttaaagaaataacacactgcaaatgcagttaaatctgtgtacttcctctatcagctgatttccctccttccctttctgagaagataatgactccagaatgtaatcatcccatgttctcttgctacatgaatatatacccccaaataagtaattctgcatgttttaagattgtctgtaaattatacagcatgtatctttttgcaattttaaaaattatatttctgagattattgcatgttaatacaaagtccttcatagtcacatttataactgcagtgtaatctttaaataaatataccatatttatttattctaatgatgagcatttaggttgtagcaggcaacataatggttacacagctgaccacttttccttattttattttatttttgagacagagttttgttctcgttgcccaggctggagtgcaatggcatgatctcggctcactgcaacctccgcctcctgagtccaagcgattctcctgcctcaccttcccgagtagctgagattacaggcacccgccaccaggcctggctaatttttgtgttttagtagagatggggtttcaccatgttggtcaggctggtcttgaactcctgacctcaggtgatccacccgcctcggcctcccaaagtactgggattataggtgtgaaccactgcacccggcctgcttttctttatttacctccttttttcttgaggcctcttattcccccatgttctgtgagtattgcctctcccacatacagtcatatgcattgcttaatgctgagtatgttctgaggtgcaggcttaggtgattttgtcattgtgtgaacatcatagagtatacttagacaaacctagatggtgtagcctgctatacacctacctatagagtatagccagttgcttctaggctacaaacctgttgatatactgaatactgtaggcagttgtgatacaatagtaaatattatgtttaaacatagaaaaggtacagtaaaaattcagtataaaagattttaaaaatggtacaccagtgttgggcactaatatgaatggagcttgcaggactggaagcagctgtgagtgagtcagtgagtgggcagtgagtgaatgtgaaggcctgggacattactatacactactgtaaaccagtgattggctttagcatgggcatgtggtagagacctgactgatcaaagatacgtaaagagaggcttgagggaaatatttttctccctggataaaaagagagacatgaagatgaaccttccatccaaacaagatttctgaggaggaaaaaaaataaaaattgtattttaaaaaagataaatcttccagttttgaatatgattatgcaaggttatcttgggactctgagggtaaatttgagcgtgcttggatttttggtactgtcctagaatcacccatttctcctgacttctttttatgtgaaagttttcctctgttttacccactttggttgagtgttctgttattgcaatagttcacattagaaaaacatttacaatattgtaataaggattctctttttttgagacatagtctcgctctgtcgcccaggctggagtgcagtggcgtgatctcagctcactgcaagctgcgcttcccgggttcatgccattctcctcagcctcccgagtagctcgtactacaggcgcccgtcaccatgcctggctaatttttttgaatcttcagtagagatggagtttcaccgtgttagccaggatgtactcgatctcctgacctcatgatccacccacctcggcctcccaaagtgctgggattacaggcgtgagccaccatgcctggccccagtaaggattcttgaatgtgtctttgcgtgcctaagtgcaagggtaattaaaatggaacttgggggctgtagggtgtgttcatatttggctgtagtaaatgtcaagttgctttccaaaatggctgtaccaatatatacttccaccagacgcataaggtagtttgtttctttatattagacctttacttaacatctagtattgtgagatactaatttttgcctgttactgtcttagagccttatctagatttgaattgcctagattattagtcatcatgttgctgttttaccaacctgttttatgttcttttcatagttgtctatgtagtagtggagtttttttattactatatgtgctttatatactctggatactgatgttttatatacattgtttatatatacacattgcaaatatcttctagtatatggcttgctataagcttccccctcccctgccgccaccgagacagagtcttgctgtgtctcccaggctggcaggctgaagtgtggtggcacaatctcggctcactgcaacctccacctcccgagttcaagcaattctcctgcctcggcctcccgagtagctgggattataggcgcctgccacagcgcctggcctataagctttttttttttttatagtgtcctttattatagagtattttttaaagaatttagttaatcaaaaattttcatcatgatatgtgctttgtgtcttgcctaaaaaatatttccctatcccaaagacataaagacattctcttacattttcttctagaacttgttgataattttgcttttcacatataggtttttaatgttcttggaattgacttttgtgtgtagtgtgaggaagaaacattttcacagtcaatattattgatgctctttcagaactctgttccactccactggcctatctacccctgtgctagttctatgttattttcgttagtataattttataaaaagaagtctttaataccttgctaatcttctgaattgtcttgattgtccttgggtttttgcttttatgagtttttgaatgtgcttatgaagtctcaccaaaactaaacagctaccaggattttaactggcattgagttaaatttgtatatacacttgggaagattttatgtaccttatgcagtatatcccatctattcatgtagatgatgtgtttctccaggtttttcagttctttgctgtccttcaataacatcttaagtttttccttttagtggttttatatgtcttgttctaattaattctagaaaccatacaatgttgtttataattacattttgtgattggttttcagtgaagaaaatttgatttttataaaactttgtattgaaatagactgtgttcagaaagtacacagagcataagtgccatgaattatcacaaagtaaacatatttacataactactactgatatcaggaaagaccattacactttgcagtcccctccattctggtcttctcccaattattaccctctatctctctttcaaaaagtaatcatggccaggtacggtagctcacacctgcaatcttagcactttgggaatttgagttgggaggagtgcttgaggctaggagtttgagaccagcctggacaatagagcaagaccccaaaaagaagaaaattaaaactgagcgtggtggcacacacagctacttggaaggctaaggtggggaagatctcttgtgcctggaagtttaaggctccagtgagctatgattgcgccactgtactctagcctgggtgtcacagtgacatcctgtctcaaaaacaaacaaaaacccacaaagtttagttttattcctttttacctttatataagaattatactgctttctttggtgtttgtcatttttttcccaatatttgtgaaattcatctatgcatgaagctgtaatttcatttttattcctgtgtgatagatttttctgtttcatttatcattttgttgttgattaacatttaggcttttatcagatttttttttttttttttttgaccagagtctgtctctgttgcccatgctggagtgcagtggcacgatcagggctcattgcaacctctgcctcctgggttcgagtgattctcctgtgtcagcctcccaagtagctgggcttacaggcacatgccaccacgcctggctaatttttgtacttttagtaaaaatggttttaccatgtttgctaggcctgtcttaaactcctgacctcaggtgatctgcctgccttggcctcccaaagtgctggaattacaggtgtgagtcaccacacccagccttttttcagttttgactgtgatgaataatgattacgtgaatattcatgttggtattcatgtacatggatttctgttgggcatataccccagattaaaattgctgtgtaagtacataggcttacattcagcttctggcagatcttgccaaacagtttttcagaagatacaatctctaatactactgtcagtacacaagttccatttaactctatatattcttgcctacttttgatattggcagtattttatatttcagttattttcatggggtatatagtggtatctaattgtgattttaatttggtttcctgaagacttctgagctgaacatattttcatttgctttttaggagtttggctgctgttatgaagtgcttgttcaagttacctactcattttttcattgggtcgtcttattgtaattttcatattgatttatagaagttccttatatatttttgagtatacattgtggtagtcttctcccagtctgcagcctgcctttttagttaggttttttttttttttttggatgtctcttgatgaaacataaattcttaatttcagtgtaatatattatcaattttgtgttctatctcgaaggtcttaaaattagtctcccaaatcttcaagatctgcgctttccagtacagtagccagtagccacacgtctgttgagcacttgaaatacagttagactgaattaggatgtgctgtaagtgtaaaatacatgacagatttcaaagacatagtattaaaaagaatgtaaaatattttaataatttttatattgattagatgttgaaattataatattttggatataatgggttaaatagaatagtatgaaattagtttcatctattctggaaaacttcagaattacataattggctcttattatatttctagattcttgaagtatgcttgtccaatagaactttctataatgatggacatgttctgcgtctacgttgtccaacatactagccatttgctacatgtggctgttgagcaattaaaacatagtcagggtgactgagaggctgcattttaaatttaattttagttcatttaagtacccgtatgtgactagtggtggctaccattgaattggacagttctggacactttatcattttagcatttcttgtttcagatttatgttcaggagctattagcaattgatttttgtaatgatgtgaggtaagggtcagattttatttattattttcttttgtgtggaaacctaattgaccaagcaccaaggaaaagaccatcctttccggtttttagcttttgtcttctgttcctttagtctgtttgttattgcaccaaataccacagcatctttgataattcatagagtaaatgcttcaattttgttcctcaaggaatacatcttagccgttcttggccctttctatttccacatcaatattaaaaacagttaatcagttttcacaaaattctgagattttgactggggttgtattggatacatagcttatccagtcataacatgatatagccatccgtttatttaggtcttttatttctctcagtaattttctgtcaataatatttctctcaataatttctctcttttctatgtaaagttcttgtatgtctttggttagatacattcctagctatttgctactgttgtaaatgttactatttttgagttttattttctaattattgctgatatataggaatataatttattactgtccttatattcagtaactgtactaaactaacttattcttaaagattctttaaggcatgctgcataattaattctaccatttgtgaataatgacagtttcacttttctctggttcttaacatattttatcatgaaggaaatggagtaaaactttttttagtggattggcaacttccagagaattagattgttttgaatgtgtctaggtagaaactaatacttgtctctctctttaaatctctttaggaaaaatagaaatgaaggtacatatgcacacaaaattttgcctcatttgtttgctgacatttatttttcatcattgcaaccattgccatgaagaacatgaccatggccctgaagcgcttcacagacagcatcgtggaatgacagaattggagccaagcaaattttcaaagcaagctgctgaaaatgaaaaaaaatactatattgaaaaactttttgagcgttatggtgaaaatggaagattatccttttttggtttggagaaacttttaacaaacttgggccttggagagagaaaagtagttgagattaatcatgaggatcttggccacgatcatgtttctcatttagatattttggcagttcaagagggaaagcattttcactcacataaccaccagcattcccataatcatttaaattcagaaaatcaaactgtgaccagtgtatccacaaaaagaaaccataaatgtgatccagagaaagagacagttgaagtgtctgtaaaatctgatgataaacatatgcatgaccataatcaccgcctacgtcatcaccatcgtttgcatcatcatcttgatcataacaacactcaccattttcataatgattccattactcccagtgagcgtggggagcctagcaatgaaccttcaacagagaccaataaaacccaggaacaatctgatgttaaactaccgaaaggaaagaggaagaaaaaagggaggaaaagtaatgaaaattctgaggttattacaccaggttttccccctaaccatgatcagggtgaacagtatgagcataatcgggtccacaaacctgatcgtgtacataacccaggtcattctcatgtacatcttccagaacgtaatggtcatgatcctggtcgtggacaccaagatcttgatcctgataatgaaggtgaacttcgacatactagaaagagagaagcaccacatgttaaaaataatgcaataatttctttgagaaaagatctaaatgaagatgaccatcatcatgaagtaagtataaaaagatgtccgatagctgcttcgtaattctcacataattgtggtgcattttaaaaacaggataagtaacagtggagtattaatcatatttaaacttatttccatatgtttacctatgaaatatcaggtaatgttcatgaacagaatacattaaggaatcagaatcagtgtaaagatttttaagtatccgggcgcggtggctcacacctgtaatcccagcactttgggaggccgaggcgggtggatcatgaggtcgggagattgagaccatcctggctaacatggtgaaaccccgtctctactaaaaatacaaaaaattagcggggcatggtggcgggcgcctgtagccccagctactcgggaggctgaggtggagaatcacttgaacccgggaggcagaggttgcagtgagccgagatcatgccactgcactccagcctgggcgacaaagtgagtctccatctcaaaaaaagaaagaaaaaagatttttaaaatctgaatttcacttgtatttgtttgtttcttatattctcaaatttggtttcctcaaatccaaacgtatttttaagaaatttttttttgtagcacgtatctgaagacttaagtgttttaatgttgttagaaaatgtattccttatgaattatttgaccctccaagctagtctcttactgttattattgttagccatgttctaggtatttgaaaattaaaattttttaattgttgttcaacttgtcctcttgggaagtaactagaacagtttctagttcataaattgttaatttattgaattaactattgagtggttccaagtcattggtgtagctccaaagtcaggtattttgcacatatggctagcttgttttctctgtgtcactttatgataaggcctacttactcatgataattgtttttgtctcaggcctttcacagacttaggatgaatataaaaaggtataataataagaaactaatagtaatgggatgtcctgttttcctttaaaattttcatactcttgggtacttacacatttggttgactccttgattttctttttaactattcaccttaagcacattcattttagtttcattaaagggatgttgattccttgtttattctatttttagcattcttattaaagtttagaaaaacttgttgagtttgttgttcatatgtatagaaagtagcaccatcaactgtggaaaatgaccacatccttttctgtcactgtcgttgagatatgttttatgtctaggtaaagatctttgtgtttcttcccttgataaatcatcagctatttggttttcagcagttataaacactgattttaaaataacatatattaagatcttagtatgattttaaagtatgcattcattttattattattttcaaaaatttattttttgtaaagatggggtctcactatattgcccagactggtctcaaactcctcgcctcaagtagttctccagccttaacttcccaaagtgctgggattacagtgcattaattattatgacttaggataattaattattatgacttaggataatatcctagaatattttgttgataattacaagattttattgttcatttcctctttgtatcacgtccgtgaggtttgcattattagacttgttaatgctattctgataggtctgatgtatactgggaatctcatgattctgaaatgttcaatacttttaatagagtagtaccttatggtagttaagacctaagaagatcaaaagcaattaagtggtgctaaatagaaaaaaataaaaaataaaaaaaaaaaactaagaagaatcatttttctgtgtttataggttttgattttagtttttgatgggttttttttggtgccatagataaagccatatagtgaggtagcaagtcaataaacaagcatgcaaccagagcagatatatgtgacaaagggacagtgccaatctcttttgccgtaatattagatacttgtttttaaccatatgatggatccaaacttgtttgctatttgttttctgcgttgttttgttttttattatttttttctttctcctctttaatcagttttaagcttactttttttttttgtttgtttttaaagtaccagtggatgaagctgcctttatttttatcttccagttttgttcctatcaaccgacattgggctagaattttccaaaacaatatgcttttagagtgcatttggcaatgaaaatgtctatataagccattaaagtactctaaatctatttaatctgtttcacagataaggatcttgagtcaccgatgattgcaatttgatagggaaatgatttttctcatcatcctacgagagtcttggggatatagttgtgagtcatccttatccatgacagaaagtcattatctttcatgtgttggagtagaaaaattattaaagtccatgaaaagttttgggtaatatagttgagtgtatccctattacaaattcttattaaaaagttttatttgtaatagatatctatgtattacagattatttgcaagtaatatttagagtatttcttaggcagtaatttatttttttgcataatctccttaaagacactcttatttaatttgttttatcactttccttgcagtgtttgaacgtcactcagttattaaaatactatggtcatggtgccaactctcccatctcaactgatttatttacatacctttgccctgcattgttatatcaaatcgacagcagactttgtattgagcattttgacaaacttttagttgaagatataaataaggataaaaacctggttcctgaagatgaggcaaatataggggcatcaggtaagagagattttaagttttttctccttaaaatagtacctgtacttactttttaaactatagttgaattagaaaagaatcctaaattattgactttcttttgttgtcagactttaaatatattttaatcaggtttagatatgcatatttaaaagaaactgggggaagacgggggcacaatgtgttttatttatctcttctggtatattacaaagggatattttgctatggacggagaactagattaaaaatgaaatatagatttgtgataagttgattatttttgatgagcaaatataaataatgggaccccctaaataaagttatttgttcttctaattacttaacatttatcagggtgcctctgttgaaaagcaaagatgattaaaattttaaagacataaaaagggaagctactgtgtgtaaactccaggaatgtctgggaaatgcctaacaaacttgacatgtgaactttattatgggtatttctagagagcttcaactagggtaaaaccaaaactatttttaaatttctcttaggctcttttttcatcgtacccacttggctccaccttggtgttcacaggtacctcccacttaatatttcaaaacttatactccacacaaaatttgtaccccttaatggatcccaaatatcattaatttcattcttttgataaaatctagaactctttgactttctttttctcttttttttcttttcctttttttcccattctataatcaggtatgaagtccagttaaagctatctcttcagtatcttctaacttcatccactctgtcgtaacaattctggattttcttggttattggattgttgaaataacttcataaccttccctgcctgtgttcttgtccccttgcaagacattcttagcacttaaactagatttacctttctaaaatgcaaagagattctgacacagaattttttctttatagtgatagctaacattttgttaatacatactttttaaatcttatttacttaaacacatatcgcagacactgttctaagctgaattcatttactcctcacaacacttttatgagataggtaatgttactcttcccagtaacttttctgatatctcagagctaataagtggtagtactgggatttagtcctgtaaccattttgctatcttatgtgttgttttaaatgcatttttttttcactaaattttggcagtaatcctatgagggagatattatgatccttgtttttaaaaacaagataaggaaactgacagagcccacaaaccctaaggtttgtctgatgaaacctctgagtatctaatccctatgacattgtcttccaaattaagttagttctggtatcacctttgtgatttttcccatatatctttacactatttaatactttgtattttatcactaatatatattttttatatctctggaacatggatttgatgtgatgtgctagttatatttttttctcatacattttaggaaactgcatcatgctatattgttcagagccctttacttggcccacaaggctttccgtaatatgatcctccctgcctgccttgacattcttaacgctcatcattcatttctctcctcttttctcagttctaaccataataaactactgataatagattgtgccatttttctcccatccctttctccctcttcactttctaaacccccatgcctgactgacgactacgattcttcaaagattcagatcaagtattggcccttctgggtaaacttagtgaccatcctaggctaaattatgttcccttccttgacatctctagatgtctccctcatagtatagatcttgggggatcttaataattgaattaatctgtttttgttggactttagttgctttaatacagtgactaaaccatttaagctcttatgttgattgaatgagtacaattgcttaatattagtctataagcgttcagttataatccaggaaagatacttgttgaaatgtgtctttgaagatcattatgtgaatgtatcagtcagcctggtatacttcgataatgaatgttctcaaaattagttggattttcatgaacttttttaccatgaagtaatgaaaaactatgacggaattactgtgaacacagttctggatgaaatgccaaagacagagtggctttagaggatagtaattaaaatgagcaaaatgatgtatatgaatatggacttaaaactgaattctggcataataaaggattgagaggacagaatttttaaacatttcatagcataggaataaggtagacatcccattccaatgtataagaattttatttgagatagagatacaagtaaaaggaaatattattacataaaaagtaaagtcttctaggcacctacatttctatttctggttaatatctttgcaataggaaaataaatttagactagataaattaattataataacctatgctctctactaaaatacaaaaaattagctggatatggtggtgcggcctgtagtcccagctactcgggaggctgaggcaggagaattgcttgaacctgagaggcagaggttgcagtgagctgagatcacgccactgcactccagcctggcaacagagtgagactccgtctcaaaacaaaacaaaacaaaaacctatgtttattgggactttaccatgtgctgtactaaacatttttacaaggatatttcttttaatttattaaacccactatacaggcacttctgtttactttcatttggtgaggaaaaggaggcttagagaataagtcaggtaacttgcccaaggtcacacaaactgctgccaggtagcagagccatgctatgaactatagtattctccttctacaacatataatcataaccactgtgctgtaattcttatacttcctgttctactgtttcctcctgaaaaggttttggagagtgctttgctagaatataagtggcagagaaatgaggccagttttatagaattatttttagtagtattttgacagatttgcaagtattgttttaagtatagataagttggtggtttaaaacaaaatccaagaatggtcttcttggtaaacaagtggggctctctggtaagatgagtaaaaggagagaaagtggggctttgaactggatttgaattctgatcttcgaatagataaatttgtcctctttcttgacttcatgcttattgatcttggtggatgaataagcgccctgagaggcctagtccctctcaggtgcctgtaaattctcactgtggcaggagaaaggggaagctaggtctgagattaaacttaattaaaaataaaatagatttatttgttccttacagagaaaaatggagactgacaagattgatctaaagttaaaactaatagcttttttttcttattttgaaggcttctgaagattcttgttctttgttgttatgttacctgtggattatgacttttaatgagagttgtctgtattgtaatattgccataatcaatatattgtaatgaagctgttgacagatgcttgactatagcaatactgaaagttacagcttattcaatctgaaaagccttagaggaaattgtacttgctttgaaaacaaatatgttactaatagtgaatattgattagttgtttgcaggtggttattagcattgtcagaaatgcagcttgaattaattatgtgctgatagatgctaataattgttagagataatgccctgctagtaattagttttaatgactactgcaccattaagaaaggttaacttgttctatataaatctcccatagtggcacagctactacctcattaactttgttcaaagactgctgtaaacctaatatgctatatactgtgtatggtagaaatcgtttgtttcacaagattggctcatttagtcctagagttgaccctagcttaattaccaaggggggatgtgaataggctgctaagcattttgtgtcaattaaaatgctgaagcagtgtagaaaactgccatcttgcacatgctttgaaccaagttaattagaaagtttccacagatgagcgcttctttttaaaagaatgcattttctctctagataatgagaaagggagtcagtgaataactaagcttgaagacctttagcattttaagcaacccaatttgcagaataagtgaagcttgtttcagacatttggcgcttttttattgcatatggtatcttgggtacatataaagaaaacatttattagtggtatttaatagtttgtatattgttttatataaggtttttaaaagataccttttgtttagtttttgctttataccaaatgaattgtgattaaaaagcacaacaatttggttagaaatcaaaacaattttattaccaccattggttttttttcctacgtgtaggaaattaggatagagtttatgtaagcttaaatttaaatgttataaattctacaaataaagtatttaaataacatgggaaagtattttagtacagtaagttcaaaacaacttcccatttctgctcataggtcaaaaggattattccttggaagattccaagttgttagaaaaatgaactatcatttgaatttgtagtgcttttagaaaactgaagtttttttaaaattaataattcaggataagaagacatgttcgtaatgttgtatacttaggagaatagtagtaggactgttttcctgatgaaatagttgtccagaaatagttgcaatctacagaaaatatctggaaattttctgatttatctgaaaagggaaatctagctttttactccttatttgggactggcaggagtaagtgacaatgtgtgttacatgcaaaataaataattaaccttactacttatgtatatttttagttggcattgaaataaatatattccgataattttatgtagttataagtttgttttgtcaaggtagagatactcttttgcctgtctgcctctatcctaattagctcaaatttagaaggactgccatttggattaataaagttagtaatccttcctactttcatgtttaattgtactttatatttttatagattttcttttctgtgactccacctctatgaggtaaacacaggagtcataaataaatcatttggccaaggattctctgaaaagactgtgatgatttagtggagaaaacagtggattaaaaattagaggactggctaggagcagtggctcacacctgtaatctcagcactttgacagtctgaggcaagagcatcccttgaggccaggagttcgagactagcctgggcaacataaggagaccatgtctctataaataatttttacatttttgaaaaaattagctgggcatggtggtgcatgccggtggtcccacctacttaggaggcggaggcaggaggatgaccttagcgtgggaggttgaggctgtagtgagctgtgatcacaccaccgtactccaacctggataacgaagtgagaacctgtctcaaaaaaaaaagaggactttgggtttagttttaactttgctatttttagctatataaatgtttttaaactgtagtaaaattatataacataaaatttgccattttaacaaatttttttccaattttactgtgatgaaatacagtaacaaaatttgtcattttaaccatttttaagtatacagtttggtgatattaaatacattcataatgttacacaacgatccatactatctgcctctgtaactcttttcatcttgtaaaaccaaagctctatacccattaaatagtaactcctatttccccctctccccagaccctgggacctatcaatctactgtctttatgtttatgattttgattaagcatctcatataaatagaaccatacattatttgcctttttgtgactggcttatttcacttagcgttatgtcctcaaggttcatccatgttgtagcatcagcaatttcttcctggccggtcacagtggctcacgcctataatcccagcactttgggaggctgaggtgggcggatcacctgaggtcaggagttcgagaccagcctgaccaacatggtgaaacctcatttctactaaaaatacaaaaattagctggatgtggtggcgggtgcctgtgatcccagctacttgggacgttgaggcaggagaattgtttgaactgggaggcagaggttgcagtgagccgatatcacaccactgcactccagactgggcaacagagtgagactctctgaaaaaaaaaaaaaaaaaaaaaaaaaagaaagaaattccttcctttttaaggctgaataatattacattacatgtatataccacattttgcttatgcatttatctgtccatagacagttgggttgcttccacagtttagctaatgtgaataatgttgctgtgaacatgggcatctctctctctctctctgagaccctgttttaaattcttttggttatatacccagaagtggaattgccctatcatttggtaattctgtttttaactttttgaggaactgccatactattttccataatggctgtaccattttacattacccccaagagtgcacaagtctcccagtttctccacatctttgccaacacttgttttcttgatagtagtcatcgtaatggtgtgaggtggtatctcattgtagttctgatttgaattttcctaaagattagtgctgttgagcatcttttcatgtgctttttggcaatttgtatatctcctttcagaaaatgcctattacagttctttgcccattttttaatctggttattctttttgttgttgaattttaggagttctctatattctgaatattaatctcccttatcagatatatgatttgcaaatattttctcccattttatgtattgcctttttactctgttgataattgtctttttgtttttaaatttttatttcaataggttttttggggaacaggtggagtttgattacatgaataagttctttagtggtgatttctgagattttgttgcacccatcacccaaccagtgtatactgtacccaatgtgtagttttatcccttacccccctcccaccctttccgctgagtccccgaagttcattgtatcatttttatgcctttgtatcctcatagcttagctcccaattataagtgagaacatacgatgtttggtgttcaattcctgagttacttcacttagaataatagtctccaattccatccaggtttctgcaaatgccattgttttatttctttttatggctgagtagtattccatggtatatatgtgtatctatatatataccacattttctgtatccactcgttggttgatgggcatttgggctggttccatatttttggaattgcaagttgggctgctgtaaacgtgtgtccaagtattctagttgtataatgactttttttcccctgggtagatacctagtcatgagattgctggatcaaatggtagatctacttttagttctttaagtaatctccacactgtttttccatagtggttgtactagtttacattcccaccagcagtgtagaagtgttcccttttcaccacatctatgccaacatctattattttttggttttttgattatgaccattcttgcaggagtgaggtggtatcacattgcggttttgatttgcatttccctggtaattagtgttgttgatcatttttccatatgtttcttggccatttgtgtatcttcttttgagagttgtctattcatgccctgagccacttttagatgggattgtttgtttttctcttgctggtttgtttcagttctttgtagattctggatattagttccttgtcggatgcatagattgtgaagattttctcccactccgtgggttttctgttaactctgctgattattttcttttgctgtgcagaagctttttagttaaattaagtcccatctgtttatctttgtttttattgcatttgcttttgggttcttggcatgaagtctttgcctaagccaatgtctagaagggtgtttccaatgttctggtttcaagtcttagatttaagtctttgctccaccttgagttgatttttttataaggtgagagctgaggatccagtttcattcttctacatatggcttaccagttatcccagcaccatttgttaaatagggtgtcctttccccactttatgtttttgttggctttgttgaagatctgttggcgtatttggctttatttctggtttctctattctgttccattggtctatgtgcctatttttataccagtaccatgctgttttggtggctatggccttatagcatagtttgaagtcaggtaatgtgatacctccagatttgttctttttgcttagtcttgcattggccctgtaggctcttttttggttccatatgaattttaagatttttttttctagttttgtgaagaatgatgatggtattttgatggaaattgcattgaatctgtagattgcttttggcagtgtggtcaatttcacagtatcgattctacctatccatgagcatgggacgtgtttccatttgtttgtgtcatctatgatgtctttcagcactgttttatagttttccttatagaggtctttaacctacttggtttggtatattcctaagttattttatttgtagctattgtaaagggcgttgagttcttgatttgattctcagcttggttgctgttggtgtatagcagagctactgattaattttgtatcctgaaactttgctgaattcatttactagttctgggagctttttggatgagtctttagggttttctaggtacacgatcatatcaggaaacagtgacagtttgacttcctctttaccaatttgggtgcccttgatttctttcccttctctgattgctctggctaggacttccagtactatgatgaatagaagtggtgaaagtggcatccttgtcttgttccggttctcagggaatgctttcaactttttcccatttagtataatattagccgtgggtttgtcatagatggcttttattaccttaaggtatgtcccttctcagcaaaattgctgagggttttaatcataaaggaatgctggattttgtcaaatgctttttctgcatctatcaagatgatcttgtgattttgtttttaattttgtttatgtggtgtatcacatttattgacttgcagatgttaaaccattcctgcatccctagtatgaaatccacttgatcatggtggattaccgttttgatatgctgttggagttggttcactagtattttgttgaggacttttgcatctgtgttcatcaaggatattggtgtgtagttttctttttttgttatgtccttctctcgttttggtattagggtgatacttgcttcatagaatgatttagggaagattccctccttttgtatcctgaggaatagtgtccgtaggattggcaccaattctttgaatgtctgatagaattcagctgtgaatctgtctggtcctggacttttttttgttggctgtttcaatctcgctgcttgttattggtgtgtttctatattttcctggtttgatctaggacggttgtatatttccaggaatttatccatctcatctaggttttctggtttatgtgtgtaaaggtgttcatagtagtcttgagtaataatcttttgtatttctgtggcatcagcagtaatacctcctgtttggtttctaattgagcttatttggatcttctctcttcttagttaatctcactaatggtctatcaattttatttatcttttcaaaaaaccaactttttgtttcatttatcttttgtattgttgtttgtttgtttcagttttatttatttctactctgatctttgttatttcttttcttctgctgggtttgggtttggattgttcttgcttcaccagttctgtgaggtgtgaccttggattgtctatttgtgctctttcagactttttgatgtaataggcatttaatgctataaacttttagcactgcttttgctgtatctcagaagttttgataggttgtgtcactattatcgctcagttcagataattttttaattccctcttgatttcattgttgacacaatgaccattcaggagcaggttatttaatttccttatatttgtatggctttaagtgttccttttgcagttgatttccagttttattccattgtggtctgagacagtacttgatacaattttcattttcttaaatttactgagacttgtttgtgccttgtcatatggtctatcttggagagtgttccatgtgctgatgaatagaatgtatattctgcagttgttgggtagaatgttctgtaaatatctgttccgttcatttgttttagggtatagtttaagttcattgtttctttgctgactttctgtcttgatgatttgtctagtgctgtcagtggagtattaaagtcaaaactcaaggtctgctgtttagattattttgtcccactgggtgctcccttgatatggtgttctccccctttccttaggggagacctgagctacaggattgtttttgttcttctgggttcagccatccagcagagagctactgggctccaggctggtactagggagtgtctgcagagagacctgtggtgtgatccaccttcaggtctttcagctgtggataccagcacctgttcttgaggaggtagcaggagagtgaaatggacactgtgaaggtccttgattttagttttgtttggcgctctggttttgtgttggttggcatcgagccaggatgtggcgctttcaagagtgcatcagctgcagttgtatagggaggatcaggcgatgggtggggctatagagctcccaagagattatgtccttttattgcggacttttcctcaattcaaccaaagatgtggttcttgtccttcctcggtcatgaagatttaggctcgcagatggggtctgaagggtgagcacagcagggttttactgagtgaaagaaagaaatggggaaaacagactctccgcggggccggagtccctgctaaagtgcttctcgcttcgcaggtaggcatcccagattccacacaggaagaagaggggccaggcttctcccagctgcaaacagaggcaacttcctgaggctccaccccagtgcgcattcctctcagtgctcaagccagttggagtttttctggggaccccctcccacctggctgtctcactttgcctttggcaacctgggcaggtagagaaagaccaccaggttggggtagagataggcatggctgagctcagactctccttgggtggggcttcctgtggccgctgtgggggatggggatgtggttcccaggccaatggagttttgttcccagggggattatggctgcctctgctgagtcacacaggtcatcagggaagtgggggaaaactggcagtcacaggcctcaccacactcccacacaacctgcagtcctgaaggtgggtctcactcccaccattcccccggagaagcaccgagtctatttccaggcagccagtgagcaggactgagaactgcccgagatcaccagcctccccactgagaaagcaagtggactcacagtttttttggtgtctcagggagcctgcagaggcaatccagttcctccaaaggtctgtgaattctctcagctttttggtatgttgctgtggtagttcttggaggaaaagttcaggatgtgagtctccacatgctgctctgtccgagcaggagctgcaagctattccagccgcctatccgccatcttaatccgtaattgtcttttgatgcacaaatttttaaaatgtttatgaaatccagtttgtctgtttttttgtttttgcctgtgcctttggtttcatttttcagaaattattctcaaatctaatgttgtgaagcttttgcccagttttcttctaagagttttatagttttaggtcatatatttaatttaggtatttgattcattttgaattaatttttatgtatagtgctaaataagagtccaactgctttcttttgcatgtggatatctggtttttcttgcatcatttgttgaaaagactgttctttctgtcattaaatgatcttgcacccttgtcaaaaatcatttaaccatatatttgaaggcttatttccaggctctctcttctattccattggtatgtctgtttttatgccgttactgaactgttttgattactgtagctttgtgtagtaagttttaaaatcaggaagtgtgagtcctccagttctgtttttgtttttcaagtttatcttggctattttgggttccttgcagtttcacatgaattttaggatgttttttattttttatttctgaaaaaaaaaaaaacctatcattaggattttaatagggattgcattgaatctgtaaatcaacttgggcagcattgacatcttagcaatacagtccacccttaatatctgtgagttctgcatgtgcagattcaaccaacccaaggaccaaaaatatttggggaaaatataaaaataatacaagagtaaaaaaataacacaaataaaaagcaatacaactatttgcatagcatttatattgtgttagatattataaattacagttggcccttgaacaacgtggggggattagcagtgctaatccccgtgtagtcgaaaatttgtgtataacttttcgctctcccaaaatacaactactagtagcctactgttgaccagaagccttaccaataatatagtcaatttatgtcaacagtatgttatatctattatatattgtatattcttagaataaaataagctagagaaaagaaaatatattaagaaaatcataaggaatttatgtagaatttattattaattgtaaggatatgcagcagagaatttattttaagcaaagtgagagtttattggagaaagtatagtacacttggaaaagggccaagcaggtgacttgaaaaatcaagtgcctgtgtggaatctttaggattttctattcgttattcatattaactattcattaaatgaaagtgaatcatgataaaggtcttcattctcatcatcttcatgttgagtaggctgaggacagaggtggaagagggagggatctgttggtcttaactgtctcaggggtggccaaggcagaaaaatatccatgtattaagtggatcctcgcagttcaaacccatgttgctcaatgatcaactataatttaataatgatttaaaatataagagaggatgtgcatagattaaatgcaattattatgctatattacataaggcacttgagcatccacagattttggtgtctgtaggggggtactagaactaatttctgcagataccaagtgatgactgtattaagtcttccaatccgtgaacatggggtatgttttcatttatttgtcttctttaatttctttctgcaatattttgtagttttcttttttactctttttttaaatttaactttcaagttcaagttacacatgcaggtttgttatataggtaaatttgtgtcataggattttgttgtacagattagtcacccaggtattaagcctagtgcccattagttatttttcctgatgctgtccctccccaccttcaccatggaataggcgtcagtgtctcttgttcccctcatagaggggacagcctacagaatgggagaaaaattttgcaaagttatgcatatgacaaagctctaatctccagcatctataaggaatttaaacaaatttacaagaaaaaacgaccccattaaaaagtgggcaaaggacatgaataaacacttttcaataaaagacatacgtgcagccaacaagcatatgaagaaaagctccacatcactgattattagagaaatgcaaatcaaaaccacaatgagataccatcttacaccagtcagaatgttttgtagttttcattgtacaggtcttctacctccttggttaagttaattgctaagtattttattctttttgatgctattgtaagtggaattgttttcataatttccttttcagatggttcattgttagtatatataaaaatgcaactgatttttgtgttaactttgtatcccgctattttgctgaattcattctaatacttttttgtgtgaaatcttttttgttttttttaaacagcagagaatttattttaaggaaagtgagagtttattagagaaagtagagtacttggaagagggccaagcaggcaacttgaaaaatcaagtgcttgtgtggaatctttatgattttctatatgtaagatcaagtgcaaacagatgtaattttacttactcctttccaaattggatgtttttaatttttttcttgcctaattgtttggctagaacttccagtactatattgaatagaagtgatgaaagcaagcatccttgttttgttcttcatcttagaggaaaggctttgtctttcaccattgagtatgatgtttactgtaagtttttcatatatggcttttattatgtaaggttgtttctgtctgttcctagtttgttgagtcttttgatcatgagaggatattgaattttgtcatgtgctttttctgctcattgagatgatcatgtgggtgtttttttctttattctgttaatacatatggatttttatatattgaacttttattgcattccagcaataaatcccatttagtcaggttgtataatccttttaatatgttgctggattttatttgctagttttttttttctttgacaatttttacatctgtgttcataagggatattggtctgtagttgtcatttcttgtagtgtctttgatacctttagtatcagggtaatgctggcctcatagaatgagttagaaagtgttacctcctctttgatttttttggaaaaagtttgagaaggattggtattagttcttctttaaatgttaggtagaatttatcaggtccaggactttgttttgttggaagatttttgatttctgattcagtcttaccagttatagtctattcccattttctgttttttcatgatttagtcttggtaggttttgtgttgccaggaatttgtccatttcatataggttatccagtttgttggtttacagctgttcatagtattctattataatcctttttatttctttgtaatcagtagtaacatccccactttaatttctgaatttagtaatttgtatcttctctctttttcttagtcagtctagctaaaggtttgtcaattttgtgatcttttccaagaatcaactataggtttcattgattttgtttttctgctctctattcatttacctctggtctaatttttattatattcttccttctgctagtcttggcttattttgttcttctttttctagtcccttaagtgtaatgttaagtttttggtttgagatcttacttgttttttcatgtgagtgttaataattatctgtttttcccttagcactagtttagatgtatcccttaagttttggttgtagttttgttttcatttgtctcttaagtattttctaatgtcccttgtaatttcttccttgatccagttgttaagaatatgttgtttaatttctatgaatttgtaaattttccagttttacttcagtagttgatttctaactattccattatggtaggagaagacactttgtattatatttatatttttaaatctcttgagacttaatttgcgacctaatacatggtctatcctggaaaatgttccatgtgcattgatgaatgtttctagtgctgttttgagtagtgttccttatatgtatattagatgtagttggtttattgtattaagtcctctatttccttgcctgtctgctggatagctgttttattcattattgaaagtggagtactgaggtctccaactattatctcccgtcaattgtgacagtttttgttttgtatattttgatattctatttttaggtacataaacgtttataattgttttatcgctgtccttccttgtttcttgtaaccttttttgatttaaaagtctagtttgatattagtttaaccacccctgctctcttttggttactattttcatggaatatcgttttccatcttttcagtttcagcctgtttgtgtctttgatgtaaagtgagtctcttgtatataacacatagttgactcatgtgtttttattcattctgccaatttctgtcagttgattggagagtttaatccatttacatttaaagtaattactgataaggaaggacttctgttattttgctgtttgtttttctgtatgccttaatgctttttttgtccttcattcctactgctaatgtcttccattgtatttagttgactttttttggtagtgaaaaggttaaattcctttttcatttccttttgtgtatattctgtgctgttttcttgtggttattatggggattacgtttagcagcctaaagttaaaacagtctaatttgaatttatatcattttaacttcaatagcatacaaaaattctgctcctttacaacttcatctccacacctttctccacacctttcaggttactgtttagtgtcctttccccttgaaggactctcttatttcttacagggcaagtctagtggcaacaaactccctcagcttttgtttacttgggaatgtcttagtttctccctcacttttgaacgtcaattttgcagcatataggattcttggttgacaattttgttttttcatttaggactttgaatgtatcggtctattgccttctgacccacaaagtttctgttgagaaatctgcttgtaatcttattgagagcttcttatatgtgatgagttgcttctcttgcagctttcaggagtctctcttggtctttcaagagtttgattataatatgtcttggtgtgggtctcttgagttcctcttattggagttcatttagcttcttagatggttatattcatgcccttcatcaaatttgggaagtttttagccattatttcttaaaatattcttgctgtccctcccccccaccccacccctccccttcatcttacttgacttctacagtgtatatggatgttggtctgttggtggtaccctccaggtcccataggctctgttcgtttttagtcaatattttttctttctgttcttcagcatcagtaatttccattgtcctgttttcaagtccactgatacttcagcctgctcaaatctgcctttgaatctctctagtgaatttttcatttcagttattgtacttcgcagttccagagtttctttttgatttatctttagtttttctacccctttattgatacttccattttgtttatacattatcttcttgactttttttttttttttagcatccttcagacagttgttttaaagtcattgtctagtagatctgccattaggtctttttcagggacagtttctgtgattctttttttttttttttttttttttttaatgtgccttgcttttttgtttctttgtatgccttttggttttatgaaaactggacatttgattctaataatatgctaactctggaagtcagattcttctccttccccagggtttgctattttcttgttaaattgtgtttgtttgttattaatttgggttggggagggttattgttttatgctgtctctgtgggataaacataagattttcacaggttttttttgttttttgtttttttgagacaggatctcactttgtcacccaggctggagtgcagtggcatgatcatggctcactacagcctcaaccttctgggctcaggtgatcctcccgcctcagcctccagagtagctggaactacaggcatgtgccaccatgcccagctagtttttgtatttttagtagagatgggtttttgtcatgttgcccaggctggtctcaaacgcctgggctcaggtaatctcccatcacagcctcccagagtgttaggattacaggcatgagccactgcacctagcctatcttcacaggtcctttttgagcctgtgcctttccctaggcatgcatgattactttctaattttctccaagtatgtagttatttttgaattttccaatatttattgcctggctcccaaaagagaaaaaaagaagggaggaaaaagaggtgctggccttttaaatcccctggaagtcactttagccaggagagagatttgcaaaaatgaggagaggtacagcaacatggccacctgtctctgcctgtacttctgtgatcagaatcagtgatcagagtacagatcctcaatatttggggagcaaaatacattttgtctactctagctcctgtaattgtagggtcctgtagattgaattcaggacaccaggcacagcttcctttcaaaggactaaggatggcagatgggtagctgccactaaactaagagctgaaattgatcagaattaaccacattttaccatcgagctttctcctagaagttgcaagccttcaatagactacagagttccaaagtagttaacatcagacagattttgtcagttcatttacagtttaggaggcatacagatttctggtgcttcctactccacagtctttccagaatcctcctcttttaaccatgtttaagtatacagttcattggcattaattacaggatcatactattaaggccatgtttcatttccttcttcaattcttcaaagaaatactttagcatcctgctcccacttgtttaaaatttccatggaaagttcttctcttgtctacagctgatctgggcacaggagttttggcaccagttgagcggaaagtttgttcaactttaatttttctgtcagaattgtgttaggtcaaccagctgagatgtctgtggtgttgagtattgtttgtgctgttaattgttggtccttttcaattagggcacaagtaaattgatttttttcataatatgcattttccatgaactttttgaagaccctctcctagactaataaattccatgatcagataagttgggaaaatgctgcatattgtattcttctttcagagattcacattgcttattaaactgttagaggctctgaaggaacctgtgtaattcagcattaccaaaacttacttgattatcaaatttctcctccctcccctttgaaataccccctatctcatagaactaatgagctcagtttgagaaatgctagattattaaagttttttctagcagtataatatgacaatagctagtatgtggccagttcaagtagctaatcacaagcaaataatttagaacaattctctttttaaaggggcagaataattggcatctttgaaaatatttttataattttcaactctgtcaatcaaggcaatgtatatatgaaggagtaattaactatgttataatatttccagttgtgccctctatgttttatatgcaaaaacaaagttatcaaaagatataggatcaattttagtcctagaatttaggtctttttttttagtcagttaaaaatcttttgaaggtagtctttaaaatattttatatagcaagcatgctatacatatttcctctaaaagaaatagaaaaatatttttaaagagttaaaatgttcaaagtaatacagagactatttattgatttaagttttcttttcatcaaaacactattccacaaaagaactctttttgtgagacagggtctgactctgtcacccaggctggagtgcagtggcatgatcttggcttactgcaatctcagcctcccaggctccagccatcctctcacctcagcctcccaaggagcttggactacaggcacatgccaccacgcccggctaatttttatattttttgcagagatggggttttgccttgttgcccaggctggtctcaaactcctgaccttaatcagcctgtctgcctcgacctcccaaaatgcttggattacaggcataagcaaaggaccctgagccattaaaatatttttactgggtaattttggtgactaattctagtgcattcttggctaaaataattctgattaataaaaatttctaataactatgaagggttatcaggtgtttactttgtatatcttgtgtatttggggtcttgtctgtagttctggcagtccccattcacctatatttacattagtaagtaaatacattttatttttttctcctagagtatcttagagtatgaattactggcttttccaagtagtttagagtgcacattttcaagttcttaattgaagttgcttttaggctgttgcttttagaaaagttgcttctatattagatttttgccaaaataataaggagaaatatatttgtaaagggaaagttatatattactgtgtaagatacagtttatcttcaggttaatgcttttgttaccaactcactttgtcccatgtagttattgtaagttccctgtcctttttatctctatttttttcttcaatatgattggatctagagagctgcagtagttttgacaaaccatttttgatttagctggccaataactttattggctctaagacctcgtgtctaaaatttatacctatgactacttctgacttatttcattaagttcttccactgattttatttttcctgtctataaacgggacaaacaaactagcctggtgatcatcattaagttagcctataaaccttatttgagcatatattttttctttctagaataaggtttttgacatcagctccccgcggtttgtcatcccaacaatagttagttagagcaatcactgccccacccctgcccctgtgtttttttgttgttgttgtttgtttgtttgttttgagatagggtcttactttgtcacccaggctggagtgcagtggcacaatcttagctcactggaacctccgctgcccaagctcaagcgatcgttccacctcagcttcccaagtagctggggctacaggcatgtaccaccgcgcttggctaatttttgtatttttattccatatggagtttcaccgtgttgcccagactggtctcaaactcctggactcaagctatccgcctgcctcagcctcccaaagtgctgtttacaagcgtgagccaccacgccaggccgcaatcctcctcatcctttctttccactaaccaggatatattatttttgtaataaatatgatcctggttcctcaagaattgagttcctgctccttccttaatccaaaatccttgcaaggattgaagccattgaatccaaatctagtgggtagatcctcagccctctaatactggttgtgtttgaatcttattttgcctcttaggttacctatatttatgtgataggaattctcttttaagatacaggggaagccacagagcttctattagtgatagattatctattgttttaattcggtgagataattgagctaatgagtattggctatagtgttaacattactggatattgtgaatacaacgcccattggataaaacagttttattgataaagttcagcctttagtgggacagttagtatcatctccctatctttacttttccttgttgttgaaaattttgagttattttgatgaagagatgtattttttcaatattatatcacagacttaatataaagtctttcagcagatttatagtcctcttagatttgatttgaaaaatagtattttagattaaaatctttataaaattattgctcttcagtgagattttctgtagatagatcttaaaataagcagaattttaaaaactaataacatttctatttcattttaggccaataatagaaattgtaatgaaaatgtccagcccccaaaccactggcatatatttctgatgtcttacctgtttgtgaatgacctagataaagacatgtatacagaattccccttccccaccatacctatttttctttaagtcatattgtgaaaacatttctcttgtgttctgagccagttaaaattatatagtgacttttttttaagtggtaaattgttacagaaacccaaattggaggaatgggagtttggaaccaggtgtggagaaaaaaaatcaagaaaaataggactgaactaacctttgtaacaataaagctaccagtaataagacttttttgttatctcatcatatgaatatatttccatttggggctatgttacatttcttaaactctgtattagaaagatttacaaagattgtaacacgttaaatagatacttggcttttttaatgttctcaggtgagttttataattatattctttaaataaacagctttattgttgtggctctgcctttagacttgggaaatttttatttatagtttagctattaagtgaatcacagccttcagtcattttaagtcactggttcttatctcgtgggccattgaaggtactatttataacttgatctgagtgtcttaattctttttaaaaatgtttaagttagttatatgtcatatttttgttttgtttttaaacaatgccttaaagctttcataatctgggtaaaatagtctaccttctacgattcatttatcttatatttttattctttttggtagtctgttggtttaaattgttatactaatgttgactcttaatttcttttctacagcctggatttgtggtatcatttctatcactgtcattagcctgctttccttgctaggcgtgatcttggttcctatcattaaccaaggatgcttcaaattccttcttacattccttgttgcattagctgtaggaacaatgagtggagacgcccttcttcatctactgccccatgtaagaaatgtttttaatgtttttaaaaatttaaaataaaaatatttaagctgaaagggtccttcattagcaagctatagcacagtaatctagtatttgtattgttttatttgcttataggatgaagtatttttttctccattttcagagttttaatagcaatatttttttaaataaattgaatcattaggtcaactttgctttcaatagtctttaaaaaaaactcattggattaaaatttgcaatatcagtagcagtgagtggtcttttttatctgtgtagcatatcaggttaacctttaggagaaatgcataagatatgttgtaatgattatgcctgtaggtggtatgccatcagcatctttgagcgggagtaggcagatacactcagtgcgctgttttacacttagctctttatacatgggggcatttatcttttcacctgtcatgccagtccttttcttctctttggggacacttctaattatatgatcacaagcccatattcctagtaccatgcttaccaacctttttaaaagttgctctctataacctatcaatagttagttaggtagatagctgtctatcaccagctaagagtatttaattcactcttactatttttacttcaaattatgaaaacaatggggatttttcttttccaaatataaaattgaagtattgagtatttcccttctagagaatttgggagacaggattatatttgtgtgttgtgtatatctcctctcttctgcactcttggttgagaattccagatttagtatctacagcaatatatggcattgcttttttttttttaataaacaggttaatgaatcttaaggctgtgaatatgaagtttttgtttcaccatttctactagccatcaagaatagcaacagtttcctttagaactgggcctagtaagagttattgaagtgagaacagtatttaagtgctgttcaacttgtttttgtattaagaagggttaactaaacctagctgttacctttttgagtggtctgatatcctctgagaggtttagatatctctttggttgaccactagttaacaggaaaagaatacaaataaattttagaacgaagaaagatacctaagtgcagttatctaacttatgttctataagattactgttgtgatacttgtacatttcataatgttgaaacataaccttttctatacatacatttatgattgctaaagctttaaaatatagaaaattacatatttaaggataccctcttgctaactttccacagtatatgcagagatagcgaccttattacctctgaaataattttataagagaagaaattgatgaaataatctgtacaacaactccccctgacataagttgacctgtgtaacaaacctgcacttgtacccctgaacttaaaataaaagttaaaagaaaaaatatatgataatcagtttaagaaagaattagattacagggaatcacaagtgactgctggtgaattagtttgtgtgttttgtttcatttttactaaatatttggcatgtaagtagatcatgttcacttcaatttacaaagaacccatcactccctattgttacttctggcttgattctctcactgtagtatgtatcttattcttatagcatttgacttggtgtctttgagttactgtaaaatgtagtagtattttggacaactgagtaaagcaaattaaatggaagactaagtgagataatatctaggggagcactttaaaacttgaaaggtattttttctgtgtcatttaggagattataattattataatttcaaaattttaaatagcatttcaattatttgtttagaagttttatttgttcttattaatagtctcagggtggacatgatcacagtcaccaacatgcacatgggcatggacattctcatggacatgaatctaacaagtttttggaagaatatgatgctgtattgaaaggacttgttgctctaggaggcatttacttgctatttatcattgaacactgcattagaatgtttaagcactacaaacaacaaagagtaagtattttttatttatttaattttataccataaaactcaaaacaaaaattatccttttctgggtatatgctttccttaattatgatgttggtgtgtattaagtctcagttttgtaacagctaatctttagagtaaaaagctgactttggttttttaaaattaaatatgtggttgttgttgttgtttggtttttttgagacagggtctccctctgtcacctaggctgcaatgcagtgttgtgatcatggctcactgcaaccttgacctcctgggctcaggtgatccttttgccccagcctcccgagtagctgggaccataggcacatgccaccatgcccagctaacttgtatgtatgtatgtatgtatgtatgtatgtatgtatgtatgtatgtatgtattttgagacagattctcgctatgtggcccaggctagaatgcagtgacatgatctccactcacagcaacctccacctcttaggttcaagcaattcttgtgcctcggcctcctaagtgggtaggaccatagctgcgcaccaccatgcctggctagtttttgtatttttagtagagacagggttttgccatgttggccagggtggtcttgaactcctggcttcaagtgatccacctgccttagcctcccaaagtgctgggattacagacatgagccaccatgcctggtgccctctaactattaaaaattatttgtagagacagagttctcagtatgttgcccaggctggtcttgaactcctgggttcaagtgatcctctcaccttagtctctcaaagacttgggattacaggcatgaggcaccacaccctacatgactttgatctttgccatttttgttactacatttattttggcatttataatcaagatacagcagtctcagtttcagttattttgtgttacatcatacctaattgacttaaataggatggcaaaagatattttctaattaagtttattataaaaatgtgaaagtatgtaaagagaagcaagtttcatccgtcttcttaggtaatatttttaatcatgtgacttttattgtagtattttttaatgaaaatgttttcacacaaaaagtgttttcacacttcttactggaggtaagaagtcagattaagggggctttgtaggaagaaaataaaatgaaatgatggaaatggtgactcttttcaagaatgatgcaccactttggagatgatgcttgacgcttggttgaactgttgcttaaatactctgatggtgatgcagctgtctgtttcacctcacatttatgagaatacaaaaaatatctaagaagaattatcctccaagaaagtaaattcagggctgctgccattcactatgatttatactcctccctattcacttcagttcacatctgccttttaaagctctatcctgaatacatctcactaacatgtttgtgatactaacagtgattatcttcagtatattctgtttaagtaaagctttccacaaaaaaaagagttggaaaattcattttgttagttaattccagataccttttttgggatggtcaagatcttaaagatgtgcagtctacttttaagatacaattttatactatttttgtttctgttttgtttgcatatgtgtgtgttttgtatatattcctttcatgatttggaacagatctctgaactgggattcatgggagtgattctggtttacataaaacttatttgtgtgactatgactcactcctcatgatttccagtagttatctaaatcatgagaaagaaatcttacttctcatctgtattttcgtatcttatttcaaattgtatattttagttatatttagtcaggacatcatcacatttgtttgcctccaaaggagaggtgattaagatagcctagaaaagaagaatgataaaaggaactgggaaagttcaacttagagaaaagtaaaagagagctaacagtatttagattttgaaggggcttgtggaaggtgaagtaattaattctgatggacgagtagagaataaaatatggtgggagggatgccaacacagaaggggctgcagggaaacaagagttggctaagtagatgactgcagaataattcaaaagaggtggtggggcttgagtgagggtcatggcagaagaaataggagaggaaaagatgattaagggaattatttagatgggagaatcaagaagacttcttagttgattagatgtaagacatataagtatttaaaagttcatcactacaataaattagatattgcaaagtttgtaaagaagttttagaattgccaattgagcatctctaatgtgacaatctaagatctgaaatgctccagtgagctttccctttaaccatcacgtcagtactcaagtttcagattttggaacatttcagatttcagataaacaagttttttgttttttataatttgatctttttaatctcattttgaacctaagcttactggtgcttatacatttatttttgcaaagaaaactgatacaagaatggagtcaccaaaccatgacagcttttttgtaaatttgaaattgtgggaagtaaaacactggaagaacaccttggatgcagggagtgttctctaaatattaaatagtaaggaattctcaactatatcagagaagggaatctggccagataagtcagggcatctgctttatggtaaataggacaataagtaacctaagatgaaaaggttatggcattcttttgaagaaagggaattagtgatacttgagtagaatagacatttgacagtctgcacagaataatcaactgtttcagctttcaaaccacaagttaaataatacactagatgttgacttgtttcagcaagttggggaccttgagggtaatgatttgcaagcttctaagaaagtggactatcagaaccaaagcaattaaacaaaatctcagctggtgttttcattttctttaatttctatatccttctcattgacttttgtactattgttggctcctccttcccctttttccccttaactcatggttgccgttttttttcttctctttaggacttgtccgtatcattattttcctgtgaatgtcttaactcttcccagtttctatcggcttagtggcttacattaaccattacttctcttattctctgtgccaggattcaaatggggagttcctctctacttgccatttgctagagtctttaacactattacattaaaattcagcaggccactggattaggatgtatagggctggaaagtccaagaatacttcactccctgtctgcatcttaatgcttctccacatggcttctctttctaggagagaccaatcttcttcataggatagtggctggctttcctgagcaaaagcaaaagcttccagatctctataaagctagttttggaagtggcacagcatcacttctcctgcattctattgatcaaaacaagtcaaaaggctagccagaattccagggcaggggggtagattccatgtcctcatgggtggagcagaatgctcatacagggaggaaggaaattgatagtggccatctttgagattaccttatgctctactagccatgcaagcttacttatgcagcagttagacgacttaaacatctgaaacatagttaacagcctataaacaaaaccagcaacaaaaaaatgccatgccagtcagtaagcgtctcccagagaaaacttttttttcaacagtgttctagaataattatttgctttcttaaattagcatacattagaagcagaaatttaagttggaagagttgttagtggtagttacattgataaaagaagaaagcagtaaaagccagactgtgaagacatacagtaagaaaaatttaaacctaaacaatgaagtacaataattagtatttgtaactaattaaggacagattaaattatgttctccatctaagtccaaggtgataagaaaggatgcttgtctttactataagactactaagagtcacttactgtgataggtcctttcatacatcacctcatttaatcctcataaaaatgttatttttatttttacagatgagtattcttatattcaataaatttaacaaacttgcctaagtgtcagatggaaactacaaacttaagattctcactcaaatttgactcttctttacgtcacattcagggaaatatagattgcattaaatgtgaatgaaattcaaacaagctttagttttttggaactttctgttaccttacactattggataagagattttacacatgttatacacgtttcatttgttgcatctaataattcagtactgtgtgctctgttcttaacttcaaagtagatgaatggaacctcttagttgaatatttaaaaaaatacaaatttagttggatttttcatctctggattgctttactcccaagaattttttttcacgcccctttaaaataatttatatataaagttaacaccatttttacctgtaggtgttaatgagtcaatattgttgctaattgtgtcctcacattttatactaatatcagatactattttttttctttttttagggaaaacagaaatggtttatgaaacagaacacagaagaatcaactattggaagaaagctttcagatcacaagttaaacaatacaccagattctgactggcttcaactcaagcctcttgccggtagacagcaattctgactcaagacaaacttttttcttttttttttttcattcaaatttacatttaatttctatttacattcattcaatctgaaattaaataatacagtaaactaaatacaagatgaaaagcagaaaaggtgttaccctcatagcactcttaataaggcagctgaataatttatttactgatagatgcaaagccaacttgggataggagaaacaacagtttaaagagcaaacacatagatgaacctatctttcagatgttactctagatgatccactgagataatacttgtgctataaagataagaattacacaagaaaaagtactgtattaatcagcaacagaccacaggttatgcatgacaaagactttttttttttttgagacagagtctcactctgtcgcccaggctggagtgcagtagcgccatctcggcttactgcaagctccgcctcccgggttcatgccattctcctgcctcagcctccccagtagatgggactacaggcgcccaccaccacgcctggctaatttttttctttgtatttttagtagggacggggtttcaccgtgtcagccaggatggtctccatctcctgacctcgtgatctgcccacctcggcctcccaaagtgctgggattacaggagtgagccaccgcgcccggccgacaaatacttttatgatagtttgtctagcttgctagtgtctcctcctatgaaaaaaggtagatgtttggacattgatgtttttgagaaattaaccattttcaaaatctattcttcataaattcagcatttctcatgggaataatcttagatctagcccttgtaagctaggagccatatgattaaatattcaaaataggtcctatattaaatatatgatccaaggctcagaatattaatactatataagatgcatcttgtttataatcatttattacctgtggtaaagaatgttgaatttatagagtatcacagatgcattctccacccctccccctcagattatcttctgtctcaaaaaatagtgtggaaaaatccctcttgaaggattcaaattagttaaaaccataaaaggggaaaaaacaacataattttcctaaaaatctggttcaagttcaatatttaatactttacattattaatcactgctggtttataaatccaaatttagttattctgtaatgctacaaaccttttttttgagacggagtttcactttgtcacccaggctggagtgcagtggcgtgatcttggctcactgtaagctctacctcctgggttcatgccattctcctgcctcagcctcccgagtagctgggactacaggcgcccgccatcacgcccgtctaattttttgtgtttttagtagagatggggtttcaccatgttagccaggatggtctcaatctcctgacctcgtgattcgcctgcctcagcctcccaaagtgctggggttacaggcgtgagccactgcgcctggcaatgctacaaaccttataatcaaattagtaagcttaagtgattatattttaattaaaaaacagcatgtataaaataaaaatatttcctataatagctgattttaaagaaaataagtgatgaaaaaagcacataatctcttttatatacttacctggtataatcataaagaactctcttagaaactcaagactagtggctgggtgcggtggctcacgcctgtcatcccggcactttgggaggccaaggtgggcagatcaagaggtcaggagttcaagaccagcctgaccaatatggtgaaaccccgtctctactaagaatacaaaaattagccgggtgtggtggcacacacctgtagtcccagttactcagatggctgaggcaagagaatcgcttgaacttgggaggtgggggttgcagtgagccaagatcgcgccattgcgctccagcctgggtgacagagtgagactctgtctcaaaaaaaaaaaaaaaaaaaaaaagaaattcaagactagtaatactgacatcttttaaactaggcttgaatttttacaaataaatataaagaagcaatacagcataggtgtatgctttctgtgacactaatgtgacacttgacatgttttcatagtcatagtagggatatccatttatgaaatagaagttctcaataaactttccacagcaagggaaataaatttcacttaataaacgtgaagtcagaaaaacttatctatttgtgtggctggtaggcatgcaataaatgctttttatgcagaaaagttgcagtgtttgccactattgctggcagtactaattatgaaaacagtttaactggggtggttataccagccagtcacagcgtgcatgttactagtaaataggactgagaaggaatattttggtgtattaagtttcactggaatttggtcaggcagtcaacactacagttagtaaatacatttgaaaacaagtgtcagagtatcacaagccatttactgtctgaaataatgcctgtacatttcagcatagctttttgggttctggcttttcagacatcacaaattgtcagagaacgaggatctgcactttaagtacaattctgctctttatcattattgtagcttctaatttgccagctacagttaataaagttctcagtaggctgctgcaataagggaggagggggtctagagggagtaattttttttaaaaaaggctttctatccaaagatgaactctttccgaacttttatcttcatgctttccagtttttctcctcactttgcctgcttttgatttcagttccctcccgttgacctcatccggagcatcttttaaatctccccccaaacccaatttcttctttgtgtgtgtatgtttgttttgttttgttttgcttattttttaatttaactccagaaatcatttttctattagaatggcttctaaataattttaggaaattatttaagaattctaaaagacattcacttaagaaatgttcattgcactgctattctgtctaggtttaaattagcaaatatccatgcatttaattattgataaagcatatcctttgctataaatacaggaactgatgactcggttgtttctgaagatcgacttaatgaaactgaactgacagatttagaaggccaacaagaatcccctcctaaaaattacctttgtatagaagaggagaaaatcatagaccattctcacagtgatggattacataccattcatgagcatgatctccatgctgctgcacataaccaccacggcgagaacaaaactgtgctgaggaagcataatcaccagtggcaccacaagcattctcatcattcccatggcccctgtcattctggatccgatctgaaagaaacaggaatagctaatatagcctggatggtgatcatgggggatggcatccacaacttcagtgatgggctcgcaattggtaagtggactggaaaccactgtctatgctaatcttatggactataatatgtatgattaaatttggctggagcttaacaaatatatggttatgtatcactctggtcagttgatttttcccaaaggctacagttttgtgttcagttgttacatttggaggtgtaagggtataatttagtggggttttttagaacacgtaaacaaatgtctgtagtatatttctttaataacttgatttctcaaagtagagttaccatattgaaaaaactgcttaacattatattttcaaatgtatttacatatccctaaaagagaacagtttaatttcaatcctaggtttaataaatttgccatatctttgaaaaagcaaaaaaaaaaatttacaacattgaaaatccattgtactaaattcaaatatattagtatcttgctagagtaaacggatattaccagttaaagggaacattaaatgtgatcaatacataattttctttgagatccagactcttttagcacccagaagtaggctttggtttctttcagaaagcggagaccatgtttttgaatttacagtagctgtttttgtttttttttttaaatagagacagtctagatatgcttcccaggctggtcttgaactccaggcctcaagcaacccttctgcctcagcctcccaaagtgctaggattacaggcatgagccacctgctcagcctatagtagctgttaatactaaagaataaataattctgctagtagacctagatgcatttataaatctgacctcagtcctcaatactaccagacaagtaatactttgtgccatttattttccaggtctaggaaagttttgataaggatgttagccatttaaatccctataaagatcaatgtgagagagcaagtacaatcttagacttataagacttaaagttgaccatcaaaccactactttgaagttctgaaaattgttactattcccgagatattagtgagttggaaggctacaaaaatagagaattaaattgaatatggaatattgcttttattgaatagctatttctctagttgttacatacttattataccccactatatgttcaaaaactatagtgtgtaagataagtgagtcactcatatgttaagaaattaatttagataggcaaaagaaactgcatctgtcattaatgaaaatgtgaagagttaagatcagcaaacctcacttgttttttttcttatcttcctcaggtgcagctttcagtgctggattgacaggaggaatcagtacttctatagccgtcttctgtcatgaactgccacatgaattaggtaatataaccttaaaaattttaccagatttcatcaaatctaagacttccttaattgtaattgcattcaaatttcagagatgttcaagcataaaaaatggctgatggcaactatagtgtcactaattgtaagatacttcatgatgttaaaatatgaaaaaaaaaatgctccttaagattgatgaaatgttcatttctgtgtggtttcctttgcattcaataacatagttatgctgttataatgaagattatagattatgactggttcactaagtataacttttaaaaagaaatatttcttaaatgccacattttgctgttaatctacttttatttcatataccatgtagactatatttttaaaagaatcagggtaaagtttgtaattacataattgaaagttgtcctagatgtacctaaggcagtctttcttcataaataatagaaagttaatattgatgttcaaaaatgttacctggatggttattaaagatagataggttcttaactcggttactaaccagcactgaggttttagagtaatcatttatttccaaagctcttattttatgaagtaagaaggttggatgatttctgttttcattttatatattttaatattataatcttaatacccaaaaatctagtatgtgtttcttatgtgattttggtcgaatggaactgaatactcaaaaaataatctttaaaaacctatatttttcttttttcatttaaaaaaatgttttcttgtttattgatacactttcaactatagtaatcatatatattatgttggacttcattctttttttttttcgaatgcatttcccatttgcccttagaaatgagcgctagaaatgagctgcactttttttttctaaaagggaaatgggttacttcctcctcgctttgattcgctttcctgatacaacccttgtgtttcttaccttatgttacttattactgtgttttaaaactctccatcccgattacgatgagttaatttaatctgttgtttctgcccagtactcagaaatgtgctttcgccacattttacatatgtagcacctgttattggacacagcacgtggcctttaatttcctcccatcagagatagtgcattgaacatttctagacttgatacctgtcgacttctctgagatatacactcagaaacagaattgacaggtctagggtatgcatgctaaagcagtatgatttccaaacagcaatatctgaaagttcttgttgccacaaccctcccagcacttggcattaactttctttttttttttttttctttgagacagagtcttcctctgctgcccaggctggagtgcagtggcatgatcttgactcacttcagcctctgtcccctgggttcaagcgattctcatgcctcaagcctcccaagtagctgggactacaggcatgggccactacgcctggctaatttttgtttttttttttttttcgagacagagttttgctcttgttgcccaggatggagtacaatggtgtgatctcggctcacctcaacctccgcctcccgggttcaagtaattctcctgcctcagcctcctgagtagctgcgattacaggcttgtgccaccacgcctggctaattttgtagttttagtagagacggggtttctccatgttggtcaggctggtctcgaactcctgacctcaggtgatctgcctgcctcggcctcccaaagtcctgggattacaggcatgagccactgcgcccggccataatttttgtatttttagtagagacagggtttcaccatgttggccaggctggttttgaactcctgacctcaagtgatctgcctgcctcggcctcccaaagtgccgagattacaggtgtgagccactgcacctggccttaactttttcttttttaccaaggtaatggatgtaaaccatttcttttttattttagttggtatttattggtttaccaatttagtttctctccacatgcaatactactttggttttcttcttttataaattaaaaaacagtagcttaagatgtaaatactcattcacatggaaaatatctgagggaaatggagatggcattaatttgaaagaaaaaatgctaatgccacctttcgaatatgcaagggatttcttcatgtgttttctaatttaatttttctgaaaactcacctggctatgaaatgtctgtcatttgactgtgcgtaattgtcttgatttgtagtatttgctcattttgaatagaacttatcatataaatttcttgaaaaatcaataacttcttacataaagcagtaaaaatatattagtgcatacttggtgctaattccttggggcttgattctgtatggtttcatttaccttgccaacttcagacacataatcttatctcttgttcatgcccattatcctttatccagaccaagtcatcaccgcctttgtggtgtttttgcttagacagttttcatagtctttatatctctggttttattctgttgtagtatatcattgccagatatatctgcttaaatgtgatgttcttatgtaattaaagtcttccagtagctttcctgacatataaaatagagctggattttatatatttttttccccctgtaacagggtctccctctgttgcccaggctggagtgcagtggcttgatcacggcttagtgcagccttgacctcctgggttcaaatgatccttctacctcagcctcctgagtagctgggactacaggcgtgcaccaccatgcccagctaatttttgtatttttgatagatagggtgttgtcatgttgcccaagctggtcttgaactcctgggctcaagtgatccacctccctcaacctcctaaagtgctgggattacaggtgtgagccaccacgcccagctatgagtcacactttcaatgaccttcacttcttctctctacctagctttttagtgttacctgcagtacatcctgttacatgtttttcatttcaactaaatgcaattcaccaaatgtgtagtgtgggtgcctgaatctgtttccttgtttataccattctcctacatggctggcccaaatacttctattcctagtttatcatgttaagaatcttcaactttattactgtcttttacctcatgccttggattactgtttcctcttagttttattgtttgctttctcggggtccttcacccattttcttgttagatgccgtatttcttaaactgtagttttttaatgcacagatacgacgtcttatgctcttctctaactatcacatactgctgttggtctatcacatactgctgttagcctaactccacaaatcaaggctatcagtttttatatatgagttaacatgttgcctcatatttaatctttcacttaaaaactatttttagtaatagacttggataatcacgcatacacctccataatatactagaaaaacctccaactttccttcctgttcatctacccactacctggtaaatggagtgtcaggctacttcaagtttaagtgtggttttactgaattgccataaccttgaaggattcactcagacacagaattgaaaacaagttggagattaaggatggttaccttcttaccaccctttttctgtctgcaatttctcattgaaggagtgacacacaagggctgataaccacatgtagaacaaatgcattacatacattaatagctagggaagcccttgatacccaatgcagagctctggtaaaaaactggagcggagaactctgcttggaccaggaacccctagtgagacattcagacctcagatgtctacctgttttatcccacaaatcagaggctgagatgttgctactgctatgagaagatatgtcaagccagagtatactgaattttgctagagggaaaggagtgggcttttagaaaatgtgcatttttcctaatgttaaattgatgtaaactataccatactgtagctggataggctactagggaagaaacagtgtaaagaaatgacccagcttcctcttctggaggtgacagaaagggctctggtccttgtatctatcaacaagttaggaagtggtctagggaccataaataaaggaagtaaaaatatgattgtggagcctagtttttgccttaaggcacagcaaagggcactttttgtacaataggaccaggtcagtgtccctactctgatcagatcatctattcttactcggagaggaacaggatgtggagaaaggcatacaagcttcttcctcagaactcccaagcacagggaaaatcattcctctataggttgagttagaagcatgggcagatagagccagggagaagtccacttcccactttctaggttaagatgttgacaaagtagtatagtatgtcacatttcaggataatttatttgatctaaaacctattttgccctgttacatttttcattatgaattcttaaaacaattctgagatttccatactgacctcagacccttggaggaaaaacatgttttccaattacattgcaatacatggagactgaccctcagttggtaattccaagttctagtgttccctttctgaacagattgctgtttttcccgtggtatattcactgagacacagaattgaaaacaagttgttttagagattaatgatggttaccttcttaccacttacccctttttctctctgcagtttctgcaggtgttttttgtagttgtgtttaggaatgtgatacgtaaagacatatccttagaaccatagaataacatatagttcagggaatttgactgtaagagacatgaagaaattgaaagcatttgaggaaatagcaaactcacatctcattttgtgtttgctctctggtgtggtaatgggttaaattgcctgaattactaagtcactactctcttttctgtgtttgccgaacttatgtagctgaatttaagttacaatactactttgtcttatctcttcactgttttccaccttccttcaataaggaactgtataagcatttgaagaataatttacagaaaagcctgtagtaggaggaggccatctataggtaatgtaatgttggggaccatccagagggcaggaggaagacagccgcttccaggtttgaactcaggacagatcaaccacctgagtgtcgtctgcactctcagaacagccccagagtcttggactccaccagggtttcacaaactcctgccggaattctgagactcccacagagaggcttttgactgtggatggatgcagaattattcttgtggatgttgggatatgagtgggtcaccttccattttgacatcttggtctatcacaatttcccaaacattcttcttgatgttgagtaatgtgtttcaacttcaaggaaataacattttgattaaaaaaaaaaaatacagccatggggcaagggttagaaaacttacctattgggtactgggtactattgtgtagtataccagggtgaccagtcatacccccacacctcagcatcacataatatacctctgtaacaatcctgcacatgtaccccatgcttctaaaataaaagttgaaaaagaaaaaaatatgtagccatattattaagactcaattaagagaggttatagtgttgtacatttttcctttctgtcaaattaaggattacatagaaatttaaaataagattttcataatgtgttaaattgtccacaggaaattgaacattcattgtatacatttatgtagaattttaacatgtatacaaccattatttaagacaagaataaagaaccttaaaatatatacatgttttaaaaaatctcagtagtggatgttaacagatgttaacatctgtagcattggatctcattagtttaacagctttggcaggcacacctcattcattgtgctaatgatatcccttgtcagcaggaaggaaagaatattgatttatcaaaagatgaatagatttgcatgtttactataaatccctgctgtgaggattcctttgacttagttttaaaatgtttatacaggttctcactgagaagggaaatgaggaaaaagagaaaaatatgcagatacctttgagaatttataacctgagataagactacaaccaagatagattttaaaatgaaataattcacttgatacaaagataagtatacaaaaatcatttgtattgctatatactagtaatcaacagttgaaaataaaatttttaaaaggatctacttataatagcatcaaaaatatgtaatatttcgcttaaatctaacaatatgcatagacctacaaatcatcagtaaaagaaaccaaaggagacttaaatgaagagctataccaggttcagggaccagaagactattgttaagatgttaattttttcctatagacacagtgcattctcagtaaaaaatccagcaggcttttttgcagagatgaacagcttttttaaaaattttatatggaaaggggaaggaacttgaatagccagtagaattttgcaaaagggcagcaaagttgatttaagatttactataaagccaccgtaatcaaaacagttggaattggtgaaagagtagacacataaagcagtggaacaaagcaaagagtcctcacatatatggcaattaatcttcaacaaaagtacaaagaaaattccatgttgaaaggatgggatagtattttcaacaaatggcgctgtaacaattggacatctacatgcaattaaaaaaaaaggaagaaagaaaaatacctttgacccatatctcactatagaaaaaacaatgaactcaaagtaggtaatctaaatggagattcttaaaaatagaagaaaatatagaatatctctgtgtctttgggttaggcaaagtattcttagatacagcactaagcatactccattaaggaaaacagtcataaaatacacttcttacaaattaaaaattcttcacaaaagacagttaacaaaaagggaagccacaaactgggacaaaatatttggacaatacatatctgacaaaagacttcaatcatagtaaaacaaacagcccaacaaaataaaatagacaaaaagacttgaacaaatgtttcactgaagaaagtatacagatgagatttcagatgctggatttcaaattgtgggctgtcaaggatgtggaacagctagagctcctatacattgctggtggggatgcaatttcttataaaattagaaatatgcttaactgtgtggcccagtgaccccacttaataggtgtctgcccaagagaaatgaaaacttatgttgacataaaagcctgtttatgaatgtgtgcagtggctttcttcataattgctaaaaacggtgaacaacttaaatgttctttgctggtgaatatagataaataaactatggttcatctatggaatattactgagcaataaaataattttctgatatacacagtaacacgaatgagtcttacatgcattattctaagtgaacaaaatctaaacttgaaagactacatactgtgtgcttccatttagatgatgttctggtaaaggcaaaattacaggaacagaaagcagattgttggttgcctaagggcaagtggcctaaaaaaattttggaagggtaatgaaaaagttctagagtttaatggtgtttatggttatagggtgtatgtgtttgtccaaattcatagaagtctacatttttaaaaaatgaaatagttgtgtaattataccacagtttttaaaagtattaaatgaaaatagttcgccttgaatcttgatttgttaattcatgctgtttggttgttacttaggaaggaacttaaaccatcttgctatggcaacaaagttggtgtattttgtacccatgacaccgttgttcattgagtattaaataatgctcatttttaaacgcattattaaattataaaaggaagcaatgcattttgtaatctaaaagacacttctgtagtctcagtttgttttacataacctgctaaatgaaattgcctctttagcacagttggtgtgtgatttattgaaaacaaggagaggaaatttgttagggaagttagggagctctttccacagagaaaaagctgagaaagactggagaaaattaacgaaactccaggagagagaagagataaaagctgatattaaatccgggtctcagcaggagaattaaggtatttaggatcagaggagaaaagatgtaaggagaatagcattaggtgaaaactggacaattacaacttagaaaccattggtagataatctccttaggtacattatcttaactttccaaaacaatgctgcagtgtttagtttgtagcaatttgttggaaggtagaaataaaccttgcagtaatttctttattgttaacttctccttgttatagactatgaaccttgtaaccatgagaggtatagaagaataatagatcatgtatttttagatacgtagctgttaagatccttaagggaaagaaacaagcccagttagtattctgtatcgcaccttgcatatgctgagtgttcaataattgattagatgtttgttcatgtagtaactgaaacaaaattattatagtatgtaaagctaatgggtttttttctttcatacctcttcaaggtggaacaagctattgctttcgacccattagcttcaatactataattatctctagcatcattttgtccttccactgacacttctctgagcaatatttttttccccctaatgttccaacttcattatttttcataggcactagtcaagcttgcagataatgttccaactttagacagatgaataagaaaagtgcctttcttcttatttggagggagggggtggcgggaggagagtccattgaggatccttagaaaaagcatttcagtattttccctcctgtgagtttttgtcttacatcagctctgtggtcatggatgatttcacagtcaccagtgtcaccattcttcatcagcacagttagaaacagactttggagtatggcttaataagaacctggcatttgctctattttcagcattgtcgatgctcttcggagcctcagccagatatttatgtgcatcattgtagaagcacggaaaagtggtaggaagagctcttcattcttactacatttttagaattttcaggattaaagtttttctttctgggaaaaaaaaaataactgtaaccatagcataaaatatacttaaagcacctgttacctctgttcttccttaggccatttccctttgaagaaagggtagaagttcgagcagggaggtcttgattgttggttacaagaagagcggtgaccatgtttttttcttttgtaaaaatttgacatttaagttgtacagtagaattgactttttttgtgagtacagttctttgaattttaacatatatatagatttctgtaatcactgccaccatcaggatcagagtagctttgtcacccccaacaacccttgccccgtgctcttcctttagagtcgcagctctccaccatctctgtcccctggcaaccactaactgttcttcattattatagttttgtctgtttcagaatagatatataacctttcagatggacatctttcagtatcatgcctttgagattcatccaagtttttgcatgcattatggtttaataagtaaaatattttatatatcacataaaatactgttattaaaagtgtgtatctttttaatgctgattttatttgttttctcctttcagatttgtgttttaaatcctgtggttttaaaacattcccattgtttcttaattgcaggagattttgcagttcttcttaaagcaggcatgactgtaaagcaagcaattgtatacaacctcctctctgccatgatggcttacataggcatgctcataggcacagctgttggtcagtatgccaataacatcacactttggatctttgcagtcactgcaggcatgttcctctatgtagccttggtggatatggtaagatattttatatttttttgtggtactaaacctgcaaatgaaagaaatccttggaagtggtttgaagccaaactatttttgaaaatataactcattttaaagacataatatcctaaataatctcttaaggaaggacatttaagtaggaggtttccttttatggaaaccagttgagttgctgaaaatgtctgtccatcatgttactatttaaataatcattagtagtagagttataattacagaattattatactactttaaagactttgtaatattggtgtagaagtgttttatttttgttagcaaaattaattttttgagtttgttttatggcaaacaggagagaaatactattcctgttaggtaagccagtcttctggaaggaagtggtatatattccataggatttatgtaatttctcttatttctaaatttagcttaaagttaaatgtaaatgctaacaatttgttttattttgattttactttaataccccaaatatgttagacagtgtatttacagaactagcaattaggtttttatgtttgtttgtttgactagataggacatttactttttttttctggtaagatcacagtcttatttcaaaattatgcagccttttttttttttttatgagatagggtcttgctctgttgcctaggctggagtacagtggcatgaatatggctcactgcagccttgacctcctgggctcaagcaatcctcctgcctcagcccctgagtagctaggactacacatacctgccaccacagccagcaaaaatattttttttaaacttttttttatagagatagggtctttctatgttgcccaggctggtctcaaactcctgggcccaagcagtcttcctgcctcagcctctcaaagtgctgggattacaagtgtgagctaccacacccggcccagcctaaatttttaatcacagaattaatgcctatttatcatagaaggttttgaaaatgtaaacaattgtttctttttgtttacaaagttacctaggagtagtcatcttccctgctgacttttaatatctcatttcctattctcaccctcagctgataaccttgcttctgatttcatggggaacaccgaagctatcaatccacaagttctcatcatcacttctgcttaccttgctgtatctatgcccatttacattctttcctgttaccaaaaggaaatttcctagctggtgctcctgcaaactgttccctagaactgatcctctcgtgctgactccgttaaattctcctttctctttcccacaccatttccccccttctgctggattatttctattagcctataaacctcatattacttctcccttcttaaagaggtgggggacctctcttagttccaacttcccctttagctatcaccctattgctgctctcttttaggatattttggttggttttgttttgggttattttttgagacagggtctcactttgttacccaggccggaatgcaatggtgcaatcatagctcactgcagactcgactccccaggctcaagtgatcctcctgcctctacctcctgagtagctgggaccatgggtgcacaccaccatgcctaattttttttttttttttttttttttttgtagacacggagtctcactatattgcccaggctggtcttgaatgcctggcctcaaacaatgctccagcctcagccttccaaagtgctgagattataggtataagccaacatgccctgcccattgtttatttttaaattttcctctttttttgagccaaacctaagcaggttttccccctgacttttctgccagaactgcttttgtcaaattaaccattgaccatggcatcgctaagtctgccagtcattttccagtcttcatttttcttgtcataacagcagaacttgacagttggtcattctcttttctttgaaatgcttttgtgtcagtaggcttctgtttgtttgtttatttgtttgttgtgagacagtcttgctctgttgcccaggctggagtatagtggcatgatcgcagctcactacaacctccgcctcctgggttcaagcaattttcatgcctcagccacccaagtagctgcgatgacaggcatgtgccatcacgcccagtcttttgtcagtaggtttctataataccacaatttcctggccttttctccaccttgctggcttttctcagactctttactggatcctcctcttctccccctgcatctaaatgttggcaaaagatgtaagtaatttcatctagtttcatggctttaaatatttgttggctgatgattcctaaattcgtatctttattataggcctttcctttaactccagactaatccaactgtacttgaatgtctaaaaggcattgtgcacttgacatgttcagaacagctcttgacgttgccaacactactacttgaccagcctgtcttgcagaagtctccatctcagaaatgatgatacctctattcttctagttgctcaaaaagcttgagtgttgtcctttgactcaactttttgccctcccacatcttgtttgccagaaagtcctgaggcctctttcgcctaaccacctgtaccctcatcattttcatccaagccaccaccatctttctctttttaactactctccctgctctgtccttgccctgccttccaactctgtatcagctcaactagagcaatccttttaagccatagatcacatcatcacatttgtatgcttcacattgtggtttttcatcccattcagagtaaaagtcctaaagttctttctttgacttgcaaagtttttcatcatccttgaacatttccactcccttgtcctccttagttttcctatccttacttcaaatcctcccactctccctgagggacattctgcgtcagggctgtggcacttgctgatcacccctccggaatagttttcctgcagacgtcctcatggctagctcctgcttaggaggcatcttatctaaaatttaaatctccccttcaacatttcatatcctctatccctgctttactttttctcctttgtacgtgtatctcaacctattaacaccattttacttatttatcgtgttcattgtcttccccactaagatgtcagctctgggaggacaggcatttttgtcttattttatatactgctggaaatttagtttatatatagttagtatttccttacatctgtaacactagaaagttacagatacaagaagaatgagtctttacagaaaggatttatagtttaatgaagaagaaaagtcataactacagttattttgatatgtgttatgatagagttttgcaccatgtttgtggaactacagagaggctggctaaaaagttggggaatagaaagtttttccatcaaaaaaatccgagctgagtcctaaagaatggagtttattagaagcaaggggaagggtcgtatgaggaagctgaatgatttataacatcattcctttgaacagtaagtctatagctaggactatattctgaggaaataacatgactactcctgataaaacaagcaaacaaaaataaaacctcactacgtggttctttgcagtagtatttataatgtcacaattatattggaaacactctaaatgttcaagagaaagggaagaaactgtccacatatattttgtgagattttaatgacccagaaattgggtattttctaatgttaagtaggaaaaaatggatccatattgtcgtcaggtaggtgttggccatatcctgacagtcgcacaacatgccataccaaaaagatgagagtttatcttgtaaactttggagagccatgaaaaagtttaagcagtagaatgacatgatcacatttttgtttcagaaagactttggctctatggaggaagacttttattgatttaaagccattcaataagatatcaacagtaccagaagttttagtttgagatacctataggataaccaggtggaagtatctagttgtagaggactttgggtggtgctgtttatcaatcagtatcaaagcatttttatgtaatattttaaacaaatatggccataccggtaggtgttggttggctcttagctgtggttatgacaaacagtgtgggtgttgacattcaggttagaattaaatgtggcaaagccatagttcctattctagttggtatgtatacatatctagagggcatatttctgtaaaacatgctgcatattgtttatgcttaagtatttaaggaaagtcataatgaaaaatctttgtaacaataaaaacttggaaggaggagaaaggatagagtaaaatagtcttactagaaccatatgtaggaagctgtcagtttgaagggccagatagtagatggtttaggctttggggaccatatggtttctgtcacagtttttcaactctgctgtggtagtgtgtggttcctgggacagcgcctctgctgttgtagcacaaaagctgccatagacaatgtgtaaatgaataggcatggccagattcagcatggtttgccaacccttagaccattagttgatttgataaagtgattttgtgaatggtttggacaagaaaataatctttactagctattatataccattaccatagacttttaaacagaatttatgatagcatgctgtagttcttaaatatgacctttaagagattgctaaaatataccatagcactgtcagagcatggtggttagattaattgtacccattatttaataacaaataatgatgtttcttcctagacaggaagaagtatgaattaagaattatgtgacttaacactagatttctcctccctaaacccaaatcaccaagatactgttttggagcaaaacgtagtgtcccagagggtagcatatcagtgtcatctttctgtagataatgactgcaaatttgaattatgtttgcagaaaagtgaaagtaaaaattggaagtagcaattccttcacaattttagattaggtttgggtggaaagaatgtatgcctataatgatgcaaatgtatttcttccacaaatcttatttacttagacaaattaaaggaatttaatttttatattttgaatctacagattattcttagatgtaatagtatgtggtatgctttagaaattaagtatataaacttttcttttcttttttttttgagacggagttttgctcttgttgcccaggacggagtacagtggcgcaatcttggctcaccgcaacctccgcctcctgggttcaagcagttctcctgcctcagcctcctgagtagctgggattacaggcatgcaccaccatgcccagctgattttgtatttttaatagagacggagttactctatgttgttcaggctggtctcaaactcccgacctcagttgatctgcccgcctcggcctctcaaaactgctgggattacaggcatgagccacaacgcccagccatatataaacttttcaaagcactgtgccttcaaagatgtgataattttcagaattttgaaattttaacaatattaagagaatacactgtgagggcagtgtgcatgacttggtactagttatgctggatagctctgctaggttgttttctgtgtctgttattggaatgaaagcaatggcataagggcatagagatgccaatttggatttgtccccaagtatctctttgctgtcatgagcagtgggaaataagaatttcaagtggaaaagagtgaagaagtgaaaccattttgaattaggccatttcccaaaagaatcttcctttttttttaaaaaaaaaaaaaaaaaaaaaaagtttttttgagatggagttttgctctgttgcccaggctggagtgcagtggtgtgatctcagctcactgcaacctttgcctcccaggttcaaatgattctcctgcctcagcctcccgagtagctgggactacaagcgtgccccaccacgcccagctaatttttgtatttttatgggtttcaccatattggccaggctggtcttgaactcctgaccccatgatccgcccacctcggccttccaaagtgctgggatttatgggcgtgagccaccgtgcccggcccaagaatcttgctttcttattgagtttaagatacattagtaaatgtgggaattgtggtgatcggtttttggagtgtcttattggtaataagttgctttatgctttagcataaagtaaaatgtcagaatttataaggtcagtggatagtaactgtttgaaaaatgactaatgtgcatattttaagtgtttgttgtggggggatgaggaggagggaacagagttagtatttcctagcaaaagcataaaatttcttcagtatttgactaaaatacatctggtgggtagcattgtgttcaataaaataattattttgtctgtagttacacttcagtcactaattttcttaagtaggaaaatgtttttaaaaactgttttgagcagaagtattatacaaagtttaatgtgaagatttatttttctagcttccagaaatgttgcatggtgatggtgacaatgaagaacatggcttttgtcctgtggggcaattcatccttcagaatttaggattgctctttggatttgccattatgctggtgattgccctctatgaagataaaattgtgtttgacatccagttttgacctttcccagtaatcactgttgattacgagaatgttaccatgcagctttgcatctgttccttgtactgtatgcacattgctcaaaggaaagtcagtggcttgcactacttacaagtttcatagatttgagcctaaccacaagaggctggtgcttagtactgttttccctgcacgtaggggtcttttaaaaatataaagcttgtgataaagagaggagaatatgggactccatgaaccagtgttgatatgtttgattaagacttttcacaaaataatcatataaaacactagtctctttattagtagaaacttctgtggctatgcagaaatagagatcgaaccaaaaaaaatcatttaaactttaaaaatattttaaatggactttggggagacattttttgtgtgttttaagaatgaattgtagtgctctttaattcagctacatatattcatgtggtgatagggatcaacttgacacaactttgaaactgcataaagtagacataggaactagaggaaagctcaggctgcattagagtatgaatttagcattgggaaaagcccttattcttgaatctagagttactatttttgtatatatttgcatagtgtttaaacctgcagcctaaactactgaaatttgtgattgtatgtttgtgtgagcttcagtttaatgaaagattcataatggttctttgtattattataatacttggtgttggggtgttctttctgttttgttttttactttaattttgttttgatttttttttttttttttggcgggggtaggtgagggtttggagcatgtggtctttttaaaaaattgtaaccctctagaaaatatcaaagaaatgaaccagacgtggtttaaatagttgattttcctattttaacagtaccaactagttaattgggaaatgtaagttctgaatgttcacattgctttaccagtttggcactggaaccaagagcacatgtcgtggctggctacaaggttgtaaagcagaaaatcgaagtttaccatgtctgtaatgtgtacatgaagtgtcaatttagaacagttactaggataaactccattattgccatggctgtcatggtacccaagtgacttggaagatgcatttaaattactcagctgaaatcacttgatcatcttgtgccaagatatgctgttggtgcctgatagggattagtcttttaggtgccctgttctcctaccataattgtgaatgatttgtgagaagtgcaagccatgtttatcctgaatttttacttaataatttgtattactagtcatatgcatgtagctttctgtttacatcctatgccacatggtcttcatttatgccaggtaaactgtatttgaactatgtgcagctagctttgttttaatctgcttggcaaccagtgtagctgctgtaacaatctatcttattgttcaaatatataagagccaaactcttttccattccatctaaaatgttttcatttagtactcttctttcctcctactctatgaacttcaaaacaaaaacaaaactttgagagcagcacatgcatccaggtatttatagattattgccagtgtcttttctgtatgctataagcaagggagcttaggtgttatttctttaatttatgcttgaatctgaaaaattatttctgacttactccatggcctccttataataagtagaagttttatatataattaattttcagcattgggcactgaattaggacagtcctcatctcattgcttggcccttcaagcaacctagctaaaaggtgctgatattttatttagtactgccaacttcaagtgatttagatatctatctatctatctagatttctgaaccaagatatatttatagttcacttttgggtttttatacccacggtaggattctgcattccagcattaaatctgcttcattttagaacctttataaaagcaatagctggaatatactcccagttttaaaataaataaatgcctgattgatttaaagcaagtaggttatgctgaagtatataaagaagttttatattctctcaaaaatggtattatctttctttatttgctagattcttacaaatcttttaagagggctgtaacagttgctgctagtattagggttccacatcattctaatgtatagtttcaagtcttaatagacaatctgaattccactacatttcttttggctccaacattccttttagcttgaccagtctaatttaaaatgtgtttgttggaggtcattaacgttacttgtacaatgctgtcactgtgtgacatccatatgaattttggtatatatcaatcaatcaatcaatcacattgcattcaatcaatcagctgtgattgattgattatgcttagaaatactatagtaactagatgcagtgtgaattttttccattaacaaacaaacaagtcagtggcttaaatgtgattatggtcctgcaaggtgattcttgctaaaatatctaaacttttgttttgttttaactgaatcattttttaacttaaaaagctggaaaatatcaaatgctgttttttttttttcattgtcaacagtggtgtgtcattttatgtatgttcctaatgcttatggaactcctccaaaataaagttactcaaagagagcaaatatgccagtgtgttttctttagtctttatttcagaacatttccttacatttaagtatgagtcatattaagtttagctgcatttgctcataagtaaattcataattataactttagtcaaatgtatttaaacaaacaaaaaaaaaggtttaagtagtaaaatatgctttctctactcagccagccaacaagaaataaataggaacaaggaaatgatgtcttctggttatgaattaagttgacataacagtgctacacctcgtccaatccagtgttccttgggttggtcagagggaagagtcatggcaatcacaaaattcgtggaatggccagtggtggataatactcctctccgctcacttgtcttatacaatggagcaacataacttggccgttttggtatatctgccctcttacagggctttagccacatctggaagaaagtacataacacctctttaagtcaaggctgtttgttaaatgtacatgtgtttgagcctactatagtattctcagagtaaggttatgcatgcagatttctgtggcccaaatttattttcaccagcagtgttgttgtgattgctcaaaacattttatagaactctcataactgaaaaaaatagttttcgccttctctttctaaaagcatattttctacctatttatctctcactcagccacaattacctgggaaatgacttttagtgcttacaatgataaaaaaaaaatcagatacactttcaaaggagagaattgccacactgatactgagaatcatgtgcctttatattaattgaaagccagtcccaaaaaattctgaagggatttttatcaacagctgtatagctagagaaccttcccattttaggagactattataaaggagatagatactatatatattatgctgtttaaaatataattgcattcctttataaccacaatctataccccattctttttagtcattaaattcctacaatttgttattagacctcatcaatcttaaaaataagattttgaggcagtttgatctttgaatgtaagagtaagaacaaactatgttcataaagatattttagaatttaattcaatttatttttctggagtggaagtaatagcaatcctcgagatgataggacttgacagccccaatgttcagacccctcttttaggtttctcaggtcaaaacacagattgttgaaggagcttataaggatgccagtttctctatttctcccacttaactgtggaatccagattttcataagggggatccacaaggcagttttgcaaatactaactacaatgtaaaactcgaagcactcttcctaactcagatttcatttcaaccccaggggatttttctaatgagaatttttatttctaactagctgcttattcaggagaatcattatccatttataaattaatttcttcttgtacacactgcaagctacttaagagtttccatgtgaaagaaagactaaatttcgatcagctcctgaaattgcatttatttgtccttgaaactttcaatttgggtcttgtattttaaacttttgtgcccatggtattttaaaatgtatgacagctttctcgcaattggctgtcagttgacccctcactgatcctgttacagttgctctgaaggggtttttaacctgtctttgagctgctgccagaatcctgcaaagaaaattcacataaatcccactgcctatattttatcacagcatcccagatctacccttcaaattgctattttcttaagccattttctcatgatgcagttatagattgaatcttaattatattttacaaagcttaatctgccaatactggataggtgcctaggaaatgtggctttttaaattgatggtttttgtaatctttaatctgcaaatttcacattttcaagtcaaagtataagaaaaatataatgaacacgtgtgtgtgtatgtatatacagtggacctcactatttgtggattccacatttccaaatttgcctactcaccaaagtttatttctaatcctaaaatcaattggcagcattgtcgcgctccttggtggacatttgcagagcatcaaagatttgcatcatccaacacacgttcccagctcgggttgaaccaggtgaggctctgctttcttgtttcacctcataaccgtaaacaagtgtccttttcgtggcctatttagtaccaggtttttcacatttttgtgtttttgttggcgatttcactgtttaaaatgacccccatgtgtaacacagtgctgtttttttgttttgttttgttttggagatggagtttcactcttgttgcccaggctggagtgcaatggtgcgatctaagctcaccgcaacctccacctcccaggttcaagcgattctcctgcctcagcctccctagtagctgggattacaggcacctgccaacacacccggctaatttttgtattttcagtagagactggggtttctccatgttggtcaggctggtctcaaactcccgacctcaggtgatccgtctgccttggcctcccaaagtgctgagattacaggtgtgagccactgcgcccagccagtgctaagtgcaagaaggctgatgcgcctcatagagaaaatattagctcatgcctcaacgaagctcatagcattttgaccatgagttaatgttaatgactcaacattgtgtattaaataaggtgtctttaaacagacacaaaataaaggttatttactgatcagctaacaaaaatgttgtgaccaaagaaagaaccctgtatttatttccccaggagcaatggttcagtatttgctaattcaatgttggaagcaactttatagaacataattaccatgaataacaagaattgactgtatatgtgtgtgtgtgtgtgtgtgtgtgtgtgtatatatatatatatatatacatatacacacacacatatgtatacacatatatacacacaatatggggtctattttatatataatatataaaatatgtataaaataattccacatgtatatataattagaatttactaaccacaggcactgtatcataaagaattttgggatgcgattctgcaagtttcttgatctttctattccaggaagctccatccagaaataatccgtgaatgaaaacacctaaatataaaagaaacacattaatataacacttgaaatatgcattttgattgagttctgaatctgaaatttctacatgtaagtactatgcaggtgatactagatttgcagcctaagatttgttctccaatgaaagcaatctcctgagtgttttaacatccatatttcaagaacattgaaactttgcctagtgaaataagacaatagtaaaattaggtgtggaagacgagaggaaagaaattttaaacaggtctatgggaagttctcagtgtgtgtgtgtgaacattatcaaatttatattgttaattggtcaatgattatactgtgttttcagaagctgtgaaatctagggaaaaaaatagttcttaatgtaatagggatccagtggtggctagtgggcagcatatgaacaaagtacccttctgcagatctctaatgtcgtaagaattaaattgctcctccccttttagaatttattcttactgccaagagctctccttagtctgttgatgatgaaagacacatgatgaactctctctagaatgtcatgttgtacactaacagctaaagagtacaatttaggcaatcagtgaaacatgagttactttctttggctttacatatcagtaaagcctcatggattggagtctgcaggtaaaactgattgtaacagtacagatgtcaagcaatgtagactttgggaagaccaaagttttagttcctaatttgttgtgtgaccttgagcaattaatttaacttcaaaacctgttttgtcatctggagaacaaccttaaaaacatttgtaaaatagtaatatctgttttgtccaccttgtagagttgttagaatcaaatcagctaacatagggggaaatgcctttgtagagtagcatatgaaaatctacttgagcagtgctgtccagtagaacattttgcagtgatggaaatgttctatgtgttgtcctgtatggtagccgctagctataagaggctggtattagtaagctgaacacttgaaatgtggctggtgtgaccaaataactgaattttaaattttattttaattatagttaaatttaaatggccacatgtggataatttaatgatagagttgagggaaagacttaccctttctcttctctgggttttagctgatgggaagaatacgtcggaatatagtatcagttttattaattgacaaagcacttgtccaataactgccagtgtataactctggtaaagctggattgcaaaatggaccttgattccagggcagtggaggggtggacttgcgtgaggggagagatgggtctgcagagcacattctgcgtctttacctctgtggccagctctaaggcctgtccatcagtcaccaaaacaggtggggatagggcaaagtaagagaactttatagtatggaatacaatggaaaagaaagagaacctacacacaggtccaagtgagctatttaataccctgcctcactgactcgaaaacattgcccaacaaatttctgcctctaaccaatcagattagttattcctcatttgggaagagtgataatataatagaaagtaaacaaaagagttcatttcaacacctagaaaagtggtgatagggataaacgttctttccaacccatcaattgtataggagatataatgagaatctttaaatacattcttatttctcatggctagtaaggaccatgaggatatagatacatagaatatatagaaaatgacaggtagatgttaacaggtcctttttaacagctgtcctgctctatgagtgatgccctttgccatctgtgagatgtcatcagcacatagtgtcagctatggtttttctagttcctctcttttacactattctctgcctcccttcatgctgtgcagtgctgtcaactggtgactgagtcacctagtagtacctagcaattcagataagaggaatcttaggtaattgcatctacaatataggatgctgtgacgattaatattgtcaacttgattgggttgaagtatgcaaaatattattcctgggtgtgtctaagagggtgttgccaaaggagattaacatttgagtcaattggattgggagaggcagacccaccctcagtgtgggtggacaccatctaatcagcttccagttcagctagaataaagcaggcagaagttggaaagagcagacttgctaagccttctggccttcatctttctcccatgctggatgcttcccacccttaaacatcagcctccaagttctttggcttttggactttcggacttactctagtggtttgccaggggctcttgggcctgcggccacagactgaaggctgcgctgtctgcttccgtacttttgaggttttgggactgggactgatccactactggcttccttgctccttaacttgcagacggcttatcgtgggactttaccttgtgattgtgtgagtcaattctccttaataaactccctctcatatatacatatatcctattagttctgtccctctagagaaccctaatacagatttcaaatactaaaaaacgttcagcagcactgtagcctttaggtgccccttttcattgtattttaatttaatcttagctatataaggatgacagtgttatgaggcccagaccctagaaacaggaacataacaaaaatatgtctaaagtatggtaaaggggtagagattggaaaaaaagaaacttggcttctatcccaagctgttctcaggtgggatctatgtccctcccactagggtcctatgagaaagtgattccttggggaaaaacccatttatctaaatcattccatggattctctatttctttctgataattagctaagtaggaaggaaaaagctaggatgacaaaaaggctaatttgtggatatatgtgcttattggtgaaacgtatatgtgtattggtaagtaaataaagttcaagattttgcagaaatgtatcagctattataaattaagcctgcaccggacacctttcaagatggccaaataggaacagctccagtctacagctcccagcatgagtgacacagaagacaggtgatttctgcatttccatctgaggtaccgggctcatctcactagggagtgccagacagtgggtgcaggacagtaggtgcagcgcaccatgcgccacccgaagcagggcaaggcattgcctcactcgggaagcgcaaggggtcagggagttccctttcctagtcaaagaaaggggtgacagacaccacctggaaaatcgggtcactcccaccctaatactgcccttttctgacgggcttaaaaaacggcgcaccaggagattatatcctacacctggctcggaggggcctacgcccacggagtctcgctgattgctagcacagcagtctgagatcaaactgcaaggcggcagtgaggctgggggaggggcgcccgccattgcccaggcttgcctaggtaaacaaagcagccaggaagcttgaactgggtggagcccaccacagctcaaggaggcctgcctacctctgggggcagggcacagacaaacaaacaaaaagacagcagtaacctctgcagacttaaatgtccctgtctgacagctttgaggagagcagtggttctcccagcatgcagccggagatatgagaacgggcagactgcctcctcaagtgggtccctgacccctcacccccgagcagcctaactgggaggcatcccccagtaggggcagactgacacctcacacggccgggtactcctctgagacaaaacttccagaggaacaatcagacagcagcattcacggttcacgaaaatccgctgttctgcagccaccgctgctgttacccaggcaaacagggtccggagtggacctctagcaaactccaacagacctgcagctgagggtcctgtctgttagaaggaaaactaacaaacagaaaggacatccacaccaaaaacccatctgtacatcaccatcatcaaagatcaaaagtagataaaaccacaaagatggggaaaaaacagagcagaaaaactggaaactttaaaaagcagagcgcctctcctcctccaaaggaatgcagttcctcaccagcaacggaacagagctggacggagaatgactttgacgagctgagagaagaaggcttcagacgatcaaactacactgagctacaggaggaaattcaaaccaaaggcaaagaagttaaaaactttgataaaaatttagacgaatgtgtaactagaataaccaatagagagaagtgcttaaaggagctgatggagctgaaagccaaggctcaagaactacgtgaagaatgcagaagcctcaggagccgatgcgatcaactggaagaaagggtatcagtgatggaagatgaaatgaatgaaatgaagcgagaagggaagtttagagaaaaaagaataaaaagaaatgaacaaagcctccaagaaatatgggattatgtgaaaagaccaaatctacgtctcattggtgtacctgaaagtgacgaggagaatggaaccaagttggaaaacactctgcaggatgttatccaggagaacttccccaatctagcaaggcaggccaacattcagattcaggaaatacagagaacgccacaaagatactcctcgagaagagcaactccaagacacataattgtcagattcaccaaagtggaaatgaaggaaaaaatcttaagggcagccagagacaaaggtcgggttacccacaaagggaagcccatcagactaacagcagatctctgggcagaaactctacaagccagaagagagtgggggccaatattcaacattcttaaagaattttcaacccagaatttcatatccagccaaactaagcttcataagtgaaggagaaataaaatactttaccgacaagcaaatgctgagagatgttgtcaccaccaggcctgccctaaaagagctcctgaaggaagcactaaacatggaaagaacaaccggtaccagccactgcaaaatcatgccaaattgtaaagaccatcaaggctaggaagaaactgcatcaactaacgagcaaaataaccagttaacatcataatgacacaatcaaattcacacataacaatattaactttaaatgtaaatggactaaatgctccaattaaaagacacagactggcaaattggataaagagtcaagacccatcagtgtgctgtattcaggaaatccatctcacgtgcagagacacataggctcaagataaaaggatggaggaagatctaccaagcaaatggaaaacaaaaaaaggcaggggttgcaatcctagtctctgataaaacactttaaaccaacaaagatcaaaagagacaaagaaggccattacataatgggaaagggatcaattcaacaagaagagctaactatcctaaatatatatgcacccaatacaggagcacccagattcataaagcaagtcctgagtgacctacaaagagacttagactcccacacaataataatgagagactttaacaccccattgtcaatattagagatcaacgagacagaaagttaacaaggatatccaggaattgaactcagctctgcaccaagcggacctaatagacatctacagaactctccaccccaaatcaacagaatatacatttttttcagcaccgtaacacacctattccaaaattgaccacatagttggaagtaaagctgtcctcagcaaatgtaaaagaatagaaattataacaaactgtctttcagaccacagtgcaatcaaactagaactcaggattaagaaactcactcaaaaccactcaactacatggaaactcaacaacctgctcctgaatgactactgggtacataacgaaatgaaggcagaaataaagatgttctttgaaaccaacaagaacaaagacacaacataccagaatctctgggacacattcaaagcagtgtgtagagggaaatttatagcactaaatgcccacaagagaaagtaggaaagatccaaaattgacaccctaacatcaccattaaaagaactagaaaagcaagagcaaacacattcaaaagctagcagaaggcaagaaataactaaaatcagagcagaactgaaggaaatagagacacaaaaaaacccttcaaaaaattaatgaatccaggagctggtttttttgaaagcatcaacaaaattgatagaccgctagcaagactaataaagaagaaaagagagaagaatcaaatagacgcaataaaaaatgataaaggggatatcaccaccgatcccacagaaatacaaactaccatcagagaatactacaaacacctctacgcaaataaactagaaaatctagaagaaatggataaattccacgacacatatatcctcccaagactaaaccaggaagaagttgaatctctgaataggctctaaaattgtggcaataatcaatagcttaccaaccaaaaagagtccaggaccagacggattcacagcctaattctaccagaggcacaaggaggaactggtaccattccttctgaaactattccaatcaatagagaaagagggaatcctccctaactcattttatgaggccagcatcatcctgataccaaagccaggcagagacacaaccaaaaaagagaattttagaccaatatccttgaacattgatgcaaaaatcctcaataaaatactggcaaaccaaatccagcagcacatcaaaaagcttatccaccatgatcaagtgggcttcatccctgggatgcaaggctggttccatatatgcaaatcaataaatgtaatccagcatataaaca

SEQ ID NO: 5 - DNA, 5446 bp, Homo sapiens
cagttgatcactctgaagctttttggctaaagcgtttgggtttagagcttccattactcatccgccttgcccaaggcctcagcaaccgacgttcgaaagccaggagaaaaggcgaatgataaagggcgctccacgcatgcgttaagaagccgccccaactcccccgcggcgttctttcttggaacaaaactagcgcggagccacggaactccgcagtttgcgtagacttgaatttcctattcctcggacgatccatgtggaatccaggaaaaatagaaatgaaggtacatatgcacacaaaattttgcctcatttgtttgctgacatttatttttcatcattgcaaccattgccatgaagaacatgaccatggccctgaagcgcttcacagacagcatcgtggaatgacagaattggagccaagcaaattttcaaagcaagctgctgaaaatgaaaaaaaatactatattgaaaaactttttgagcgttatggtgaaaatggaagattatccttttttggtttggagaaacttttaacaaacttgggccttggagagagaaaagtagttgagattaatcatgaggatcttggccacgatcatgtttctcatttagatattttggcagttcaagagggaaagcattttcactcacataaccaccagcattcccataatcatttaaattcagaaaatcaaactgtgaccagtgtatccacaaaaagaaaccataaatgtgatccagagaaagagacagttgaagtgtctgtaaaatctgatgataaacatatgcatgaccataatcaccgcctacgtcatcaccatcgtttgcatcatcatcttgatcataacaacactcaccattttcataatgattccattactcccagtgagcgtggggagcctagcaatgaaccttcaacagagaccaataaaacccaggaacaatctgatgttaaactaccgaaaggaaagaggaagaaaaaagggaggaaaagtaatgaaaattctgaggttattacaccaggttttccccctaaccatgatcagggtgaacagtatgagcataatcgggtccacaaacctgatcgtgtacataacccaggtcattctcatgtacatcttccagaacgtaatggtcatgatcctggtcgtggacaccaagatcttgatcctgataatgaaggtgaacttcgacatactagaaagagagaagcaccacatgttaaaaataatgcaataatttctttgagaaaagatctaaatgaagatgaccatcatcatgaatgtttgaacgtcactcagttattaaaatactatggtcatggtgccaactctcccatctcaactgatttatttacatacctttgccctgcattgttatatcaaatcgacagcagactttgtattgagcattttgacaaacttttagttgaagatataaataaggataaaaacctggttcctgaagatgaggcaaatataggggcatcagcctggatttgtggtatcatttctatcactgtcattagcctgctttccttgctaggcgtgatcttggttcctatcattaaccaaggatgcttcaaattccttcttacattccttgttgcattagctgtaggaacaatgagtggagacgcccttcttcatctactgccccattctcagggtggacatgatcacagtcaccaacatgcacatgggcatggacattctcatggacatgaatctaacaagtttttggaagaatatgatgctgtattgaaaggacttgttgctctaggaggcatttacttgctatttatcattgaacactgcattagaatgtttaagcactacaaacaacaaagaggaaaacagaaatggtttatgaaacagaacacagaagaatcaactattggaagaaagctttcagatcacaagttaaacaatacaccagattctgactggcttcaactcaagcctcttgccggaactgatgactcggttgtttctgaagatcgacttaatgaaactgaactgacagatttagaaggccaacaagaatcccctcctaaaaattacctttgtatagaagaggagaaaatcatagaccattctcacagtgatggattacataccattcatgagcatgatctccatgctgctgcacataaccaccacggcgagaacaaaactgtgctgaggaagcataatcaccagtggcaccacaagcattctcatcattcccatggcccctgtcattctggatccgatctgaaagaaacaggaatagctaatatagcctggatggtgatcatgggggatggcatccacaacttcagtgatgggctcgcaattggtgcagctttcagtgctggattgacaggaggaatcagtacttctatagccgtcttctgtcatgaactgccacatgaattaggagattttgcagttcttcttaaagcaggcatgactgtaaagcaagcaattgtatacaacctcctctctgccatgatggcttacataggcatgctcataggcacagctgttggtcagtatgccaataacatcacactttggatctttgcagtcactgcaggcatgttcctctatgtagccttggtggatatgcttccagaaatgttgcatggtgatggtgacaatgaagaacatggcttttgtcctgtggggcaattcatccttcagaatttaggattgctctttggatttgccattatgctggtgattgccctctatgaagataaaattgtgtttgacatccagttttgacctttcccagtaatcactgttgattacgagaatgttaccatgcagctttgcatctgttccttgtactgtatgcacattgctcaaaggaaagtcagtggcttgcactacttacaagtttcatagatttgagcctaaccacaagaggctggtgcttagtactgttttccctgcacgtaggggtcttttaaaaatataaagcttgtgataaagagaggagaatatgggactccatgaaccagtgttgatatgtttgattaagacttttcacaaaataatcatataaaacactagtctctttattagtagaaacttctgtggctatgcagaaatagagatcgaaccaaaaaaaatcatttaaactttaaaaatattttaaatggactttggggagacattttttgtgtgttttaagaatgaattgtagtgctctttaattcagctacatatattcatgtggtgatagggatcaacttgacacaactttgaaactgcataaagtagacataggaactagaggaaagctcaggctgcattagagtatgaatttagcattgggaaaagcccttattcttgaatctagagttactatttttgtatatatttgcatagtgtttaaacctgcagcctaaactactgaaatttgtgattgtatgtttgtgtgagcttcagtttaatgaaagattcataatggttctttgtattattataatacttggtgttggggtgttctttctgttttgttttttactttaattttgttttgatttttttttttttttttggcgggggtaggtgagggtttggagcatgtggtctttttaaaaaattgtaaccctctagaaaatatcaaagaaatgaaccagacgtggtttaaatagttgattttcctattttaacagtaccaactagttaattgggaaatgtaagttctgaatgttcacattgctttaccagtttggcactggaaccaagagcacatgtcgtggctggctacaaggttgtaaagcagaaaatcgaagtttaccatgtctgtaatgtgtacatgaagtgtcaatttagaacagttactaggataaactccattattgccatggctgtcatggtacccaagtgacttggaagatgcatttaaattactcagctgaaatcacttgatcatcttgtgccaagatatgctgttggtgcctgatagggattagtcttttaggtgccctgttctcctaccataattgtgaatgatttgtgagaagtgcaagccatgtttatcctgaatttttacttaataatttgtattactagtcatatgcatgtagctttctgtttacatcctatgccacatggtcttcatttatgccaggtaaactgtatttgaactatgtgcagctagctttgttttaatctgcttggcaaccagtgtagctgctgtaacaatctatcttattgttcaaatatataagagccaaactcttttccattccatctaaaatgttttcatttagtactcttctttcctcctactctatgaacttcaaaacaaaaacaaaactttgagagcagcacatgcatccaggtatttatagattattgccagtgtcttttctgtatgctataagcaagggagcttaggtgttatttctttaatttatgcttgaatctgaaaaattatttctgacttactccatggcctccttataataagtagaagttttatatataattaattttcagcattgggcactgaattaggacagtcctcatctcattgcttggcccttcaagcaacctagctaaaaggtgctgatattttatttagtactgccaacttcaagtgatttagatatctatctatctatctagatttctgaaccaagatatatttatagttcacttttgggtttttatacccacggtaggattctgcattccagcattaaatctgcttcattttagaacctttataaaagcaatagctggaatatactcccagttttaaaataaataaatgcctgattgatttaaagcaagtaggttatgctgaagtatataaagaagttttatattctctcaaaaatggtattatctttctttatttgctagattcttacaaatcttttaagagggctgtaacagttgctgctagtattagggttccacatcattctaatgtatagtttcaagtcttaatagacaatctgaattccactacatttcttttggctccaacattccttttagcttgaccagtctaatttaaaatgtgtttgttggaggtcattaacgttacttgtacaatgctgtcactgtgtgacatccatatgaattttggtatatatcaatcaatcaatcaatcacattgcattcaatcaatcagctgtgattgattgattatgcttagaaatactatagtaactagatgcagtgtgaattttttccattaacaaacaaacaagtcagtggcttaaatgtgattatggtcctgcaaggtgattcttgctaaaatatctaaacttttgttttgttttaactgaatcattttttaacttaaaaagctggaaaatatcaaatgctgttttttttttttcattgtcaacagtggtgtgtcattttatgtatgttcctaatgcttatggaactcctccaaaataaagttactcaaagagagcaaatatgcc

SEQ ID NO: 6 - protein, 883 aa, Homo sapiens
RALHACVKKPPQLPRGVLSWNKTSAEPRNSAVCVDLNFLFLGRSMWNPGKIEMKVHMHTKFCLICLLTFIFHHCNHCHEEHDHGPEALHRQHRGMTELEPSKFSKQAAENEKKYYIEKLFERYGENGRLSFFGLEKLLTNLGLGERKVVEINHEDLGHDHVSHLDILAVQEGKHFHSHNHQHSHNHLNSENQTVTSVSTKRNHKCDPEKETVEVSVKSDDKHMHDHNHRLRHHHRLHHHLDHNNTHHFHNDSITPSERGEPSNEPSTETNKTQEQSDVKLPKGKRKKKGRKSNENSEVITPGFPPNHDQGEQYEHNRVHKPDRVHNPGHSHVHLPERNGHDPGRGHQDLDPDNEGELRHTRKREAPHVKNNAIISLRKDLNEDDHHHECLNVTQLLKYYGHGANSPISTDLFTYLCPALLYQIDSRLCIEHFDKLLVEDINKDKNLVPEDEANIGASAWICGIISITVISLLSLLGVILVPIINQGCFKFLLTFLVALAVGTMSGDALLHLLPHSQGGHDHSHQHAHGHGHSHGHESNKFLEEYDAVLKGLVALGGIYLLFIIEHCIRMFKHYKQQRGKQKWFMKQNTEESTIGRKLSDHKLNNTPDSDWLQLKPLAGTDDSVVSEDRLNETELTDLEGQQESPPKNYLCIEEEKIIDHSHSDGLHTIHEHDLHAAAHNHHGENKTVLRKHNHQWHHKHSHHSHGPCHSGSDLKETGIANIAWMVIMGDGIHNFSDGLAIGAAFSAGLTGGISTSIAVFCHELPHELGDFAVLLKAGMTVKQAIVYNLLSAMMAYIGMLIGTAVGQYANNITLWIFAVTAGMFLYVALVDMLPEMLHGDGDNEEHGFCPVGQFILQNLGLLFGFAIMLVIALYEDKIVFDIQF

SEQ ID NO: 7 - DNA, 24715 bp, Mus musculus
  misc_feature (1)...(24715): n = A,T,C or G
ttgtagaggacccaggttcagtacccagcacctacatggtggctcacaaccacctgtaattctagttccaggggcctttaatatgaccctgttctggactctttggattcctgtaacacacacacacacatgtttttaaaagtccattataggggctagagagatggctatgctcttccagaggtcctgagttcaattcccagcaaccacatggtgactcacaaccatctgtaatgagatctgatgccatctcttctggtgcgtctgaagacagcaacagtgtactcatatacatgaaatgaataaataaaatctaagaaaaaagtttaaaacaaatttttaaaaatgtctatgtgtgatggatgcttgtcaccaacagctttagcctctaacaggctgtagaaggttcttccagatgagatattgtcttaatttcatttctgtcgatgtagaaaatatcctgctgagaagcagcttgggggagaaatggtttattttctcttagcgctccaggttccagtctattacttcagggaactcacagcagctggagtgtgaagcagctgcccacatgaccaccagccacaaccacgggcaagagcaagccatgcaagctagcattcttactcagcttttcttacacagtccagaccccaaaccagggaaggggctgcccatactcaggatggatcttcctactcatcagtcaatgtaatcaaggcagtcccctatagatactaccacaggccagtctgagctaggcaatccctcagtgaggctttctttccaggtgactctaggctatgtcttagatccagcgggatagacggggtaaatgaccatcacagtcagcctgtctcaggtccagtgggatggacagggggtaaatgaccatcacagtcagcctgtctcaggtccagtgggatggacgggggtaaatgaccatcacagacagcctgtctcagatccagtgggatggacagggggtaaatgaccatcacagtcagcctgtctcaggtccagtgggatggacgggggtaaatgaccatcacagacagcctgtctcaggttcagtgggatggacagggggtaaatgaccatcacagtcagcctgtctcaggtccagtgggatggacgggggtaaatgactactgcacagagcctgtctcaggggtaaaggtcctttgcaccaagcctaacagtttgattttgatccctggaattcacatggtgtgaggagagaactggctcctcccacaaggagtcaccaaaccacagtggcactgtggcaaatccatgcctctctcccaaataaataaatataatgtaaacaaacaagcaatcaaaaatccaaccaacaaacacaaacccctggcagagactatttgactcctgtcatctactcgtggctaagcccgacttccacagacgcctctcacccagctcaagcgcaggcagggccaataagctctttcaacatctcctaagaatgatcccttacacagacttcgtgctgcacagctttatgaatgcggcagaaacccagctttctttgcttataggtatgttcctagtgagtttagctgaaggatccgataagagaggcatagaaaaattaaacgagcaagcccagtggtctataaaaagttgaagacatgtttgagtaaacggcagcattcaggtggattcttgccctgaaccgtcctcgagaaccataacgactttagcaactaaagctcccttcttacctgtgctgcctggttttatgttaacacagctagagtcatcagagaggagggagcctcagtaaaatgtctctctaagaacaggctatagactgccttgtaggccttttattttgcttttacttttttgagacagggtctcactatgtgctccagatgtcctggagcttgccatatagaccaggctagccttgaactcaaagatctacctgcctctgcctcccaggtgttggaaggaatgttttgtgccactacactaggatggaaggagattagtgattaatgagagagagtatagcccattgtgggtgaggccatccctgagctactggacctgggctctataagaaagcaggctgagcaagccatggggagcaagccagtaagcagcatcctccgtggcctctgcatcagctctgcctccaggttcctgccctgctgagttcctgccctcgctgctgttgatgatgcactgttctatggaagctgagtgaaataaacccttcctctccaagttgcctttggtcacggtgtctcacaacagcaatagtaacccaaactaagtcctgactcaagggacaagaatattctcatggataagttaggtaacaccgtgagccaggtgctctggcgtgtggggcaggatttgttgtttttgatcacgatgagatctgagtgcactgtcgctctcttcagacagaccagatccgggtgcaccggatcccattacagatggttgtgagccaccatgtggttgctgggaattgaactcaggaccttggggagggcagtcagtgctcttaactgttgaaccgtctctcctgtcctgtgatgagattttaaataaaatagaattcttgggtggaaatagctgggttgacaaagtgcttgccatgtagatgtgaggacatgagtttgatggtcagaagtcatgtaacaatcaggccacagagcacatacgtgtaattccagtgctgcgaagcagaacaggtcggtcctagggcttgtgggccagttagtacagagactctagttgaactctgttgaaacgagaggacactctgatcaaaagcaacttcaggaagaaaggggttggtttacagtccagagggacagagtctatcagtgtagaggaaggctgcgggagggaggggcagcctggtagtcagggattagagagatcacctttcatccccacacaggaaacagagtaagagaagttagtgggacgaggtacacaacttcaaggcccactcccaggggcatacttcctccagcagggctctaccacctcatgggtttctaaacgtcacagacagcgccacctgctggcgacagtgctcaaaagcaggaacccatgagggaactttcatagtcaaatcagaacatcgcctgggtcatagagttccaggttctgtaagagatggtagctcaaggaaacaggctggacagccctgcaaaccaatcctggaacttgccctttgaactcactacccccaggagaattaccactggcgtagtccactctggctgctgggcctttctcgcaggcctgcaggctaaagtccgaggtgctgcaggttggtccttctaaggtatcctctgcttgcagatgggtcttcccaggtgtgcccttatgatggtatctttgtctgtctctccatgcttcctgcaaggatactatccgccattttagttcggggcacacattaaaggcctcactttggtttagttgcttcttcaaagactgtctgcaaatacatcctcattctgagattctaggtcttagagctttaacagataggctttagataatacatctcagcccacccctcccatcccactgcgttacagacagggactagtaaaagtcacgaaccagggctggagagaagtctcagggggtaaagtgggtgacatacaaacacgagggtctgagcatggatctccagcatccgtgcaaaagccaggtgtggtggtgcacatctgtaatcccagtgttggggacaggaggagacaagctgggattcagtggtcagagagtctaaccaaatcaatgagctccaggctcagttagagaccgctgcaaaaatgaggtgcagaataactgagggctatacccaacattgacctctgtcctccagctgatgcaaacacatgggcacacacctatatgaatgtgctcgtgtgcacactcacgtgtacacacacacacactcatcatgaaagaaaatcatgcaggtggctgatcagagcatcctgagagcatccacgtgtggtatggctgtgttgtgattcttcacttccgttcagctccacaactggcgctcagtatcctttaatatcaataataggacaatgcactggcgaagccgtgccggcaccagagaggtgacatttgagtcactgggtaatgtgatgaatcaaatcaataactagagcggatgtttactgtacgtcacccttcctgtccccatcacgcgggtgtgtgacacatcagtgctggattgtacccagacgcggaacaacgttcctttggcagctttgtgaggtggccttctgggtcacaaggatagttagagacacctctcctggaagaacaataccccaaataaaagcatcggcctgcacacgttgcctgcagcaccctggggtggcacagggttctgggggctcgactagtgtttacagcatgtgaactaggctctgtggaacagagctctgactgtgcactgtggctatctgctcctgtgtgcttgcctcttcacgatgggatggacagagctacatggcctaatgcacaaagttgcttctgggcactctgcagtgggggtggggggggctgggtccaggtcctacctttaaaagagattagtacacacctttcaatatggtcaaggtcataccaaagacaacaaagcaaccaagagcctgcctggcctgagccagcatctgtgacgtgagaagcagggacacctgcatagctccgcgcctcattcctcggctccagaggtttgttctggctgctgttgactgtcccatccttcagatccgcatattgaggcctgaggggtctcacacggacaagccttccctgtcttggaggctggataaccacgtccgaagtgccagtgcattcagtcctggtagagctcgtgccctgattggtggacagtggacgtctttaactgtttttacatgcccagaattctcaggcttttcccttttataatggcatcgatcacactttgagggtcccactcccctggtctgacctcactttgcttttctcctgtggcccccatcacactggagattagagtttcagcagacaatcatgcagggtgtgcatgcccagagccttgggactcctgcatgtcgatgccaaaactgtccggcttaggaagcaagcttgaacacggccatccgtctgtctcactcacacaggatgatggggacgtgggcattctgatggactgaggaagacaggctggggctcaagggttaacggtggagctgggcgtccctgagaatgtcttcatcaacttggttccatcacgtctgtgcctgcctggcacccagacctgagcccttgtgtgaaatctcagtaagaggaggcaggaagcgggtggaaacagaaaggagggcaccgggacagggaggagagcaaaatgtcatgatacaagtgtgggaagatgccacgatgaaacacgttattctgagtatagaacccaagattcagaacttctgattttatccgtggtctgcctcaaaaagccctctgagttgtccaggttaaggctgctgcggatgataaggggagagaggtccagtagtgagcctgggctaagccccaagtggacagtgaggtcacctcctcagtgagggcagctacaggctttcaacagctaatgccaggataatgaactagtgacaggctactaactgaatcaaattggcgggatgggggagtctccgacgctgttctattactgtgaggagacaccatgaccaagacagcttatgaaaggaagcatttaactgggggcggggtgggggctgcttagtttcagagggttagttcatgaccatcatggcaggaagaagcatggttgagcagtagctgagagctcatgtatgatctataaagatcatacatgagagagagagagagaatgaatatatgtgtgggtctggcataggcttctgaaacctgcaagcaagctcccctgtggcacccctccttcatgaaagccacacctctaaaaaggccaccccttccaatccttcctaaacagttccacttagtggggactaaccattcgaatacatgatgagcctatgaggccactctcattcaaaccaccatggggtgtgatagatgaccaggtaggacacttacagaacccaagcactgggctaagggatctggcattaatggtgctaaggcacctactgtgtgtgaggagtggccagggacttgggacaactcacattcttgtggatcataaccccaataagcaagacacattgtgatggtttgtatatgcttgacttaaggagtggcactattagaaggtgtggccctgttggagtaggtgtggcactgtgggtgtgggctttaagaccctcatcctagctgcctggaagccagtcgaatgctagcagccttcagatgaagatggagacctctcagctcctcctgcaccatgcctgcctggatgctgccatgttcctgccttgatgataatggactgaacctatgaacctgtaagcctgtcccaattaaatgttgtccttataagagttgtcttggtcatggtgtctgttcacagcagtaaaaccctaacaaagacacacattaacaaaacagggcatgggatatcaacatgacatacttagtgtgtaaggaaagagggtgaagatactcgggtaggagatgccggcttgcaaattgaagtttgcccattatgagtgcagaattggggctgaagtgaggcctctgtgggtaaaatgcttacaagacaagcatgagggcctgagttcatagtcccctgaaaaaagacaggagcagttgtcacacctgtcatcctaatggtgggaacagaggcaggaggatccctgcagtatgctgtccaggctgtctagctcattgatgtgctctttgagaatatgtggaaatgctgtggggaagacatctgacattttcccttggccttgctgtgttcttccagggacttacgtatgaatatacatgcatgnnnnnnnnnnnnnnnnnnnngatcttctaacctcagaaggattgctggccttacaacaagtggaaagagctattgaagaacaatttgttacttatatagattactctttgcctttacatctgttaatttttaataccattcatatgcctacaggattgttgtggcaaagggctcctctagtgtggatacatttgaggatatctcctaaatgtccccccccccccccccccgcctccagagagagaaggagtggagggagggagggaggggagcagggagagagggagggaggacgagaaatacaggctgcagttttaaatgaagttgatcgactaaagtaggggaatgagttagctatgtgggggagagcatttcgggtagagggaatagccagcaacccagatacctgaaatccaatcctacaacgattattaacttagttgttacacattaaaatcccctttgtgtgccagtaacctagggtttcactttggttttgtgacagggtcttgtagggcaggctagctccaaacttgagattttcctgctcccatctcccaagtgctgggcttgcaggtgtgctccaccacatctggatccctttgttttaagaaagagttccgcagctagctaaagataggatacctttcacgggcgtcgcagcataggtgtgaagccacaactcttgtgctacagcttgaactctccctggacaaattcgaacaagcatctgtttccgccaaccacagacaaaaggtgtgactccacctaagttcaacctggtcaaccaggttcctcattgggcttacagagcatgtgtaagggatgaagatgaagatggagacctctcagctcctcctgaaccatgcctgcctggatgctgccatgttcctgcctcgatgataatggactgaaatgggagcacgggtcaccccaaatcagctgcatcaaagaagagagactcacccggggtatagatggagtcctccattctgtcaccctccacacttaagcgccttctgaaaccatgcacagctgtgcacagtgacatccagctggcgggggagggggagggctaggcacaggaggagtggctggaatctcaggtgaggtcagatgacctttctcaggcccctccccttctgtgaggcctaatctggaacagggatctctggtgagatggctgctgtgctcagagggcagtgtatgaagcagtaatgctctatacaccctcacacaccacctgtggggggatggttgaagcctcagagcctttctgggacaaggtgacattgtcattgacagcctattgaggagagatgctgatttccattgaggcccacgccttccatcctaacttaattaggccaggcagtaaaaccttcactaataactgtcaggacccctgagtcaccagggaatgacaaagcttggcaagcaacctctgtgggaagggaaagtgtgacttcactgctgtctccctctacaaccgtcctcggggggtcaccaaagacccctcaattggtcagcttgctccataccaaacctgttggcagaccacgaatgacttatacacacgtctgcacagaacgcgtccatgcaaacattccatcaccgatttctagtttttgtttcatttttactttttaaagacagctctggctgtcctagaactcactctgtagatcaggctggccttgaactcagagatctacctgcctctgcctccagagttctgggattcaaggtgtgcaccatcacttggccccagcatagacttttaaaaagatgtatagactttgatccctctgctccatctcccaagtgttggggttgctgggctgcatcaccctacctgtttatatggtactgaagcctgagcccaggtcctcacagaagccccaccccaccccacccccagctgagctgcatcctaggccaatagtagagcattttgggaaaagaaaaacagtctctttaccccaagcccactacttccagcttcgtaatattccataccaatcctatatgacacatcttggggtgacccttttgttgctattctttgtagttattgtcatctactaatttataggcttggctggggccttaagtttaacactgagagcctgtaggttaagtgaagactcatggatgtatcccaggctacccttaaattcagaaacctcttgcctggggcatgtttggccatagttgtcagttacttcatgcacatactcttgaaaacttgtgtgtgcacacatacaaacgtaccacatgtacactcatgtgcgtgcatgcacgtgcacgcacacacacacacacacacacatacacacaatgttctgagatgagtaggctgctaacagaaccactttgctgggttgagtctagtgaagccggctggccaggccgcctggggatgtctatcagtcctccttgctgggtactatccagccctaaggaaaccttactctgaggaccgagtgcttgtgatcttacatgcagccaagcacatgtgctggatctgagctttgagcaatgcttgctgtgtctttgctattttgaacaactggtttaatacaacctgacaactcatctatttactggtgaaggattttttggaaaaagaagccgagatatttcacgtcataccccgcatcgcttctgctaacattcataaatccttgtccttctgccttggccacatcatgtctgtccccatctttcacctgtgatttattgctgagtgacttattttgccagatttataaacttcatgatgctctgaatacccactctgaacaccagtcaacaagccagtaaatttattgtctatgaattgttactctgaaaaattacatcaatgcaaagtgattgcctttcagcctccctagccaataaattcattctaatttttttggaggggacgtatgaggtcacaggatgatagataaaacgggcaatccctcaatgaggagtgtcggaagttctccagagcagacgcccagacggacttctcgccgcatcatggacagggtgcccttctgctgcctgctcttcataggacttctgaatccactgctgtcccttcccgtcacggacactggtgagaggactcttcagcttccaggtgaggtgactttttgttttttgtttttttttttcagttctgggtgccactcaggggcaggaggaggaggaggaggaggaagaggaggaggctggctgaaaagggtcctctgtaggagcaaccatgctttgaaaagaggctctgagggatccttactgcaggtcttagctttagcgatgggcatggtcttctctaaacaaagtgcgtatttcatgtaacaaatgtacttccgaactttccttgtcacttttgttcataaaaattggacagacttaaaacattaccttgggttttggagtgaaatggttgaatacaggagtagtgttttccaacgacagagagtagtgtactctgttgtgagttagaaagcacgcctctgcgtgtgctatatgcaacgaaaaggcttaattaagcagagcggcggctgaagctggggaccaaagaggcatccaagtttgctttccttttgacttaatgttctattcaggttcagctgaaaggggacaaaattagaaattttaccacagcctctcagtctggtatcaggttgtgtattagagtccataaaaaatttgttaactgggtttaatatttgattttagatacctaagcaaaatttcctttatgtttattgtgtatgcacacacacgtaccagggcccagatgtggaggtcagaggatcctctggttctccagcacgtgggcaggcttggcggcaggcaacctctgctaagctagttcactggcgtggctcttgggtcctttcagaccttttcctcagcaagttctcttcctgccactgccactggaccgtccagcctccgccagcattctgagcatctcagagcatcactcacgttctgtccatcggctgctggggtcactgagttcacactggcacggaacctgatgctcaagaccaggcatgagccaatgctcttactttaaaagagcggtgcaccctgctcttcctctctaaatcagagaccaggagcgtcagatactgatgccacgttaaacagctacgagggaagggcttaggagagggcaggcgcctttagtgtctctccactgtctttcatcaaggttgcagatgagtatttgtccctctgcagcattccagggtcttgtgtggctttccagccagactccctgagcatctcaacatgctggcacctgcccaaggcacatgtcccactgccagccgccactggtcgcacacaccgtgcactctgtacatttacacctgttatcatgaagaccacgcctcacacacacttgtcatacacgctgcctgcccttatacttcacatcacacacagtgcacacagcttgcacatagcatatacccacatatattcaccttgtataccacacttgcatttaccacacttccctccgcatacacacttcacatcacctttcacacacaagtcacaacgcagcgtttgagcttcccgagaatgtccactgtgaggtgaaatagaggtgccacagtcaacttcactatgggaacacaaatcaagaggcaataggtcacagtagatacacagaaatgaggatcagtcagacttctggctcctgcccaaggcaggtgctagggtgaccacatcggcagggaggggtggcccatgggttcctccatggactcctgatgactggcatagcactttatatctgctaagtgccaccgtggcatgtcaccagttctcacctctctgtccccggcactcatcgacgatgggaaacagaacagccaagtgaagcccaggttaggctacttgtctgtctgtaccccacagtgcttgaggaagacgctcttcgggctctggaggagctggagaggatggccctcctgcagaccctgcgtcagaccatgggcacggaagcaggggagagccctggagaagcaggtaaagcactcttggggttgtgggcggatcccagagctactagagagagctcgaaaagctgaactgtataaaccttcttagtctatgcttttaccaaactctgtgtacccttctgagacctgaggctagcctgggctacataacgagactatattaaaaacaacaacagcagcaatgaggaaacgtcctttttgggttgactttcaagtaaaatgtaaacagggtaaaatgacgaatgacagacatggggactcacacctgtgaactgggagtctgaggctagcccgaggtcctactgcaacacaaacaactgataggaaagaccacagctttgactattttcttctgttgctcagaacacgtgggtagaggacgaagagtctttcagtagacattgcttactgacagtactgtcagtccagctatagtttagaatccttgactgctctcaagtacacactgcctcagtctggaaaggactggaaatgagacacgatttaggggtgttccacttgtcttttcttcttcgcacatgcagtgtgcctgcatgaggtgggctcatgtgggggtgtgggaggcccaaaagtgacactggctatttttctccagctctctccaacttatttatggaggctgggtctctgggcctggagcgccttaatccagctgtttacctagcccagggatcctgtctctatgatctgagtgcttaaggggccaaggtggcctctatgcccccccagcttttacctgggttctggggatctcaactttggtccttcagcctgtgcaccacgagtcatctcccagccttgggatcccagattctgtatgttttgcaataagcataactggcgggtgtggtggcaaatggcacaggtggttttctgggaggccagcctggtctatatagtgagtccctgcttaaacaaggaaaaaggaagagaaaacacagcggcagatctaatgagaaggtgtcaaactgttttccaggtcccagcactgagactcccactccacggggaagcatgaggaaggtaagacgctctggcctttgagagagagaaacggaacttctcataattcacgacccaagagtgttctaaggaatcacaccgtaaaataattggccagtgttcttatgaggcagaatttttctaaaattcacagaatttgtaactgtaacaagaatgtaacagatgcctactctgggtaaattgtaacaagaatgtaacaagcgcctgttctgggtatactgcagtaggatgcaagagaaaggagcagcaggtcaggctgctgccaggcttgccatccactgtcttgccacatggccccattggcagtgccatccctaggaagctggtaagaaatgctcagactccacccctccctgctagtcacacctgcaattcaacagctctgcaggggaccagtgatagattagtcagcttggggcacccaccaggcagcgtgggaagggtcgaaggatgctgtgctcgcctccccaggatgaaaagggttgcaaaggctggaccagagacacctctgtggctggaatcgccactggcatcctggtagccatcactgtgacaggggatcctagagacagggagcactacctgaagccctgaggggactaagtgtggcttccgtgtgcagctgggggaaagtcatcactcagaggtttacatccttctgaacagtaggacagtctcaggcggggttactactgctgtgacgaaacaccaggaccaaagcaaccgggcaggaaaggatttatttggcttacacttccacatcactgctcatcactgaaggaagtcagagcaggactcacacagggcaaggacccggaggcaggagctgatacagagaccatggaggggtctgcttactggcttgcttcccatggtttgctcaccctgttttcttatacaacccaggaccaccatcccagggacagtaccatccacaatgggctgtgccctccccatcaattgctaagaaaatgccctagaggcttgcctgcagacagatcttatgggagcattttctcagttgaggctccttcctgactggtgactctagtttgtgtcgttgacagaaaactatccagtacaaggattatccctagggtctcaaactgtaaatggaggacgtgcctactgtattctagaatcacaagaaaatatggatcaacctttaaaacaagccaattttgacagctaggatctatgttacacagaaggcaagtgtctagaaccccaacagaagcctggcacagagaggttaggggagctcaaggcaaccgcagagttaagctgactggacgagagctccagagacccagcccgaggagtccccagaaaggactctgactcggggctgtttatctattgttctggtcttgtggtttcaggctttcgctgggcaaaattctaacactgtactgagtcgtctcttggcaagaaccaggaaacaacataagcaacacggggctgccccagagtgcttctggaaatactgcatttgaggagacacaagcgcccgttggtctctcagaaccattgcttcaggaaacgggcagagcagatgcttgaagcaaaatcacgctaacgacgccttgttcttcattatgagaaataaatcctctatgtttctcaagttatcgcacacagtttagtttactttgcgtatacaccctgaaaaatcgacagcccacctttgcccccatttatcttggaaatgtacgagttgggctggaggtagctcggcggcagagagcctgcctagctatatgaactctgaactctgctccatcctgggctttgcaaaaagggggagaaaaccacttaagtaaagagcacacagctcagaggaggaagaaaaggcataaagtcagaaattatttaaaaataaattactttcttgacattttctcaagccctaaaaggtgaatatgtacattgctttggggtgtgattggagagataggacctcatgtatccagcaccagccctgaactcctgattctcctgccccactacttcctgagtgctgggtgtgcaagtggatgtcaccgtatccagtgccggttggtggtgcagaggctggaacgcagagcttcgctcgctcctgaggcaagcattcgctagtttgaaaagctctaatgtaaaggcagtggcgggcggggcctggggatgctctgaactgtttcttgggggcaagcttgtgtgttcacacccttgctctcagcaggctcaagcacttgaaaacttccctgctctcaacctctgtgagcgagcttcagtgtccagatgactcgctttgagtgctggaaactcacttcccttcagctaacaaaggcaaaatacttagtgttcttagagctgacaccaggattcaggctgtggaatgggatcggcgggttattcatctttaaggcccacaaatacccaagtagaccagcatttcatgcacaactgtggcagtctgtagatgaccagacactttgtctgggtgccacaggccgtgactgaccacagagccacaggctggaagcactaagtctctcacagaagcaacgttcctgtatgagaaagtttgcaggtgagcatcaggtctgtgccaaccatgaggcactgtgtaaacctcactctcccttgtccccaaacatcaccagtgccttcaagtaactgtgacaaagatgttctaatttagacacgacagcaacagctcagtagggaaagcaggtgtgcagattcaagcattcagctgtcagatctgcctatgaggctcgtggctccttagtgtcagaatcaaactagctctctctcccttttggcaatcccaagaagcctaaatgggtttctagtgtactagcataatctacaaaaccgtcactaggcgtaatgatttggggcgattatcttaggacagactgctaagcccagtcactggagctgagtcctctgtcgactctgcagcctccacgggctcttgtgaggctgggacgagagactttctatagagtacttacactggaggcagaaactgtaaatcctgggctctgtggccctaggtgctggcatgagaggaaggcaccactgggcaggcctgagacttgctggctgggatcaggctccagattctgatgtctgactttgctccaagtcactcagagtttgtgaaacacaaggccggccgtcctacagaagcttcagggtaattttgataattccgcttcactggcataaatgatagcattatccatatgcttacaggtatagacatccagggctcagtaaactctcagggctagaatggagactgaacacagtggcagatgcctgtcctccagagtgggaacagagacgagcttacacggcaaacagttgtgagtgtggtgatgtggacccagcacggggccttcagggaccgcagcaagcaagtgtctctggctgacaccaagtgtgctcaaggctcgattacacaatgaagagcattctccacttgaacacatatactgtttattgtttttactcaaaaagatacccaatgaaaagataaatgtccactaagtacaagcaaattcacagttaattatgaacaaattgccaatttggttaaagtttgccaccttgtgaattataatattttatttaatccatttatttacacatcctattttcataaattttgacctctgacccaagaaaataaagctttggggggaatatttatgtagacattcaagtctacaacacacacttttcttaccaattctctagttattaatacacaagtcagtgagcttgagtttccactgggtatgacccccatggggggcagcaggctctgctggaccagcccacagcagcagagattgccggtgtactgatggcatcctagcagaggtgagacgtggtaaaggactttacagacctgactacagcaccattttcaaatcaagcctggcataatacagactccataaggtgtggacaaaggcaaggaaataaggaactgcagagaaaacggggatccagaaccagcaggaaccagagaccatcaggtctgctgtatgtacagaaacgcagaaggatcctggtagcttcgctagagaaggccaacctgacaaacgcaggcctcccaaatcacttcactaccaggatggactaggttctgagaagtctctctgttcacacagcaggaacacgtgtcaggaactgctcaataccagaaagctccaagaaatgtcacaggcagcatcttaaaatgtttctgacaccttccaatagaactgcggtccagaaaaagcactattttagaaaagaagtctgagccacagagttgggagcactgggtacagcggcctctatgacagtctcctgaccacaatgacaatacagttatcaatagctataaactgtcagaggagaacaaagtgttcctaaaacaaagcaaaaacaacagccaaaaaaaaaaaaaaaaaaaaaaaagaagaaagaaaaagaaaaagaaaagaaagagaagtaagttggactgcaggaagtgaagcaggaaaaggccactgtaaacctcctccccgtcagttccttcctgacctgcacgggtggctccactgccatctcgagttcaagaaggaactttgggcttctttaaaccagagcaccagacagtgagaggacagacgcgtgaacaatcacactcacttctgaggcagaaactgcctggagagcgtggactcatgggactctgctgtcaccgagctggggtccccgagctcccttaagtgtagtctcccaaactcttacccctcttcaagggcaaacaaaaggcagaccgctggtcgtcatcgtgtcgtttggtgaaaaggaaaggttaactgtttgttttggtgagccggggcacacacatctccatgataacattaacgtaatatttaaaactgttgaaaacactattgtttgggtaagaagctttttgccatgcaaggcttaacttcagtcatccaaggagtaagtcctggctagctgacagatcttaaggaaagagcccctgtgaaaggcagctgccacaggaacttcatggacgagaatggggtcaaacaaccaaagccacgagtcccacagttcctggggaatgatgcgctctgacgctctgagagaaagctggaatgtcttaccatcaggaagagaagcaccatgctgtacaaaacctagatcaatgtggtaagttcacggacaccccgtgagaaacacacaacctacagacagaagttcttcaagtattctagtgggaaagtgatcttgtaacaacataaaaaagcaaacgagacgaaggcctgcgactcgttccaactgtaacttactcagggtgacctctgaaatctgctgtcagacacagcccaatgtcttcaggtgacagatgagttagagaagacgtcttgttgactgttttactatcatgaacaagagccaacgtctgctcatgttttgggaaaaccaagaagggagacctggggagacaggtcagcagtggagagtgccagcctagtggatgtgaggccctgggtttgatccccagcgccaccaaaaccaaaccagaacaaagccagggaagaccttaatgtcaatgactggcgtttcagagttagactgtggtgaggtaacgcacggctctgtgtcccacgtgacctggagggggtgtgacatctttacagctgctcaactggtgtcttctgctgggtgctgttccaggacctctgcagtgtcacccactgaacctctgtcttcacaggcgacacagctctccaaaagagaccaaaggcaagcgtgttatttgacgttaatgccaatcgaagagtttaaaagtaaggaacaggctgagccgagggaagatttactggttggtttttgtaaacgtgacagacacaaacccaggcatgtctgggatgagagaacctcaactgagagactgcctccatcatactggcctgtggtcaggtctgtggtgcagtctcatgactcatgagggatgtgggaaggccccactcactgtgggctgtgtcacctccaggctggtggccctgggtgctataagaaagcagactgagcaagctatggggagcaaaccagtgagctggccctctccacggcctccgcttctgttcctgctctgactttccctgtgaggtgaaacatcccttctgagtgcttctggtgcgtctatcacaaggatagaaagcgaggacagaaagtggagaggaggaatagacgagcaaacataagcatcagtgaactgagaggacacctacagagaaagccaccaaagccttctaaccctgtgaaagacaaaactgagataaagctccctggaggaataaaggcaaggctggaagaagtgagaactaaaatcctgaagaccaggtaacggtatataacggatgcagtggagggaacaaaggaaaagatgtatgtgagaagaaaaagcctgaaaatcttccctatttaatgatgatctgaacatccaaggtcatcttcctgaatgagcatccaagaggctcaacggcctccagacgggatcagctcagacatacacacccagacacatcacaaccactcaaaccaaagcaggagaggacacgccacacacgggattcttagaaaatcatccatagatgtctcagcagaagttctggaggccagaagacagaatgctgatacaatcaaagtgctaaaagggaaaacaaaacaaaacaaaaaaaacctccttccaccaagagtcctttatctgggaaaactccttaaaaagtaagggagacattagacaatccaaaaaaaaaaaaaacaaaggcctggagagtggggcatgatgtcaccctctctgcagtgtaagcagtgctgagggtggcactggagatggcagggtggttaagagcccaggctgcagcagagagctcggttagatttccggcatacacagctctagaggatctggcgccctcttctggcctctgtgggtaccacgcatgcacgaaggtgtgcagacatatgtacaactacacacaactgaacacaaagaggaggaacggatgaagggatactgcagctgggtcagagggatggtaacccaaggctgggtgctgttacagccctggcttgccagtccatgatatgacttaggacactaacacccaagaatgacctgggtttctgtcccagggttctcaatgcaccaacaagcagcaggaaatggataaggagctcctgtggagtgagaaagtttccttcaggatgcgcctttcttatactttggatttaagcttttaaagaggaatgtatatttgaactatgtatctccatacctcccctcagctggtcacaccccagggaagtatctttatcaccctaaccattccaactggtgggagagaactagttcatcatggttgtggaatggtgtttcagacacataaggaaagaactgtggctactcacaagagacttttaagactgggactgctgacattcccttacaaaaaggaggtagggagtcactagaccgtcaccgtagaccgtcactgtagaccctcactgtagactccagcctcttccctacacttacctcccaggtctgcatggtttcacctcaggtgtcctgtgttctcaggaggttctgagggtctagagtgcagaagggactgaagggggtggagatggagcgctccatcggtggaactatcactcatgctggggtgagatggtttcagtaacatggctgtctaggggtcgcctatgctctgtaatgtaagctctattaacttactggtttgccaagacggcctctactttacagtacttggtctggggctgggccctacctggcatgaaccgacatttgtttatgcttctcctcctaggaaactttacacggtaaaacagacctgtattcaaaccccagcacacatgactttacatgtgcacactctgtattcagagcacacaggtaatcgttcagatgaaggacaccaggtgcctggcacgcgacagtcatgatgcgagggagggcatgcttacctggaggtgtccctcctgaggggctgtgtggctgtggatccaggagcgcaccttggccagctcctccctctgcgcgggagagaacaggggctgctgctgttccatgctctggagcttctccaggtcctgcttcagcacctcctctcgacccctaagatcgagaaggcctctgagcgccgcgcgtcccccccagtgccgatgcacttcgtctcttaacttacgacacactcaggttgtctgccacactcacgtggcaaacctttgcttcttggtggaaaaccgtgacgctaaaacgaagcacatcaggaaatgaactttcccggcccccctccgccaggacaaaggcaaacatctcgagtgtgcgcgtcctggaaggacagcacgtgtgcgtgtgtcctggttgtggtgaacagcgtgtttgctctgtatggagctgcacatgtgtggctgcaatttttcctccaagaatcatttgttgcttgaattgagatgaacaaatttgtaagcacatttttttaaatgattgtatctaaaacatttaaaagtcatcttatgccgggcatggtggcgcacacctttaatttcagcactcaggaggcagaggcaggtggatttctgagtttgaggccaggctggtctacagagtgagttccaggacagccagagctatacagagaaaccctgtctcaaaaaaccattaaaaaaaaagtcatcttatgtagaaaaaccacattagaaaccaaaagaacagccagtgtgatggcttgaaagggatggtcacttctaggcaagtgtggctacaggacgctgtcctctatccttacgtacacaccacagctgggaaggcacttgccctcttaccaagcctgagtctgatctctgggacacacatgctagacagcgagaacaggcttccacatgtatgccatggcaacaaaataaatgacagtaatatgaaagttttaggattaaagagataactcatccaaacgctaagtggggtttgcagagtgcttccgtacctctcgggcacctggtatgtcatgagaacacactctggtgtccgctctatcattctccagatggactcttcagccgccccgggaagggcttcgtctctctgtctatcctgtggcctctgtctgttttcagagacttcagaagcatagtcagtgctactgaagtatatactgctggcactgcttcctgccaaagatccacagaatggaaaacacccgtcagacgttcacgtgccagagaggtcctgttccaactttggcacctagctgtccatctcagcagggacagtttaagatgttaaccagatacttaccagatgaccttacaatttcaaatgacttatagcattattgatcacaggcccagaccagagacagtccagtaaccatctatacaatgcaatcccaataactatccatacaatgtaaccctcctgagcaacagaaaggacgactaccaatacacataatgaggatcaaccttaacagcactactctgagagactcttaatgcaagaagctctcatgctgcactacaggaactgaggcggtagaaagcacaccagtggtgtcaggaccgaggtcgactatcagtctgactagaaaacactctcacagcacacgtttaaacacttggtcccctggtgatggcagggtcctgggaagtggtcaaccctttggggcaggatgcctgagaggtgggtgtggggggggggggagataggaatttgaatgttacaacatggccccacttcaggtctgagctgattcttgtctgctatgtctaggtccctccacctaaggctcagatggtctagcctccactccttctcagccgcgatccacacagatccatgagcccaagcaaatcctcctctaaattgcttccagcagatattgtctcagccatgagaaaagcaactcacacagaccgtaaacggttacgggagaactttctagagcagcaggaacagcctaagtgcttgtaacagttacaccaatgtctgttttgtcaaatataacccttcccgaaaggaagcctacaaaaagaaggggggtggggagccccaaacttcctttctatgctggtgtccaagctacaaggccttgggcagagtgatctggtaacggtgaggggctgttttcctggtcacctacctgaggcagcagcagacggacactcctgctgcgctgttgccgtggccagctcaccagaggtgcagtgacggctcctactgccactgggacctgtaacacagtgctggaggggaggacacaagggcacttagcactcccaagagctagctagcaggcagctcttcaactttacctgtcacgtggaatgagattcacatatgtaggtgaggagtggagactcagggctggcgtcaagaatgtgcttaaagtttctttggaactactgtgctctgaccccggctgcatgtcaggcaccacccaagggtgggcttctgtacacctctgtcatctggcaagtggacccggacactttatatgctctaagcatagtgtgtcaaactctaaaaacacagtagcaggcaaaacagagtcccagccctctgagaagacaggctacacagggtgaagcaccacggaaatactgcatccttcagtcctcagcggaagccgtgagagagccatcttcccagctttctcatgaagacacaagccaagatgaacgcaccactgcagtgagcccatctcactagtgacagagctcccatgagaaccaaagtcactgtctctattttctcaagatttatatgactaggtcagcgagatctagtgaaggcacctattaccgacgacctgagtctgatcctcaaaacccatgttataaggagagaaccacctgcccagaattgtcctctgacctctgcgtggacactgtggcacatgagtgcccaccccaacagtaaataaaacgtactttaattagaaatatttattatgtctgtatgtataggtgcatacgtgtttacaggtgcctgaagcagccaggtaagaaccctgggtccttcggagctggagttaaggggtttgcagcacagccgatgccatgctggggtctcctcgggccctcgtgactacacagcaaccactgagcctcttatccagctcctgagctgctgtcttatttcttagcccccaggctttttttttttttttttttttttttttcatccaggctatccaaagtagtgactggggagacagcccatcagttaggagcccttgatgtgcctccagggaccctgggtctgttcctatcacccacacgtggcagcttacgactgtctaaaactccagttccaggggatccggctacctcttctggcatggccccggagcataccacacacacgctggcaaaacactcctacgcataaaacaaaacactaatttttgatttcccactaaaatgcaggaatgccagactctgaggtttaatctgataaatatctcgaagtgcttttataggttaagagtttggaaagttcaagatacttgacctaaaaattttcagttttgaaaatggcttgtat

SEQ ID NO: 8 - DNA, 538 bp, Mus musculus
ccagagcagacgcccagacggacttctcgccgcatcatggacagggtgcccttctgctgcctgctcttcataggacttctgaatccactgctgtcccttcccgtcacggacactggtgagaggactcttcagcttccagtgcttgaggaagacgctcttcgggctctggaggagctggagaggatggccctcctgcagaccctgcgtcagaccatgggcacggaagcaggggagagccctggagaagcaggtcccagcactgagactcccactccacggggaagcatgaggaaggctttcgctgggcaaaattctaacactgtactgagtcgtctcttggcaagaaccaggaaacaacataagcaacacggggctgccccagagtgcttctggaaatactgcatttgaggagacacaagcgcccgttggtctctcagaaccattgcttcaggaaacgggcagagcagatgcttgaagcaaaatcacgctaacgacgccttgttcttcattatgagaaataaatcctctatgtttctca

SEQ ID NO: 9 - protein, 135 aa, Mus musculus
PEQTPRRTSRRIMDRVPFCCLLFIGLLNPLLSLPVTDTGERTLQLPVLEEDALRALEELERMALLQTLRQTMGTEAGESPGEAGPSTETPTPRGSMRKAFAGQNSNTVLSRLLARTRKQHKQHGAAPECFWKYCI

SEQ ID NO: 10 - DNA, 25899 bp, Homo sapiens
gtggtaagtgagatgggagaacattctaaacagggtaagaggaaatacaggggtaaaagatggcaggctgcaattttaaataacggctgtcggccaggcgtggtggctcacgcctgtaatcccagcactttgggaggccaaggcaggcagatcacctgaggtcgggagttcgagaccagcctgaccaacatggagaaaccctgtctctactaaaaatacaaaattagccaggcgtggtggtgcatgcctgtaatcccagctactcgggaggctgagacaggagaatcacttgaacccgggaggcggaggttgcagtgagccaagattgcgccattggactccagcctgggcaacaagagcaaaacttcgtctcaaatacaatacaatacaatacaatacaatacaatacaatacaatacaatacaatacaatacaatacaatacaatacaatacaatacaatacaatacaatacaatacaatacaatacaatacaatacaatacaatacaacacaacacaataaataacggccgtcagggtaggccttattggaaacgttatcgcctacttatttgaggagagactaaaaggaggtgaacgtggtagctacatagctattggagggagagcattccaagcagagggaacagccagtgcaaaggtcccgctgtagtttggaaactgaaaattgatcctcagtgttggaggtgggctctaataggaggtgtttgggtcacgggggtggaccccgatgaatagatgaatgccctccctggggtgcggggcattcagtgaattcttgctctgttagttcctgagagaactggttgttaagagagcctggccctcctgtctctctcttgcttcctgtcctgccatgtggtctctgcaaacaccagctcccccttgccttctgccatgagtgccctcaccagacgcagatgccagcgccatgcttcttgtacaagctgcagaactgtgagccaaataagactcttttcttaacattaaggttggtgcaaaattaattgcagattttgccgttgaaagtaatggcaaaaaccgcaattaattttgcaccaacctaataattgacccagcctcaggtattcgcaggtatcctcaggtattctcttacagcaacagtaaatggacctagacaggcccagaggtaggagcatgcaggggacatagcgggggaactgcaggagaagaggcctggcccagcaggcccactgtgagggctttgcttttctcagaaggaagaggtcttttaggcagggcgcggtggctcacaccggtaatcccagcactttgggaggccgaagttgcgggggcggggggggaatcacctgaggtcaggagttcgagaccagcctggccaacatggtgcaatcccatctctactaaaaatacaagaattagccgggcgtggtgggcagcgcctgtaatcccagctacttaggagactgaggcaggagaatcgcttgaaccaggggcacggaggttgcagtgagccgagattgtgccactgcactccagcctggtaacagagtgagactccatctcagaaaaaaaaaaaaaagaggtgttttgttagaaaccagtattctggccattggcacctgggggaatcctgaagtccaaaacctacttgtcaccaaagtagaaatatgaacagagtttgccctcacatgttcttcacgctccacaccacctgccagacgctgtacctaaccaccactggggacctgctcgtttccgccttttgtcctggggaaagggggctgtttcctgagggacggggcagtggtgggcaccaagcctggctacctggggccaggctcggctctgccactcactagcgttgacctggggcctgctgcggaggctgctgtgaggacaccgcgtgcaaaaggcaaatcgggtcaagcccactgcaagaaaacccagttacgtgatcgcccttcttgaaccatctctctcctgacgccagagcgtcttccagctgctggccctcttctctgccccctttctagcaagactctgcaaaagacttggtgcttatggtttccacctttttcccccttttgtttcttgaacccaccccaaccagacttccaaccccccaggccaccaaaacggctcttgtcaaagttgccagcattcagctgccttcttgacctctctcccaggggtttaacaggcaccccaaaccaacacttccaaaccaaatcactgacgatcccctccaacctattccaaactcgttgcacagtttggttacaggtaacgtcaccttgccaggttctcaggcccaaaactctgggatcatccttggtgttcctctttcatatccagcactcctgcaggtactgctggctcttccttcaaaacagatgcagggatctgacctcttcacagaggctggagtgagccttttttttttttttttttttgagataaggccttgctctgtcacccaggctagagtgcagtagtgtgatctcggctcagtgcaacttctgcctcacaggttcaagcaattctcatacctcagcctcccgagtagctggaattccaggtgtccaccaccatgcccagctagtttttgtatttttagtcagacagggtttcaccatgttggccaggctggtctcgaactcctgatctcaagtgatcctcctgccttggcctcccaaagttctgggattacaggtgtaagccaccaggcccagcccggactgagccttttaaacataatttagtccgaccatggtggctcacgcctgtaatcccagcaccttgggaggccgaggcaggaggatggcttgagcccaggcatttgaggctgcagtgattagtgattgcaccactgtgctccagcctgggcaacagagtgaggccctgtctcgaaaaataataataatagaaataaaacacagtttagattgtgccatactgttcttcaaaatggacctcctatctcattttaaaacagaaagtccttacggtggcttccggagcctgtgtgacctgcccttctgcatctttctggcctcaactcccacacttctcccctttgatcacactgaaccacacgggcctcctggctgttcctcaaacaggcctaatacagtcccaccccagggccttggcactcgctgttccatctgcctggaggctctttctctcagctagctgtgaggctctctccacgtttcctgcaagcctacgctgaccctctccaggaaaagagcccgtccatcccatcgcccacctgaacctacttagttatctgtggcattgatcagcacctgacactgaacataaactcggtgaggcttggtctgttttggtcattgctacatccctagtaccctacacagtccctggcacatgctcaatgttcgttgaatgagtgagagaataacattactcactgttcaacaaacacccttgtcgtctcctcattgctatatatatatgtatgcatttttttttagacaggatctcgctctgtcgcctaagctggagtgcagtggtgcaatcttggctcactgcagcctccgcctcctgggatcaggccatcctctctcctcagcctcctaagtagctgggactacaggtgcatgcaaccatgcctggctaatttttcatattttttgtagagacagggttttaccatgttgccaagactggtactgaactcccgggctcaagtgatctgcctgccgtggcctctcaaagtgctgagatgacaggcatgagccatgcccaggctcctcattgctggtaaatgacaaaaccccgaattcctcgatatggtcacgtgacatagccccactgatctctggttttatctggctgtgtccagcccttggcaaacatgctgggcgcatggctcaggctgatccctcatctgaccccagggcctttgcactcactgttccgtctgcctggaggctcttcctctcagatagcttcgaggccctctccacatttcctgcaagcctatgctgaccctctgcaggaaaagagcctctcctgtgaagtccccaccattctccccactatctcttgaggggaccagcacggggcctgtgaccccctcaggggttattgctgcagctgacagacgaggcattcagtagtcacttaagccaaatggttatctgaaatataggtgactagaaacgaaatctagaattcatgtagattagattaaattaaaattttaattaattttaattaatataaattaaaagtctatctgagagcctctaacctatgttttacatgaacacaagtaagaatggaccccgatgatgtctgcaggaagttcagaagttcaatgtcagttgaatatgagctgccctggtttcaggtatcctcaacttctctggacccaagtctgcgcataaaaatggtacaaacattgcagtattcaaagcacacacaaacatattcctcacagatcaccccaaattatgatatttatttggcaatcagtgaataggctttaaatatttggcaaagtcaattcctatcaatttctcttcatggaatccccacaaccgaggagaatcaatgtaacctcatattcagaagttatgaccagctgggcgtggtggctcacactgtaatcccatcactataggaggctgaggcaagtggatcacttgaggctaggagtttgagaccagcctggtgaacatggtgaaacaccatctctactgaagatacaaaaattagctgagtgtggtggtgcatgcctgtaatcccagctacttgggaggctgaagcgtgagaatagggacttgcttgaaccctggaggtggtggttgcagtaagctgagatcgcaccactgcactccagcctgggcgacagagtgagactctgtgtcaaaaaaaaaataattaatagaagttatgagcatattatacaacgacaaacgtgtcatcagggagagggagtttagattaatttcaaaactaaaactgaaaagaggtttgtaatttttatgatatgcttatccagtggatgggagtgctccatagacaaagccatcccaaatattaatggtttacttctttatgacacgcagacaatgcccctctcttttcagaagttactttgtttgcagctaattagaggaatcccacttctcagggtggtctttgttcatgtatgtcctggcacagatgtgaagccatgctgcttaatgcaagggccattagcgtggaatgacgtgctcagtacatttctgggacaaggtgacactgtcattgatggtctgttgaaggaaagaagctaattttcttttaagcgtaagcctttagtagtaatttaattaggccatgctgtaaaaccatcactaataactgtcagaagtaccccctgagtcaccagggaatgacaaagcttggcaaacagcctcttccttggagccccggagttcatctcccacctcattttgaaatggtcctcacgggtcttcaaagacccctgtctcttggcctgagtccgtccttcctctttgtgagacttcatgagtgctttacatatatataaacatgcatgagcataaacatgcacatgtaatacacagacagacaatgtaaaacagctttttttttttttttttctggagactgggtctcactctgttgcccaggctggagtgcaatggcatgatcacggctcactgcaacctcaacctcccaggctcaggcgatcctcccacctcagcctcccaagtggcccagaccacaggtgcacaactactcctggctaagttttgtattttttgtagagacagggtctcactaggttgcctaggcttgtctcaaactcctgggtttggcaatcttcctgcctcaacctcccaaagtgctaggattacaggtgggagccaccatgctgcatcaaaacattttaagaaaagaaaaaaatccctttattttcaattctgtaaaatgacaccaccagtgcttgcccacaagctcatcttttttttttttaacatagtagtaactacctgatattctagttcttttattatattttccaagtttttataatcttttggttactattttaatggttaccaaaattacattttgatacttaatgcacttatttagggcattgaggccaaaaggttgaattacaggagagatggaggattgtggggagagcaagggtgagtagggagaggaaggagggaagagggaggagtcaagtcactgagggcagagggcagaggtcagaaggccagtgggatcctggtccctgctcctccacttttcctgggattctggaagctatccagtgtctttccaacatgcttcaccttccttccttccttccttccttccttccttccttccttccttcattccttttcttccttccttccttccctctctctctctctttcttttcctacagagtcttcctttgtggcccaggctggagtgcaatggcacgatctcggctcactgcaacccccacctcctgggttcaagcaattctcctgccttagcctcccaagtagctgggatcataggcgcccaccactactcccggctaatttttgtatttttagtagagatggggtttcaccatattggccaggctggtctcaaacgcctggcctcaggtgatgcacctgcctcggccccccaaagtgctgggcttacaagtctgagccaccgtgcccggctgttttcttaaattggatggaagtggtttctcttggacgttaggttccgtcctctgtccgaccctgctggcacatgggggtgctgagaaatatctgtcgaaagagttaacaagtcttaagtgattcgagcactttccatcttagaggacagtgtgcgagcactcgccctgggctctcctgccagcaggggtcccccagggactctcttcactttatttgccctcgcaggaatcttctttcagttcctcctcctcggaggccacgcttccccgacttctctcgctggaggctccacactccactcaccactgaacggatggctgccctgttcctttcggctcctgctcagatgccccttttccagggcatcccgagggccctgtctgaaatcacacttgccctgactacctgcccctgtactgtctccttgttattgttcttcatagcaataaacaattcctacagcgtatgttaatgttgttgtctatcgcctccagtcagaaagttcatgagagtagaaactttttattttgttcaccgttctttcccctaaacagagactcccatagggctggtgccccactcactgattcaacaaatatttatcgagtctgcctactataaaggataaatacataaaatagtgcgatagccaggtgtggaggctcacacctggaatcccagcacttccgggggccgaggcaggagaatctctggagcccaggagtttgaggccagcctgggcaacatagcaagaccctgtctgtacaaaaaataaaaaagccatgcatggtggtttgcgcctgtaatcccagagggttggaaggctgaggctgaggcaggaggattgcttgaggttaagattttgagaccagcctgggcaacacattgagaccccatctgaaaaaaaaaaaactagctgagcgtggtggcatgtgcctgtggttccagctatttggaaggccaaggtagaattgcttgagcctgggaggtcaaggctacagtgagtcatgatcacgccactgaactccagcctgggtgacagagtgagatcctgtctcaaaataataaaataataataataataataataataatggccagatgtggtggctcacacctgtaatcccagcactttgggaggctgaggcaggtggatcacttaaggccaggaggtcaagaccagcctgaagtccttttcaaaccttttgtcatattgcccaggctggaatacagcagcatgatctcagctcactgcaacctccgactcccaggttgaagctatcctcctgcctcagcctccggagtagctgtgactacaggggcccgccaccacgcctggctaattcttttatcttctgtagagacagggtttcaccatgttggccaggcttgtctcaaactcttgacctcaggtgatctgcccgcctcagcctcccaaaatgctgggattataggcgtgagccaccgcgccttgctcggctttttcattttcttaccagtatcttgagcaaatgtttctaattttgataaagtccaatttatcagttttgttcatctattgattaatttacaaaaatggtatctatggtatacatcatgacttgtttgtttgttttgagaaggagttttgctcttgccacccaggctggagtgcagtggtgtgattttggctcactgcaacctctgcctcccaggttcaagcaattctcctgcctcagcctcccaagtagctgggactacaggcacctgccaccacgcccagctaatttttgtatttttagtggagacggggtttcaccacattggccaggctggtcttgagctcctgacctcaggtgatccacctgcctcggcctcccaaagtgctgggattacaggtgtgagccactgtgcctggccatgattattattattattattattgttattagtttgatgttttgatatatgcatacattgtggaatggctgaatcaagctaattcgcatgtgtattacttcacgtttttagcatttttttgtgatgagaacacaaaatcgatttttagaaatcttcaactatacattgttattaatcagagtcaccctgaggtacatagatctcttgaacttattcctcctgtctcaatttttttcctgtgtgatttgtgtcttgtctaagaaatatttgcctaacctgaggttgtgaaggtgttcatgttttttcccctagtagttctatcattacgttgtaaccacttttttttctttcttcttttttttttttttttgagacatggtctcgctctgtcacccaggctggagtgcagtgggacgatcttggctcactgcagcctcaacttcccaggctcaagtgatacaggcatgcaccaccacacctggttaattgttgtatttttggtagagacagtgtttctccttctctttttttttttttttagacagagtctcgctctgtcacccaggctggactgctgtggcgcaatcttggctcactgcaccctccgcctcctggattcaagcaattctcctgcctcagcctcctgagtagctgggattacaggcacgtgccaccatgcctggctaatttttgtatttttagtagagacggggtttcaccatgttggtcaggctggtctcaaactcctgacctcgtgatccatccgcctcagcctcccaaagtgctgggattacaggcgtgagccactgcacccggccgagacagtgtttctctatgttgcccaggctggtcttgaaatcctaaactcaagtgatcctcctgcctcggcctctcaaagtgctgaaattacaggcatgagccaccgtgcctggcctatctttgtaacttttgtgtttaggtccacagaaagttttgagcaaagaactaccatgatctgacttatgcagatgcttctggcatcactctgctgtgctgagcctgtggcaggcccgaaggcagacttcaggacgcctgtcggggacctttccacccatccgggcttggaccagcttgggcagagtacagttgggagtagaggccacattctggaaatgtttatcagcgagttttctggtgttaagtccttcctccctccttgctgaataataatcaactttatgaagttatttcctttctctgaagattgaagtgcttgcggcttcacatgaggccacgtgtatgtacagaattgtcttgagcctggagcaatgtttgctatgtattttaacttttcactgttttaaaggaaatagctggttttacgttttaatccacagattgtcattcttcagggatggcagccctaaacacagcatggcaactcatctactcactcatgaaagattaaaaaatggaaaccaacgtatttcatcttatgctctgcgtcacttctgctcggactcataaatccacgtctctttgctttggccacttcaactcatatccaagccttcctttaattcatgatttattgctgtaagttgcctcttttgccagatttataaactcactgttctttatataatacctactttgtacactaggcaacaagacagttaatttattgtctatgacttgttaccttgaaaaattacatcaatgcaaagtgattgccttttagcctccatagccaataaattcattttttttttttttttggagaggatgatgtcaggtcataggatgatatatataatcagtgagcaggcagaatgaggagacagttgaaagttctctacaacagaagccaagaaggaagccgtctatcttgtggcgatcatgtataagctggcctcctgctgtttgcttttcataggattcttaaatcctctcttatctcttcctctccttgactccagggaaatatcctttcaactctcaggtaagattttttttttccccttatgttagtcttgaaagagcctttactagtcttaaattcaatgttagagataagaatgggattcctgctcgaaggagtctggagtcttgttctctcaatagtcccagctttgaaaagaatattaaaggatccttactgcacattttagatgtagtaatggatacagttttttttctgtctctacaatgtaaaaggagaagaggataattgcttgtttcatgttacctctgtactcttgttttgggtaatatatacatttttccaattttaaaaattgcatgaaatttaaaacatcattacttttagtttttactttaaatgaactggttgaatgtagcactggttgttctaattatagattattaatggatttatttgtttcaccttttgtttaaaaaaatcatctgatatgtgttctacgaaacaaaaatgtttactaaaaattttttagtaaatgacaaactagggaactagggagttcatagacttccaagtatattgatcgtttccttttgatttatgttaattcagtttaagtctaagttgagttaaagaaatacacatcagtcaagtagtttctcattttgccattatctttccatttagttagagaaatgagaaagctaatgcttggggattaggttccatcaaaaacttaactagatttaatcttatctttaatcttgagtactttttaaataggctttttttaaataaagaaaaaaaacaaacaaaccctcttttaagccaaggattttatagtttctcgtctctaaaagttcatcccaagcagctttctgatgatcgtcaagcactgtcatcaggcactgccaaccaacttcccgagtcaccgagatgatcattggctgtcctactaatagttaaacactggcattaactttactgaatctctgctatttacaaagaaacagcacacatctcaagatgaaataagtgaaaatactcagctactactgtcatcttaaaaaattttacaagtaatttaagaaacatagatgaaatgagtgtagcatctcacacaaattcgaaacaagtggcagcttatcgcagaatttgttctcatttatttctccagaaatgtgctttcctatcagcatttacagatgatgaaattttatagattttcattaacagtctttagaagtgctgtgaatgtgctctgatgcctttatgatgatctgctcactgtcctccaatcaaggttgcagctatttgtaagcctgtggcacgctggtcccacacatggcctcccaccctgactcccacagcctcgaatcgcaacacagcagcaggtctgcacttaccacgcctcacactccggtgtgccctttccacacaccttaagcgcacttaccatgcattctatatgccatctggtcgaccacatttcacataggaaatgccacaatcaagttccttacagatgattttgaagccaattctaagtataataattgtattgaaatcttgaagttcagtaaaagaagaggtgataccatcctactggctttataggaagattgtaaacgatctttctttttcctctccaatgtcaccacccaaatatctaaaagcaaaaaggcagtaggcagcagtagataagcagaaatgagggagagtcagactttttgaaccaaaatggttttgagaaaggctgtggcttatccctcagctctcgttcgaggcagccgaggggcttggctcatcacgcgggtgtcagatccacgtctcccggcttcccattctgctggctggcacacgggctggtagcatttccacctcttctagaataccactgatgacacgtcatgaactcagcgttggaagtttttctagtgttcatctccctatctctggtgctcgccaaagacacaaggaacagaaataactaactgaaggatgaacccaattctaagtatctgtttttactctgtagcacctcatgaagacgcgcgcttaactccggaggagctagaaagagcttcccttctacagatactgccagagatgctgggtgcagaaagaggggatattctcaggaaagcaggtaaaatgcttctcatgtttatagcgtgtctgatttaattgctactgaacttaccgtctgtcctcatctagaagaggtaaagctctattttggaatataaagatgagctatataaaataagtaattaccaacactctcccctcccggcctgtgcaaccttcttttccccagcagctccttgctcgcactgtgctctttggtacctcagcattttgtctttctgtgtggacttttatttttgcggggtagagcttggtggtaattattccagtttccagtgagtgcaatttaaaatcctagtttcccgtttactgaaaacttaaagtaatctttctgtactccagtttcttaatctgtaatcaggaatgattaagtttccacctcagaaggtaacttgtgaagagtcaatgagtcaaggcaagtaaaatgctcgagtcacacagaaagtcattaataaaatgtcagcttattcccccgtggccacattcccccaagcattgacacatatgctcaggaagttctggaaacaaaattgagccttttgctgggtgcggtggctcacacctgtaatcccagcactttgggaggctgaggtgggcggatcacttgaagtcaggagtttaggaccagcctggccaacatggtgaaaacccatctcgactaaaaatacaaatatcagccgggcatggtggcgggcacctgtaatcccagctactagggaggctgaggcaggagaattgcttgaacccaggaggcagaggttgtggtgagccaagatctcaccactgcactccagcctgggcaacagagcaagactctgtctcaaaaaaaaaaaaaaaaaatttgagccttttaagataggtattgtttaatagacaggagttcatttgttataaaatatctttgacgagctactggactgcgaagttactgaggacaatgcagtgacttctgtgaattcgagataagaacaggagtgcctgtctgtctgcattcaagaaaagcttgctgcagtgtggaaaaagaccagaaactagacataatttagtaatattattttgtatattttaaaacaagcatacaagagaaacaacagatctgatgaactggcttcaaaactgtttttcagactcaagtaccaacatttttaacccaagaggaaatttgagaaaggtaagtgactctatttatgagttaggtttaaaaaggtgaacattctgtactggttttacaggactctgaattcatgaactagaggagtgttcttggtggaaaccacaccttaaaataattggccagcatgaccaggcgcggtagctcatgcctgtgatcccagcactttgggaggccgaggcgggcggaccacctgaggtcagaagttcgagaccagcctggccaacatggtgaaaccctgtctctactaaaaatacaaaaattagctgggcgtggtggcacctgtaatcccagctactcgggagactgaggcaggagaatcgcttgaacccgggaggcagaggttgcagtgagctgagatcgcgccactgcactccagcctgggggacaagaatgagacttcatctcaaaataataataataataattggccagcattatttcaaagcattaatttttccaaattttgattgatataagatctgaatgcaacaggaacctacccagtgcctgttttgggtaaatcaaataagttgtgaaagaatgaaaaaaatgggtgaggtccctgctctccagtctggcatccacttgtgctctcattcaccatctaacatgcggcccaccgccagcagcaccgggagcacctggaagccagtgagggatgcaggatcttaggcccacctaggacctgcggaagcaaaatctgcatcttaacaagatccccaggtgattcacatgcatgggaaagtgtgaagggcactgcaagacaacatctaatggaggaaggccatgctccagacattgacctgaacgatgtacagaaggccgggtgcggtggctcacacttgtcatcccagcacgggaggccgaggtaggcggattgcttgaggccaggagttcaagaccagcctgggcaacacagcgaaaccccgtctctacaaaaaatacaaaacttagccaggcgtggtggcatgcacctgtaatcccagctattcgggaggctggtgcaggaggatcacttgaacctggaggcgggggttgcagtgagaggagatcgcactacttcactccagcccggggaacagagcaaaactccatctcaaaagaatacaatacaatacaatacagtatacacaatacatacaatacacagaagacaatacatgcacagaacatgttactatttatttatttatttattgagacagggtcttgctctgttacccaggctggagtgcagtggtgtgatcttggctcactgcaacatccacctcccaggttcaagcaattctaatgcctcagcctcccgagtagctgggactacaggagcccgccaccacacccagctaatttttgtagagacgaggtttcatcatgttgcccaggctggtctcaaactcttaggctcaagtgatctgcccacctcagcctcctaaagtgctaggattataggcatgagccacctgcccagccgctgaaatgatttaaatagaaatcggtcaatgagggtttaggaaaattcaggacaatcgctgggctgaacagactggaaggacactcattagaggtagggaggtgggcacaggagccccacgggcccgggacactcttgttacaattatagtccagggaaaaatgcaaatacttttaagaagtccagtgtcttgactcaagattcctttttcttataggaatcgtcactcgttggtaacttatctgtttttttttgttgttgttgttcgtttggattgttttagtttcaggatttctctggacaagatcctaacattttactgagtcatcttttggccagaatctggaaaccatacaagaaacgtgagactcctgattgcttctggaaatactgtgtctgaagtgaaataagcatctgttagtcagctcagaaacacccatcttagaatatgaaaaataacacaatgcttgatttgaaaacagtgtggagaaaaactaggcaaactacaccctgttcattgttacctggaaaataaatcctctatgttttgcacatatcatgagtggttattttccctataaacatgtcctgaaaatttataattattcttttcttccatttatccttagaaaattctttgacatttcagaagcaaagctaatgaatgaacagaagcaaacactaagaaaaagtcacaaaagttaaacttttgttaaatggcaaatcatttaaataaactacattatcttagctatgatgtcctctcaaccttttaaaaagacaacatattacttttaaaaaataaatcacagccaggcacagtagctcacgcctgtaatcctagccctttgggaagctgaaatgggtggatcacttgagaccaggagtttgagatcatcctggggacatgacaaaaccctgtctctaccaaaaatacaaaaattagcagggcatggtggcaggtgcctgtagtcccaactgctcaggaggctgaggcacgagaatcgctcagacctttggggtggagcttgcagtgagccgagatcggaccactacactccagcctgggcaacagaggaagagtgtcttgaaaataaacaataaaataaataaaataaaaaataaaataaaacaaaataaaaagaaaacagtatcttggcttggaaaaaatctctagttacgggtgtctgagatgaagggcgggagtgtctgatgctccttggtttctgaagttcgtgggggaagttcatgtgctgagattctttctcttggctgaccaaagtcctgaacacttgacaattttaatcttttaacattgaaacttgtatgatctcagcgtctgtgagctcaaggatcacagtttcttacaccgggaaaaacaccttgatgtctcttgcagagagaagaaagctgaggcaagatttaagattgtggaagaaagagcctggcttacgaatttttaaaaactatgtgtgtaagtactgacttctattccgtgaatacatctgtataaatgtggtttatgtatgtatagaatatacagtgtgaactcctgagagttctgtgtggttctacacagaaccatgtataggggaggcctggatgtttatgagaaacttgtttctctcattgagctctgacatcccaccacattccagaggggtctgcaacaaccaaagagcaacacacgacttgtgtcaatcttgtcactgaccatcacaagtttcctagagagtacaggtctcagagagtttaccctaaagacatcaagaacttggccgggtggggtggctcaagcctgcaatcccagcactttgggaggctgaggcgggtggatcacgaggtcaggagatcgagaccatcctggctaacatggtgaaacctcgtctctactaaaaatacaaaaaaattagccgggcatggtggcgggcttgtagtcccagctactcgggaggctgaggcaggagaatagcgtgaacccaggaggtggagcttgcagtgagcggagattgcaccactgccctccagcctggcaacagagcgaggctccgtctcaaaaaaaaaaaaaaaaaaaaaagacatcaagaacaaatctaagggagagatgttttaaactggaatgaatgtgcaagctcagaaacatgctaacattgaggacagctatgataacactgtggtgtgtctctcagtgttgaaattaaaccagttctctggaacacaatgttggcaccataaaactattcctgtatcagagataacttaaaagtggaattccactgcagaattctgaagtccctactcattttagtgtatcaggtgatgattcatacagattggggctttgcatcaggtttctagggtcagattcctactcccagtgcacaccagctgtgagtctctgatccagttacttgactccccctgcctcagtttacttctctgtaaaatgacaataacacaatgcttatttcacagggcagttgtgaggattaaataattcacatcaagcacttagaccagcacctgtcagagtagtatacacgcaaagtatacttagctatttttcttcctgctcttattatggtttgttatagaaaagaaaggtgcaaatggtctgaaaggtgtaaactttaaaaagctctgttggcttcaggatcttgttccctattttaatttctagattttgttgccaccagttacacagtcagatcttgtacacaggttcaccctagctcccacaagcttagcgttccaataatggaacactaggtgtaaaagggctaaataagccaatacatttcaaagtgcctgcatcttcatcctccacatagtaggtgctcagacacattggccaaggcaaacacagaatgtgcctgagaaacacaaggttaactaatatgagggcccctcaatagatcataagaagcacttctaaatgatacagaatacacattcaaagatttgttgacacagggcaggacaatttctcacgttttacatgtacagagtttatttgttgtttttacttaaaaagatacccaactgaaatattactaatgattaaaaacaaattcagagttaattacaaattcagttgaaacaaaatttcagtttggattaaatttacactgtgaattacaatgaagtgtcactcaattgcaaaatgatttccattcatacagcattttgtttttcataaattttgacctctgaccaaagaaaacacagctttttgggtaacattcatgaaaacattgaagcctataatataaatttttattaccactttcaatagtcattaatataaaaagttaacaaatttaaacaacaaagtttaagctggggagagccccctcggggggcatcggtcaagctgctgaaccccctgctcaccgccagcagcaggtgcaacctgggagtgcgtgaatgcgtccacccacaggaggagcgctcctcatgctctgacagttctgcgacaagcaccagtttcaaatcaaacctagtataacaagtactccataaaacgtgtgctaaggcaaagaaataagcacatttggataatacaaatatccagaaacaatggaaaagaaaggcttctattagagaacagaaggcttagcatatatgagtgcgcaatgatcctgatagctacggatactgtttttatttacagtggcaaaaactttattactacagaaggtcactgacagacaatctactggctggttaattgtttcaaatttgattctttatcaagcaaaaatatcacacaacctgatcaacacacacacaaacgcttcagaaatcacttaactatcaagatggagcagactatgagagctatttataaaacacgaatatttgcatggaactgcttaatatcagaaaattccaagaactgtcaaaggcagcatttgaaaatagttctgacaccttaagatggaattaccatccagaaagccactactttgaaaggaaatctgagctatgaggatggtcatcatggatgaaaaggtcgattttcctaatcattatcaggacgcatttacaaaaagctgtaaaacttcaaaggagaaaagtattttccttaaaaaaccataaaaaaccaaaaacaaaaaaaggaaaaaaaaataaattagtttgttgcaagttatataaagacaacaggttactgtaaccctcattttcttctatttgttttttctgatctgcaggggtgtgaatttcatctatcattccaagtttaagaaggaatcagggacttctctaaaaagcaccagagagtgagctgatttatcaagtaaacaatcacactcacttcttaaaagacacaactacaaacgccatagaaagcggtgactgatggagcctgcaggaccctgtgggcgaggacaactgggctcgcctggacgttttctcttttgcagtccccacaacactgccctgttcaagggcaaacaaaaggcagtgccagtcagacctgtggtagggctggagcgacctcttttgtataaattgattggaaagaaagagttaactgttttggtaagaatgaaaatttaaacacagaagtatgtaagaatgatactagcttttacattacttgtaaaacattttacaatcattattttaaaaacaaaaatactcaaaagggcaacagcactgggtaagaagctctttcattttaatattacacatgcaaatgctaactgaaacttacaagaataggcccatggtaagcggatcgatttttaagataagactttcagaatttcactggaaggtgggaaatcaataggaaagggatctacaaggatgaaggccaaaactcaacccccaaaacctggttatcccagatatgctaatggacagtatgtgctaatgtgttgtgagaaaaccggaatgtttcatcttaattatggaggggaacgccaggttgaatgaagcctgtatgaacgtactacattcatggaaaccattatgaaaagtacacaacctgtaggtggcatttcttcaagcactctaaggggaaaatgacttatgtaacagaacaaaataaatgaggctaaggtttggggctcattctagctatacttctaattataatttactctgggtgacatctgaaataaagatacacatacctctttagaggccatccaatctctttagaagacaattcaactacaaaaagagcctaactggccattttaatatatcaggaacaaagagaagtaagattctgtatacaatgtctgcttcaaaaagattacgtgtattaaaaaatcaagaagaaaaaatcttaacattcaatgataacttcatggtcatttaaaagtccaggacttaaaaaggtctgtctgtgtaacacgtcttggaaagggtatgaaggttcatcctcacagtcactcaacagctgtcttctaccagaacctgaccacaggatgtggccgcaccatcagctgaatcttcattttcacaagtgacacaggcctccaaaaaagaacaaagcaggcgagttacttgatgtcaatgtcacctaaagagttttaaaacagtaaaaggctggtcacatgtttctaaatccccaacttattcatgtctgaaaatatttcattatagttcattctttattattattataactatttttatttttttttttgagacagagtcttgcggtgtcacccaggctggaatgcagtggtgcgatctcagctcactgcaacctccgcctcccaggttcaagcgattctcttgcctcagcctcccaagtagctgggaccacaggtgcccaccaccgcgcccagctaatttttgttttttagtagagatagggtttcattatgttggccaggctggtcttgaacccctgacctcgtgatccgcccaccttggcctcccaaactgctgagattacaggtagtagacaccgcgcccagcctcattctttattattaaaaggcaaatgacaaattgtttaaatacagtcatgtgccacatgacgtttcggtcaaaaacagactgcatatataatggtggtcttgtaagattatcctaccacatttttatggtaccttttctatgtttagatacacaagtaacactgtgttacaacggcctacagtattcaggacagtaacagctgtacaggtttgtagcctaggatcaaaaggctgtcccatagggcctaggagtgattgtagcaagctactccactgaggtttgtgtgagtacactctaggacgcttgcacaaaacatccccattactaagtggtgaaaggactgtgcttttgtttaaattgctgtggggctcatttttcatatacctgtctatttacaaccagaacaacactgaaaaaaacaaagacacttacaataaccagcccagctcctgctttttggtgagaccctacccagccattcttacatgacagacactcattcttttctttgaaaatggagatggggagattattctgggaagatggcagagtaggaagactaggactctgtctcctcacctagacaacaactggactgacaaaatgagtccgaggtaactatttggaactcgagtctatctgaacgcctgcaactttctaggaaatgcttagacggtaagctgtggttgcctgtggtcaatttcagcttgaagcacagcagcaactacccatccctgaccttggacaaggcacgtattcctggagcagcctgcacacagcttgtgggagtcagagtgggcaataaggaccccgtcttccaacaatcataaaacaagaatcaataagccctgggaaaggggagaatctggtttccagaattactatgttattagattcaaatgtctagttttcaaccaaaaaaaaaaaaaatcattaaggcatacaaagaaacgccaaagtacagccccagcttgtgcgacccccttcctgcccatgggccacatgcggcccaggatggctttgaatgtggcccaacacaaattcataaactttcttaaaacattttgagttttttttagtgatttattattttttagctcattaactattgttagtgttagtatactttatgtgtggcccaagacaattcttcttcttacaatgtggcccagggaagccaaaagattggacacccttggtataggccattcaaagggaaaaataaaccaatagcaaaagtctctgagaaagaccagatgaaagaattgcgagacaaagattttaaaacaactgaaagatgatcaaagaactggtagggcacagtggctcacgcctgtaatcccagcactttggaaggctgaggcaggtggatggcttgagcccaggagttcaagaccagactgggcaacagagtgaggctccatctctgggaaaaaaaaaaaaattagccaggcatggtggtacacacttgcagtcccagctacttgagaggatcacttgggaccaggaggtagaggctgcagtgaactgtgatcataccactgcactccagcctggatgacaaagtgagactgtcttaaaaaaaagaaagaaaaagaaaaagctgggtgcggtggctcatacctataatcctagcactttgggtggctgaggcaggtggactgcttgagctcaagagttcaagaccagcctgggcaaagtggcaaaactccatctctacgaaaattaaaaaattagctgggcatggtggtgtgtgctagctactcgggaggctgaggtgggaggattgcttgagcccaggagactgaggctgcagtgagccatgatcatgccactgcactccagcctgggtgacagagtgagaccttgtctaaaaaaaaaaatagaaaaaagaaaaagatgatgaaagaattaaagaaagacatggagcaaaatcaagaaaacaatgtacaaacaatgtaaatatcaataaagagatagtaaacctaaaaagaagccagaaagaaattccataaataaaaagtacaaaactgaaatgaaaaattcactagagggattcaaaagccgatctaagcaggcagaagaaagaatacacgtatgaagaccggacaattgaaactgtcaagtccgacgaacagaaagaaaaaagactgaagaaaagtcaacagggcctggaggacatgtgggaaaccatcgagtggaccaacataagcactacaggggccccagaggaagaaaaagagaaagaggcagaaagattattcgaaaaaataatggctgaaaactccccaagtttgatgaaaaacatgaatgtaaaagtccaagaggctaaatgaactccaactaggatgtactcagaactcggagatccacactataattaaataccgtgcagtcaaagacaaagataatcttaaaagcagcaagggagaagcaactcacacatgcaggagattctcgataagattatcagcagatatctcatcagaaactgtggaggccagagggcagtgtcccagtgtattcaaagtgcttaaagaaaaaaaactgtcaactaagaaatcctttggccaaaagtaagggagaagtgaagacattcccagacaaacaaaagccagggagtttgataccactagacctaccatccaagaaatgctaacaggagtcctgcagggttgaaatgaaaggacactgacagtaacctgaagctgtgtgaagaaatagagatctcagcgaaggtaaatattatgattgcaacgacaatgtgcaattccactttttgttttctacatgatttaagaaactaatacattcaaagaaaactagtagtctataaaatccagtattattttaactttgatttgtaatctcatattttgctttctatattatttaatagattaatgcataaaaataattatgtttttggaaacacaacgtataaaaacctaatttcataacttcagtaactgaaagaagatggagatggagctctacagaagcgagtttttgtaggttatcaaagttaagctggtataaattacacactggagtgatatgttagaatgctaaacgtaatccccatggttatcgcaatgaaaatagctacacaatatacacaacaggaaatgagcagggcattacatttcacttcaaaaaaccaactaaacacaaaagatgacagtaatgcagcaaatgagggaaaaaaaaatctttatggcacatagaaaacaaatagcaaaatgccacaagtaagtccttctttaccagtaattactttaaatgtaaatgggctaaattctccaatcaaaagacagagattgactgaaccgattttgaaaggcactattcagatatatgctgcctactcactttagatctagatacagataggttgaaagtgaaaggatgtaaaaagttactacatgcagatagtaaccaagagagtaggtacgtctgtaagtcagtcacaccaagacaaataatgtatgattccactcatatgaggtgtgcagagtagtcaaattcatatggctcttgcctgtaatcccagcactttgagaggctgaggcgggcagattacttgaggtcaggagtttgagaccagcctggccaacatggggaaaccccatttctacaaaaattagctgggcatggtggtgtgcgcctgcaatcccacctactctggaggctgaggcaggagaatcacttgaacctgggaggcagaggttgcagtgagccaagatcacaccactgcactccagcgtgggcaagagagcaaaactttgtctcaaaaaaaaagaaaaaagagaaagtagaccagtggttgcaaagggttgggagaaggaggaatggggaagttattgttaaatgggtacagagtttcagttttgcaaaatgaagagagttctggagatggatggtggtgatggttgcataatgtgaaaatatttaatattcttgaattatatacttaaaaatagttcagaaggtaaattccatgttatgtgtattataccacaataaaaatgttagtttttaaaaagagggggtagtaggatttcattgtcttgcttacttcataagccttaatatcatactttaacacctaactttactctcttttttaaaaatatttttacacacacacacacacgaattatttgtcttttttgagactggctggaatgcactggcgagatcatagctcactgtagcctcaatttcccaggctcaagcaatcctcctgcctcaacctcctgagtagttgggactataggtgcacgccaccacacctggctaattgttttgatttttattagagatgaggtttggctatgctgcccagcgtggtctccaactcctgatcctctcaccttggcctcccaaagtgctgggattacagacgtgagccactggactaggcctacttgttattaacttgactcttcaacctcccatatcttgatacttgcgggaataaagatctcactactagtacaaccatcactaccattaccacagctgccaccaacactggttgggaccattggtaaatcaaagctttactgttcaggctattcacaaataatctcattgagaaga

SEQ ID NO: 11 - DNA, 652 bp, Homo sapiens
tccacagattgtcattcttcagggatggcagccctaaacacagcatggcaactcatctactcactcatgaaagattaaaaaatggaaaccaacgtatttcatcttatgctctgcgtcacttctgctcggactcataaatccacgtctctttgctttggccacttcaactcatatccaagccttcctttaattcatgatttattgctggaaatatcctttcaactctcagcacctcatgaagacgcgcgcttaactccggaggagctagaaagagcttcccttctacagatactgccagagatgctgggtgcagaaagaggggatattctcaggaaagcagactcaagtaccaacatttttaacccaagaggaaatttgagaaagtttcaggatttctctggacaagatcctaacattttactgagtcatcttttggccagaatctggaaaccatacaagaaacgtgagactcctgattgcttctggaaatactgtgtctgaagtgaaataagcatctgttagtcagctcagaaacacccatcttagaatatgaaaaataacacaatgcttgatttgaaaacagtgtggagaaaaactaggcaaactacaccctgttcattgttacctggaaaataaatcctctatgttttgc

SEQ ID NO: 12 - protein, 139 aa, Homo sapiens
METNVFHLMLCVTSARTHKSTSLCFGHFNSYPSLPLIHDLLLEISFQLSAPHEDARLTPEELERASLLQILPEMLGAERGDILRKADSSTNIFNPRGNLRKFQDFSGQDPNILLSHLLARIWKPYKKRETPDCFWKYCV

SEQ ID NO: 13 - DNA, 225734 bp, Mus musculus
  misc_feature (1)...(225734): n = A,T,C or G
actgaatctatagatgaagtataatactctagtctagaaataaaacacataaatgacaacatgtacggagacagggtatgtcaacttgacacaccaactagagttatctgaaaggagggaacctcaattgagaaattgcctccataagatccagctgtaaggtattttcctaattagttattgatggaggagggcccagaccattgtgggtggtgccatccctgggatggtagtcctgggttctataagaaagcaagctaagcaagacatgggaagcaaggcagtaagcagcatccctccatagccctgcatcagttcctgctcccagggttcttcccgccctgttggagttcctgtcctgacttctttggtgatgagcagccatgtggaagtgcaagctgaataaatccctttcttccccaacttgcttttttcccccctgtcttatggcaacaatagaaatagtaagatacagttcttagatacatttgtaaaacatcaacaataatacaaacacttccagagaagaaaaatcaggttaaaagttgttaaaggatggaagaggcaaggcaggtcagccatatcctgacctgcagccccattcagagtcacaagacactgtgctatcaatgttgaaacagctaagggaaagcccaaaccactcccctataatgagcattgaaactcaaagtaatttgaatatgtgaaaaaagggctggggcatagctcagtgacagagctatggtttggctcactagccatatgtgttctctggaattataatgatggtggtgatggcggtgatggtgaaggtggtgatggtaataatgatatataataatgaacaatgataatatacaataagaaatgagccaaggtacgattcatcatgagaaagaggatgtaattgctctttctttttccttaatacataccacgttataactatcactctaagtactgttttcatgatgtacatacagacaaatttgattttcatttaatttagtgtagtgttttttaaagtttcttgagacttttttacatgagtgtagacagccagcgcctaaaagatggcgctggtctccagtacaccgtcactgtaaacaacaccactgcgcaggtgctagcctgaacctggggccaacccctcccgagcaagtgcatgcaaattaaggtgccagcagactgaccaatcccaggaggacacaaagcttttccctgtgctgggtgcccgggagcatcgaggcgttcctgcaataaagctgttgagaagaatcgaccttgttgcgttttccttgccggacgaggtgggcgtgacacatgagtgttatttggaggaatattactaaatctctcattgctttgtcatttcatccctatctttgtttgttgtttccaactttgatagtctcgtggttcagtttgatttctattttcagaattctgcaaggtgtgttttattgccaagggtgactaccatggtgggtacggtcatgggaagaatgtgtattgtgtgactgttgaatgattaaaatttcccaaaatgtgacactaaatattaccattcctattcaataatcctagtaaatcataaacacagtaagcctaattaaatggatatcaagattcatcacagagtaactcaagtcaaacataagaataccctgaactcttgaaaatatcttgaaagccagagaattgactttacccattggagacaagccattgagttagagaaactattctgtaaaattcaactagatcaagttgattggtgatgatgttcagtccaatccttttcggtttggaacttctacccatcggatctgtccatttctaataagaggccactcacagctctaacaattatcaagatcttgccattttattttatttattaataggaagcaatgtctctgcttcacgttgacaagatgggtgagtttgagtcactaattctaaagggatttctctatatattatgtattgcttacttatttatcatgtgtgggatggtagtggtgtgggcatttacatggcatgatgctcccatggaggccagaggacaacctgcagaaattgatatcctccttccacaagacaagtcctgatggtcaaactcagtgcttcagacttggcagaaaatactaaactatctctataataccattttcttttgagcataaatttacaaaaagttaaaacgacaatgaagagaaactatgtgttcttctcccaggtttcctcaatacctatttctcagatacataggaaacctaggacattgacatgtgaagattgggtaaaaattttctggagaaaaattatttttgttcttcatcagtgtgatggtttgaatattcttggttatggtgacttggtcatggtatctgctatagaagtaaaacccttactaagacagaaatacccaaactaagacaatctgaaaatgtcttattcgttcgtaaaatgttaggtgataacttcttccatctctgtcatttccccaaaaaaaggctgctatcagctgtaacccaatagcttttctccactgggtaaagtcaaatctctgactaagttcaatatatgcttctgtttgatttatttaattatgtttactgtgtttatgatttactaggactcttaaattcacatgtttatatttattgccaattttaaccatgatctcttcaggcagtttatcattactctttcgtctcctgagattctgataacaattttgctttttagtctcctggacccctggcaccttttttatattccctaaatttttagtttcagtaattttattcttcaaacagcaaatttcattgattgctagctccttcacagcctgagcaactcagcaagattctatctgaaaaagaaaaatcaaaataattggacagaggctcaggggcagactgcttgcctagcttcagtctgcagcattgccaacaagtaataccattttactacatttttattgctgtgtgtttaagtttaattttttcagttctttcttccttgtacctttttttttttttaatctcttctcacaaatactcactgaagcatttttatcatgtctgccttgaaaacactgtcaggcaaatctggtattcatgccatcttgatgttgatatatatgcattttcatttcttatttgtgtttacgatttcctgagctttgcaaagtgagggattctcagttgagtcttggaccctctggcctttaagttatgagatttttctatatttaaacagtctattttaatcagccttcctggcaccagactgatgggcagttgagagggaactcactcattattgtttggtagtggtagaagttcaatttccatactcagcttctgttgacattcttcaagaagaggaacacactatcattgccaaacaagagcagaactcaggattctctttgtagcttttcaatatcctcctagctgggaaagatgggagctctttactattgctccccaggatggcaccatgattgagttatccacatagtcagaatcctctactgaagtgtctcaaatgtcatctaatcagataggtgcatttcatgaccgagactgaatgcatgatgattcttctggatgatgtcagtgtgaatggattgaggcatacctagaaaactagctgagcacgacttcggtttgttgaagagattactagtgtggcaatcattggactgatggaacaaattcagtatggctgagcaccatttaattagctggagatccaaggcacaagaaggaagaggagcctagccttctgcctcttccttctgaagcaagataaacaatcttttccagtttgtcacgtgtagtgctatcaacccaacacaatctagaatcacccgagaaggaaggctctgttcgagactgagttcacctatgagtatgtctaacgggaattttcttaattgggttaactgaggtaagaatggccaccctgaatgttaataacaccatttcgtgggctgaactgtggactacatgaaacagagtgcaagctgaacactagcaggcatgcgttcattcattgatctctgctcttgattgtggatgtggtgtgatcagctgctcaaagttcctgccaccttcacttccctccaacgatggtctgtgaccaggaatggagattttaatgcatcctttctcccctatcctactgcttttgtctgggcactttattgcagcaacatgagacaaaactaagatacaattgctgaacctgtctgtctgtctgtctgtctatctatctgtctatctatttgtctatgtatgtatgtatgtatatatgtatgtatgtatgtatgtatgtatgtatgtatgtatctatcctctctctctctctctctctctctctctctctctctccctctctctctctctctctctctctccctctctctctgtaacttttcattctggtctggcaatattagtcctttcaggatccaaagcctttgacctcaacctcctttgttctgtgacttctggcttcctgggttgaatcaagcttttgagttctctggattttcagattgcagaaaaagtcttttcagtctgtgctttgcaagccatccctctgttaaatacatatccacatctataccactattggttttgtttctctggagaacctgactaacacaggtttaaagcctagcttctctgttgacttggttgctccttattccacagaaggattggcagtcatactacccactgggtcttctcagatgctacttgggggggggggtgagggggggagaggtcaccttgttacagcccagagtgggtgtcagtttcccgcctgacttctgatgaggtgggaatcacagttggttctgtgatgttttgtttatagaatagctattatctacagctttggtcctgctaggctaccctttactggagacagcacatgttcttagaggctttcattagtcgtgatgttggcatttccaagcagccaaaagtaatttaatttaaatttgaagtatcataacctatcaaaaaaaaaaaaacattttagttggtgtaatattaacaactatgttacttaaatcaaatatgccagtaatcaaatatgccaataacccccattcaaaatgaaaaaatcattaattcataataattttcagatattctcctgactataaaaaatatagttttgtacttctcatgcatgtctagaattcctcagtgtcttaggattttactgctgtgaacagacaccatgaccaaggcaactctaataaggatgacatttaattgaggatggcttacagtttcagaggttccatccattatcctcaagtcaagagcatggcagccttcaagcaagcatggtgcaggaagagctgagagttctacatcttcctctgaaggctgctagtgaaagaccgacttccaggaagctagggtgggggtcttaagcccacatacacagcaacacacctactccaacaaggccacacctcctaatagtgccacttcctgggccaagcatatacagatcatcacactcagtactaataattattaggtaatattatttttagttgttgaaccaaaacagttctcctctttcctctatgcctgttacttagttgaagaaacttggtcatctggtatacctcatctcctagctatggttatgttatgttttatgacactctctaatagtcctgcaatctagaagttaagtaaatatctatgaatacattcaggttcaatgttttctatgtttacttaaacaaacaaacacaatcaaaaacagaaaacaccaaagatatcgccctccctactgtaccacatagagagacccactctgaatagttaaatcagttttcagaaatttgtaactattattctgtaaaatgctcccctgttctctttcccagagtgccagacttctagaaggcgatattctggtattgatactgaagttgacacagctcccactttgttatgggacactttggctcccacaccactatacactgtcttgttgttacaacaacaatcataattaaaaagacctaacagttttcacagccattagtttgtggatcaacctttcagagaagtttgccaagtactgttgctttctttcttacttcctttctaacattcctatgtttactgtttatctttcttagaataaacactttcacctttcccagtgaaggtagagtaattgtttatctttttttcccaacattttgaaagtaatgacctgtagggttatagcttccaaactgactggctaaccattttgagcatcctttggggctcttgaatatgtttatacttcatacatctatatttctccccctgtaaatctgagtaaatacagtgagcagtaaccatgccgaagcctaacgccttgccatttcctccatcagaaaaagtagcccatcactttagaattcagcttgacgcagacctgaggaacacggacaattacttgccggataaaacctgaatgatttctactccagttcccaataaagccctgtccctatgacatcacatgacctaggcctctgcatgtgtgcacacatgcaggccacagtgtaagtgtggggtccagctttaggctgcccggggcatgagtgtctgggtgattctcccatctctccctctcagctctccataacaatgctgtgattgcagatgtgcaccaccacacctggcctatcaattttcgtgcttgagtgcaggttcacacatctatccacctttcttcctttctctctcacattgttcccactggatgaaatttgagacatctttttgtgctttcattcttaaatgagatttactcctccaaatacggttttgactaacttcttactctgtgcctgtgttataggtgtcaccaatttattttgctttgcttttagttcttttacattttaattatttttaattacatagataaatggatggcttcaaaactctaagagtcggtgtagcttccacaagattctctcctgcattctctttgccttgcatttttgttaggtttgacttattcttctattacagaacaatgcatagtgcaaacacacagacaaaaggcagcatgcaatgcgaaatcacatatcttgcatttaaaataatcatgataaggtggtatatgatataaacttaccatcttaatcattttgagagtagagttcactgggatcgcttgtacccaaacttttcaaaatctggaactctgcaaccagggagcaatagctagctcattgatcctctcctccctagttcctgctaacctgcatgctactttttgactcaatagctgattttgtcaacacctggctgattttcctcgaaccctctttgttagacaccactctgtaggaacacagtgctcctaattattttttctttcatctgcgtagtattccatagaacgaatgaagcatgtgtgcagccagttctttattgaggaaatgtttacaaaactagtccttggctatcacaacagtgctgcaatgaatagtttaatggatccctcattttctattttttccaagtattttttatgcaggttcctaaaagcggtattagggaatgtgagaatacagacatatgcgattttagaacatttgagcttaatgtaataagcagaaatgaaatcatttaagtattagatgagaaatcgcaggtaagattaaaattctgctttaactcatgaggtcacttatttacttctttaattatttgttccactcaaaacttgggggaaggggggaaatacctctactgctgtcagattcccctcccctaaactgaggtgactcctactttttcttctgctccaaggatgctgttagaagggctacttactacctgagagtctttgtctgccaactacaactacactggggaaataaaggagggaggtgtgccaactctccaagaattttttggctgtcaaatagcacatctggacaatccgggctaggaaaaacaagcatgcacactcatttcttttaaagtcaagctctctaggctggaatgagccggacactgctctcaagaaccatttcctaaaccgtgcctgctcattcccagtcttcagaggtgtgtggtcccctggcccattacttccactaagagatggcaagggattcatagagacctcctgaaagcaaggtcacaaaagaccccagaatctggccaagagacgccctaaatttacaaaccattcattgcaccatttgtcaggtttaatcattaatcagaaggggtccaagacaaaaactaaagccacgcccagtcccatttaccagctatgttgacaagtgaccgcccccacccctgacccccaacaaaccatcctgttcaaggacccaggcagagttctgccaggggtcacacctgaacacatctcctctaagaactccttgagactgtggcgccagcgcgtggcctagtctccatccccatgatatgaattccttctggacaaggcagttgtagttcaatctagaaacatccagcctctgttcctgccgatggaaggaaggcgttcctggtggggatagccgggcgggcgattcgacttctaggacagaggttgccatccagtgggagggtctgtgcctggccatctataaatcccccaccttgcatcagagtcctggagcctgctggagtactgggtctcttctaccacgctgcctctgtgccactgggaagttcagtagcactctcagggacccttgtctccagtcctcaagacctggagctctcaggaaaagagtcaggggccgctgtggggtcttttcccaaactggcctttgactgcccccctcccccgccgtctgctagctttgtaaggcagtcaaaacagagctagaggccaaggagccggacgggaagcccggccgcctcgcccctccagcgggccctggccccctcctctccgccaggcctgccctcctctttcccacttctctcctcaccctcacctcccccatccccctctcatttcctctggcacccgggctcgcaaatccctcatccgaagcccggtttccaaccaagagtgggcactccaactcacttcctcctccccactactctccaatctcaatctcctctgctcccttcgccctgccccccttcctgnnnnnnnnnnnnnnnnnnnnnnnnnnnnnnnnnnnnnnnnnnnnnnnnnnnnnnnnnnnnnnnnnnnnnnnnnnnnnnnnnnnnnnnnnnnnnnnnnnnnnnnnnnnnnnnnnnnnnnnnnnnnnnnnnnnnnnnnnnnnnnnnnnnnnnnnnnnnnnnnnnnnnnnnnnnnnnnnnnnnnnnnnnnnnnnnnnnnnnnnnnnnnnnnnnnnnnnnnnnnnnnnnnnnnnnnnnnnnnnnnnnnnnnnnnnnnnnnnnnnnnnnnnnnnnnnnnnnnnnnnnnnnnnnnnnnnnnnnnnnnnnnnnnnnnnnnnnnnnnnnnnnnnnnnnnnnnnnnnnnnnnnnnnnnnnnnnnnnnnnnnnnnnnnnnnnnnnnnnnnnnnnnnnnnnnnnnnnnnnnnnnnnnnnnnnnnnnnnnnnnnnnnnnnnnnnnnnnnnnnnnnnnnnnnnnnnnnnnnnnnnnnnnnnnnnnnnnnnnnnnnnnnnnnnnnnnnnnnnnnnnnnnnnnnncgctggcggtcctggagtcgctcggggcagtggcccgggggatgcaacgtggaccgcgcgggactgccgtctgcatcgccgccgcgcctcgctgccccctgcgctagatccagcgccccggtgcgctgcctatcaggagctgacgctgcgtcccgctacaccaggacaccgcaagcctagggagccccgcgagctgacgaagggtggtcagaccctgactttatttttagtgggccgtgcggatttggtctccgacagtgctctctccgcgggcctccttctgtgcgctcttggcgccggcgatggggagacggcggcggttgtgtctccagccctacttcgtgtggctgggttgcgtggcgctctgggcgcagggcacagatggccagccccagcctcctccaccaaagacgctccggccccagccgcccccgcaacaggtccgacccgcagtagcgggctccgaaggtggcttcatggggcctgagtatcgggacgagggcgcggtagcagcgagccgggtccgcaggcgaggacagcaggaaatactccgagggtaggtgggcggcgggctggctggttcgtgcggggacctaggtttccctttactccacgccctccctgactgtcctgctggccggtagagccgctgccctctccacgaaaacgcttaaagaccccaagagctccaggagtgcccctcgttttactcccgagcgcctcaattcctctgcggaaaaccctccctgggggcttctgctggctggcgatggggaatcgggcccttggttgtggatggcagagcatgtgcaacgtctgtggctctgggaaagtttctcagtgtcaggccgaaggcggacatgggtctgccctgctctggggccccccccagagcctgcctgctccccaccatcgggggcgcagctctagagccttttgtttgaggacgtgtgcgagggtagcggcttgttctgtaatcgccagctccagcactccaccttctgagtagccttccttgacacttaagagccagggacaaagttaatcaaggaggaatggatttgggaacaagggcaaggatttttgaacggagtgccgctattgttctcagcatccagatgctagaatagcagcaaattatgtgtttctcttcttttcccagtttaaaaaggcaagcaaaagagagcagatgaaaggccgtgtttagatgttccggaccctcccccattccagcttctaacccatctgcttcccaaaccccccaaatgtgaagtagagctttgatttgttcgttgtcctgaagtctactcgctctggctttgcttaccaaggcatgtgtgtgtgtgtgtgtgtgtgtgtgtgtgtgtgtgtgtgtgttgctgcacccaactttacatgtatcaatcaccatgtttgtcctctacaggcccaacgtgtgcggttctagattccactcctattgctgcccaggatggaagacgctccctggaggaaatcaatgcattgtccgtgagtgttgggcagggcacacaggctaaggcagcgcagcatactccgagtggctccatttcagggctgaccttatactcagtgcttgaacactagcttgcctgtacaaagacattggtcacaccaccctggtaatgagacctcagtggtgggagggacgctgcatcagctgagacttcattaacagaaacctggaaggcagatatcgatgaatgttttataatgctccgtctccgttaggtggtttaccatttgtgtagagacacaaacgggggcggggggccttagtgttcaaacaattccctagataacagaacataacctcttgaaaattccaggtatgaccatagtgctactatggtcatgcttggactcctaggttggccatcagaagatcagtcttaagtctttgtaccacattctcatctgtgggttgttcttagcagccacatggcaaaggttttaaaggagtactcacagatttttctgaactgacctaaagtttaaagaactgttttgttttcaagagaaataatctaagttgcttgactctttttgtgtgtgaggggacagtcaagcttagaatccccacagaccagatcttatagtggacagtatgttttctcagacgtgactcttacacctcgataatgtcagtgtgtcagaacgtacaggctggaattatgagcagtaatagtaatatttttaaaaacaatattccaaaatgtatatatggaggtctccaagttctaagtggacagacagctcattagtttcttgggttatgatcaaggacccagggaggtcttatttcagtctcctgaggtgaagtatgataggtctttcccctgtgtgtttttgtagcccagacacatttgtccgttctggaggatagccaggtcacaggcagcacatgcatttacagtccgtcttgactttagactgaccttggtgttctggagcggaaagataattatgtcactgtgaacaccaaaaaggcaagctaccctagccaagggtattgtgggtatggtggcatctccagctctgtatttattggttttgtgggtttgagacagaccctaaatgctattttctgttctttaaaaggacagaagtctgaagttttattgtgaagattggttttctctttcccttctatccaaaaatcccacaacctctagtaatcaagcaaaaaaaaagaaagaagaaagacaaaaggaaggaaggaaggaaggaaggaagaaagaaaggaaggaggaaagaaagaaagaaagaaagaaagaaagaaagaaagaaaggaaggaaggaaggaaggaagnnnnnnnnnnnnnnnnnnnnnnnnnnnnnnnnnnnnnnnnnnnnaaggaaggaagactgggtcctttcagatgatcaattcataaatattttaaatacaccttccatgaaagtagggctttggctttatttaaaaaaaaaaaaaaagatagtcacttgtcttctatccaacatctcctatgtgaagtatttatagaaggtgtgttactctttcaggccactggggcattactgtggctgtctcacactagcaaggtctcccagactctggaaacagctcccatcactcaccacacacctgccacactagctgggaatgacttaggccctgtggaaagtctgactcactcaacataatgaatgtgactgccattattgagttggagagcagccgaggagaagggataggtttatggtacgcactgaaaatctgtagagtcaggttttattggactagtcaggaatgggaattccagagagcaaagcctttcagcatagttgtggtaggagtgtatgtatggcccagtgagtgtccactttagctgctctgggtctttgactatcactgtgccatttccttctttaaaagatcaactttgagtacctcacagtgagtattgtcacccgtgtttcttctacttgaaatatttgggtgctaatgggttgcattaggcaaaccttgcctgagattatgttatatctccaagaaaatacttacgatatttatgtcaagtgttgctaagtaatatttattattaacacctttggaaaataactggcacacttgagagtataaaacttaggcataaaatggacagagaggatgtgctgtgaggtgcccttcctcttttcgcatatcttaagaaggtcacatgtgaggaattaaggaaattaaaaccattgcagatttaaaactaggaattttaatcactgtattttttttttgatagcaagtatttctttgttgaattcacttatatttcattatgaagcaaagacaaactctgaggtaatttataaataatgataatcatatgaggaccaatggttgttttctcatacatttatatctctgcattctttttagtcaggccaaacacgcttcaaagtttaatgttcgttcaactcttagcaggcttcacacaggaagacactaatgagatatgtctattattgttaaagcatgatgccttacgactctattctcttgttccttatgaatatttaattagtagtatttaaagacaggatctctagctagtcccctggaatggaatgaactgtgtcacccaagttggccttgaactcccaggttctctttctggcattcaagtgctgagattacaggcttgagccaccatgcccagctgttattattcttaattgtggcttgagatgtcattgaagttcttccaagtttccatgtttgtttccaaactgactttctagctttccgtaaaaaacaaaacaaaacaaaaaaaaaacttaagaaaattatcttagaacatgaaataattgaagaagagttgcttgtgtatttatttatgaagaaactatgccatagtgtaaagcaatgggctgggattggctcagcatcatagcctttgagaactgaaaaagacagctacagtatactcgtgtaaataaaataaatagatctttaaaaaaagaaccttttaatataacccctttaatatatgttctgatgagaacactgagcctgtagaagttttgagtgtttcctgggctcattggtgggtcattggcagcatgagcactcaacctcacagtgctcatgtatcctattttaaataccagctcactcatcttctcctaacatgctcacactctcagagtggacatcctgtctgccattctaatcccaacactgctaggctcaatcatttcagttaaaatggaacacctataatgagacctcagactgaaatgaacacagggaagaaggagtccattagtcttgctttctcctgtcctgtgtgcagtacacacactgaagccatgacagacaattaattggccaggctccaccccctttaattctattttggtttgggacctaagtgaggccacttcatctaagcctagattctcaagcctgctaagaagacacctttgaaataaaactatctttttttttctttttttttattacgtattttcttcaattacatttccaatgctatcccaaaatgagcatatttcattgaaaaaattagtgatcagaaacaaatacattttaagtattctgtgatggaagccattttcttgtcccctccctgtttttttttttttttaagtcttaagaacataatattttcgcagtgttttcgttcaggaaaacttgttgaagccctgtccgtatcttacagatgctaaaggggatctaagaaagggaaagcaattactaaatcggtttgctcctggaaagagtgttcctcacattattggaggtcccaggtctctttgaaagtgttgagacctctctcgagattcatgtgcatgttgctgtaaatacttagatgtagtttcagggcattcccaggtcgttctcctatttcctgcatacagagacagagcaagtcagcacacagcctttgtgctcaaagagggaattcaactgaggatagagataaatctttcagctccttaatggcctggctaaatttgggagacagttcccattccagagcacttgactgtaggttttgagtatctgtggtatgtgctatgtcagtgagcctcatattcttgaccctccaatgaccctctttttcactagaggtcacagctgtaggaagcttcgatccccacccctgtcataagggctttttggaacagcagaaacggactaggttgcattgatgacgtagcaggagactagaggaaggagagaaattatgaagggggatagaataaagattgatgacagagtagggcagaagccatctgggatggactgtgcagggaacctgatatttggccaactcaggagggcctggggtttcttgtttctaccaattttacattcttacacagtgggctatattttctacgatgttcagtctctctgggtttcctccccactgccagctccctgaggatctagacttcctccttcagtaaatcgtgaattcaaaagattttagttttgaattaaaaaaaaaaaaagaaaaagcaactttcattgataatcaagttaaagaaattggtgctaattagtatgatagaattgaagagagttacactgatatatcatcacaaggaaattgtaaaatgtagtgccatgtctttactgggtgattttgtttcatgctgaaaaaccagacttttgcaacattaattccatatccttatctccccatcctatggcttgaaaatatggctttcatactgtgaagcacgacggagggtgttgacagtcattgcctcttgtgttgtgttgtctgcagccatttgcaggaacagttgtggagatggattctgttcccgccccaacatgtgtacttgttccagtggacaaatatccccgacatgcggagccaaatcaagtacgttccctctctggggctatacttgccacatttttcttaaacccacgaaccagtgacaagtgtcctcctcaaagaagatagggattggtgattgttctcactcaccaggactttgttaagttttgaactaagaccatcttagtgcctcagctgttgcctaatcctcaacagaaactgtgtgtaggtagtgggactgttcagagtccatgaagtcattcatcacaatagctgtaacttcctgagcttttggtactcacacggttctatgtgcagcgtttcaagcctctcatcaacattatttgatactgatgtggacccattttgcagaggagggaagcgaggcacataatatattaaatgactactgtcctgctttgatgtctagtgctataataaacatcatgaccagaagcgacttggggggggggaggatttattttatcttacacctcctaggcaaccttctatcaccaagggaagtcagaatagggactcaaggcaggaacctggagtgagaaactgaagtgcaggccatagtggaatgctgccggccagcttgctcacatggcttttctatctcttttctttaccacctggaaccatctgcctaggtagtagagcccatcatgggttgggcccttccacatcaacaattaattaatcaagaacatgccctgtaaggttttcccatggacacagtaccccagatgactagttcgtatcaaattgacaaaaagctaaccagctcatttatgcaaggcaacacagacttgaatctactgactaagaatgactcggcagggagtcccaaacactaacctgtatttactgccttttgtgtacagcctcaatttagtcttagctatgggaagagaagaagattagaacaacagatatttactgaaatactgaccaactactttatatgtaccaagccactttgctacgcatacaaatttttaacagttccatgaagataactatagcagtagacgaaaagtgtatttttttaatgatgctttctgttgagactcccaagtccaagactgattgtctgtgttaagtgtttaagatcacactagataagacagaagtgaccctaggtaaggcagaaatgatattgcttctttaactgctcaatatctaaacgagggctttaaatctgcctcttaaaatgagcatcgtaatagttccctccacaagtttatgttccacaagggtgatatagagcatgtctgatccaggaataagagtcaaacaatgcacaccggtgtgtgtgtgtactctgatggaccatcgacaagagcctctgggtccactgcttccaatagtctatgttttacctgtgatttgaaacttaacgtccaaacacacaaagactttgaatgccctcaggagtgcacttcctcctgccccggttgtctgccagagacctttcctctgtgccttcatgatttctcgatttgctcacacctacccttggcactacaacaaagcataaaccagagcaatactgctttttttttccaacttaataatcttgttgattatttggggatttcacacaatgcaccctggccacattcacttagcagtcttcccagacctcctcccacccttgtgacctctcctcaagaataaaaaaaaaaaatacaaagtgcaatattgcttcttaaaacccagacctgaacaagaaacactatacaaggtactgggttatgtctggaacacacacacacacacacacacacacacacacacacgcacatacacacactcatttggactttagagaacacctacttccttaccaccagaaacttttctagcccttccaaccttcaccctacttgaacttgctaaagcttttttagcagtatttatcactaattgcctgaaacactttcttgtgtgtttgtgtgtggggggtgtgtgttcgagcacatgactgcacactcatttggaggccacaagttaacctagggcatcattcctcaggtgcagcttatctctaaagtgagacttaattcatggctgaccacagtctccatgtctgcaggtgcttcagcctcggcaggtggccacgtcatccactcagtgcttacatgactacagctttcctttttccactttccttaaagtaactccttaagtatgtgggttctactacacaatgtatttcaactctaccattttacattctgtgcggttcgaaccatcctcatctttcaccagactgccttgcacctgacatctttcaatcccttctctacagagcagtttctcctttaaaatcaaatatcttcactttcattgaaatcctttccttctctctgcaactggaacaaaccaagcctttggtggacaagaaacccaccttacctgactggcctggcctgcctctccaagacaccgtctatatcagttctttggaggaaaccctaaaagcatcctaagatcgttagaggttgagttgttaaccctaaaagtgactccttgcctgactgcttctcatctttcaaagttcagtccacacgtcacataaaattgggnnnnnnnnnnnnnnnnnnnnnnnnnnnnnnnnnnnnnnnnnnnnnnnnnnnnnnnnnnnnnnnnnnnnnnnnnnnnnnnnnnnnnnnnnnnnnnnnnnnnnnnnnnnnnnnnnnnnnnnnnnnnnnnnnnnnnnnnnnnnnnnnnnnnnnnnnnnnnnnnnnnnnnnnnnnnnnnnnnnnnnnnnnnnnnnnnnnnnnnnnnnnnnnnnnnnnnnnnnnnnnnnnnnnnnnnnnnnnnnnnnnnnnnnnnnnnnnnnnnnnnnnnnnnnnnnnnnnnnnnnnnnnnnnnnnnnnnnnnnnnnnnnnnnnnnnnnnnnnnnnnnnnnnnnnnnnnnnnnnnnnnnnnnnnnnnnnnnnnnnnnnnnnnnnnnnnnnnnnnnnnnnnnnnnnnnnnnnnnnnnnnnnnnnnnnnnnnnnnnnnnnnnnnnnnnnnnnnnnnnnnnnnnnnnnnnnnnnnnnnnnnnnnnnnnnnnnnnnnnnnnnnnnnnnnnnnnnnnnnnnnnnnnnnnnnnnnnnnnnnnnnnnnnnnnnnnnnnnnnnnnnnnnnnnnnnnnnnnnnnnnnnnnnnnnnnnnnnnnnnnnnnnnnnnnnnnnnnnnnnnnnnnnnnnnnnnnnnnnnnnnnnnnnnnnnnnnnnnnnnnnnnnnnnnnnnnnnnnnnnnnnnnnnnnnnnnnnnnnnnnnnnnnnnnnnnnnnnnnnnnnnnnnnnnnnnnnnnnnnnnnnnnnnnnnnnnnnnnnnnnnnnnnnnnnnnnnnnnnnnnnnnnnnnnnnnnnnnnnnnnnnnnnnnnnnnnnnnnnnnnnnnnnnnnnnnnnnnnnnnnnnnnnnnnnnnnnnnnnnnnnnnnnnnnnnnnnnnnnnnnnnnnnnnnnnnnnnnnnnnnnnnnnnnnnnnnnnnnnnnnnnnnnnnnnnnnnnnnnnnnnnnnnnnnnnnnnnnnnnnnnnnnnnnnnnnnnnnnnnnnnnnnnnnnnnnnnnnnnnnnnnnnnnnnnnnnnnnnnnnnnnnnnnnnnnnnnnnnnnnnnnnnnnnnnnnnnnnnnnnnnnnnnnnnnnnnnnnnnnnnnnnnnnnnnnnnnnnnnnnnnnnnnnnnnnnnnnnnnnnnnnnnnnnnnnnnnnnnnnnnnnnnnnnnnnnnnnnnnnnnnnnnnnnnnnnnnnnnnnnnnnnnnnnnnnnnnnnnnnnnnnnnnnnnnnnnnnnnnnnnnnnnnnnnnnnnnnnnnnnnnnnnnnnnnnnnnnnnnnnnnnnnnnnnnnnnnnnnnnnnnnnnnnnnnnnnnnnnnnnnnnnnnnnnnnnnnnnnnnnnnnnnnnnnnnnnnnnnnnnnnnnnnnnnnnnnnnnnnnnnnnnnnnnnnnnnnnnnnnnnnnnnnnnnnnnnnnnnnnnnnnnnnnnnnnnnnnnnnnnnnnnnnnnnnnnnnnnnnnnnnnnnnnnnnnnnnnnnnnnnnnnnnnnnnnnnnnnnnnnnnnnnnnnnnnnnnnnnnnnnnnnnnnnnnnnnnnnnnnnnnnnnnnnnnnnnnnnnnnnnnnnnnnnnnnnnnnnnnnnnnnnnnnnnnnnnnnnnnnnnnnnnnnnnnnnnnnnnnnnnnnnnnnnnnnnnnnnnnnnnnnnnnnnnnnnnnnnnnnnnnnnnnnnnnnnnnnnnnnnnnnnnnnnnnnnnnnnnnnnnnnnnnnnnnnnnnnnnnnnnnnnnnnnnnnnnnnnnnnnnnnnnnnnnnnnnnnnnnnnnnnnnnnnnnnnnnnnnnnnnnnnnnnnnnnnnnnnnnnnnnnnnnnnnnnnnnnnnnnnnnnnnnnnnnnnnnnnnnnnnnnnnnnnnnnnnnnnnnnnnnnnnnnnnnnnnnnnnnnnnnnnnnnnnnnnnnnnnnnnnnnnnnnnnnnnnnnnnnnnnnnnnnnnnnnnnnnnnnnnnnnnnnnnnnnnnnnnnnnnnnnnnnnnnnnnnnnnnnnnnnnnnnnnnnnnnnnnnnnnnnnnnnnnnnnnnnnnnnnnnnnnnnnnnnnnnnnnnnnnnnnnnnnnnnnnnnnnnnnnnnnnnnnnnnnnnnnnnnnnnnnnnnnnnnnnnnnnnnnnnnnnnnnnnnnnnnnnnnnnnnnnnnnnnnnnnnnnnnnnnnnnnnnnnnnnnnnnnnnnnnnnnnnnnnnnnnnnnnnnnnnnnnnnnnnnnnnnnnnnnnnnnnnnnnnnnnnnnnnnnnnnnnnnnnnnnnnnnnnnnnnnnnnnnnnnnnnnnnnnnnnnnnnnnnnnnnnnnnnnnnnnnnnnnnnnnnnnnnnnnnnnnnnnnnnnnnnnnnnnnnnnnnnnnnnnnnnnnnnnnnnnnnnnnnnnnnnnnnnnnnnnnnnnnnnnnnnnnnnnnnnnnnnnnnnnnnnnnnnnnnnnnnnnnnnnnnnnnnnnnnnnnnnnnnnnnnnnnnnnnnnnnnnnnnnnnnnnnnnnnnnnnnnnnnnnnnnnnnnnnnnnnnnnnnnnnnnnnnnnnnnnnnnnnnnnnnnnnnnnnnnnnnnnnnnnnnnnnnnnnnnnnnnnnnnnnnnnnnnnnnnnnnnnnnnnnnnnnnnnnnnnnnnnnnnnnnnnnnnnnnnnnnnnnnnnnnnnnnnnnnnnnnnnnnnnnnnnnnnnnnnnnnnnnnnnnnnnnnnnnnnnnnnnnnnnnnnnnnnnnnnnnnnnnnnnnnnnnnnnnnnnnnnnnnnnnnnnnnnnnnnnnnnnnnnnnnnnnnnnnnnnnnnnnnnnnnnnnnnnnnnnnnnnnnnnnnnnnnnnnnnnnnnnnnnnnnnnnnnnnnnnnnnnnnnnnnnnnnnnnnnnnnnnnnnnnnnnnnnnnnnnnnnnnnnnnnnnnnnnnnnnnnnnnnnnnnnnnnnnnnnnnnnnnnnnnnnnnnnnnnnnnnnnnnnnnnnnnnnnnnnnnnnnnnnnnnnnnnnnnnnnnnnnnnnnnnnnnnnnnnnnnnnnnnnnnnnnnnnnnnnnnnnnnnnnnnnnnnnnnnnnnnnnnnnnnnnnnnnnnnnnnnnnnnnnnnnnnnnnnnnnnnnnnnnnnnnnnnnnnnnnnnnnnnnnnnnnnnnnnnnnnnnnnnnnnnnnnnnnnnnnnnnnnnnnnnnnnnnnnnnnnnnnnnnnnnnnnnnnnnnnnnnnnnnnnnnnnnnnnnnnnnnnnnnnnnnnnnnnnnnnnnnnnnnnnnnnnnnnnnnnnnnnnnnnnnnnnnnnnnnnnnnnnnnnnnnnnnnnnnnnnnnnnnnnnnnnnnnnnnnnnnnnnnnnnnnnnnnnnnnnnnnnnnnnnnnnnnnnnnnnnnnnnnnnnnnnnnnnnnnnnnnnnnnnnnnnnnnnnnnnnnnnnnnnnnnnnnnnnnnnnnnnnnnnnnnnnnnnnnnnnnnnnnnnnnnnnnnnnnnnnnnnnnnnnnnnnnnnnnnnnnnnnnnnnnnnnnnnnnnnnnnnnnnnnnnnnnnnnnnnnnnnnnnnnnnnnnnnnnnnnnnnnnnnnnnnnnnnnnnnnnnnnnnnnnnnnnnnnnnnnnnnnnnnnnnnnnnnnnnnnnnnnnnnnnnnnnnnnnnnnnnnnnnnnnnnnnnnnnnnnnnnnnnnnnnnnnnnnnnnnnnnnnnnnnnnnnnnnnnnnnnnnnnnnnnnnnnnnnnnnnnnnnnnnnnnnnnnnnnnnnnnnnnnnnnnnnnnnnnnnnnnnnnnnnnnnnnnnnnnnnnnnnnnnnnnnnnnnnnnnnnnnnnnnnncattactatgagaaattcatcctgtctgtctgtctgtctgtctatctatctatctacctatctctgtctttcctctctctctctctctctctctctctctgtgtgtgtgtgtgtgtgtgtgtgtgtgtgtgtctcgtgtctatgggtctcattgtttacacatctgttgatgaactttaagttcattcgtctcttggctgttgtgagtgattctgttgcaaacaccattttataaaaacctgtttgagtcctgatttccattcttagaatatctactcagaaatggaatctctgttttcagagtttttgaggaaatgctatattgttttctgttacagctgcaggagttattcctgacacgaagcaaaagggcccaggttgccttgctaaccctgggtgctttttttttcttttttaatgaaaaccactctcataggcatgaagcagtattacactgtggttgttctagttatttttttaaatactgtcttctaggtgtagttgtcgcttcctgaacaatgctacaaagatgttagacaatctgaagaaaggcaaacagtctatattctgctaaaggcaggaatagaccaactcgaagattagaaaatacatattttagtgtctacttttgtgttgttacaaagactggactctgtgtaaagatggccacaggcttgtgttttctaaaggaaagttagggggacataggtagatgggaaagccagacccttgtgatggtggcttcttgttcccagaatacattgcaagcagaacctgcttggagccattatctaaactggaccaataaggggaaaggaaggaaccaggggcccttccttaatcaccttagacatccagcccagaatctgttcagcagaacccaggcctagggttcctcccatccagaagggatgcttttgctttcaaaggcagctcagtgttctatctttcctggatgttcaattctttgtccaccccccagggaatgagcaattccccattgatgatcaatgacaccccattacaatacatgggaactctcactcaaggttgcatacctgcccaaaattcagagactcagaagtggctgctctttgaggacctcttctgagagggcaaagcacctacacacataactaccaaggacggagctgccactcagtcatcacgaaggctagcattggagtagacagagtaggggattgggtgcttttgtatcaaggagttttgatctcttatggctagacagatatttctcccaggagatagtagaggcttctgatgctgcccctaagccaagagatagggcatgccaaaccccaaggacccaattgttgtccaaagaggaaggctggggaggacctttcactccatatgcttgggaaagaccatggagaaggtcacagtgctcaatggcttcttacttcatacacagctcttaggtccctctgctgtgagtaactcaagggtcagcatctggttgtagggggatgggaagacttggtcggttctattttgaacaattgcagtgtgtaggcaaaacctgaagtaatttttaagtttctgatgtcaagtaaaaaggtattgcccagcttgctgtaagttgaggtggagcatgcctgaaattcaaatcgaggctctgagtgagctagggggagtgttctgtccttgtgtagtcaacgttgtctgagggatgacagctctttcaaatacccccctgcatgcacacaccccttcttctgcccaggacctcccccgccacacccatgttgtatacacaaagctctttgctggccttgtagaaaaccctggctcctggagatccccaagctgatggaggagtcaggaaagagaacaaagaggcactgactgtggagatgtgggtggggtccagaggcagaaagcttgtctagacagacagggtcctctggtccatccctagcaacagagcagtcagttatggaagaaagacgttggaatttaagagttttccccatctgtgtgtttctatcactaacatggcctggtaagttcatgggaattggcagaagcccaggttcaggtgctagacaagctatcatctgtagcagcttggggcaaagaaggaaaagactccttggctagagatgaggactccacaggccttaatacctggcctttctgcccggaatcttcaagtctccctttctctctctctctctctctctctctctctctctctctctctctctctctctctctctccctctccctctcccccctctctgtctcgcgagcgcgcatgtgcgctctctcacgatctctctccttaagatagaaacattctttccctcctgtttttcttgtctctttctgcttgttgtggcattaacagtcaaagggggaaaaagcatcctggtgttctctagagacagggcgcctgcggtaaattgcttgccctgagtatttttcaatggtatatcttacccaggctagataagattaaggttttattaaggtcacagggtgccaaagagtcatatcatatcagcaaaggcaaatgtgaacaggccctgccttcttcatgatcactaatgaggaaggtgtccatgcccaggttggtaatgaactgtgttctcagacaggcacctactgttctcatgatcgctcgggataagaggagcaggagatggtacatctctggagcaggctctggagaaggagaccaaggggaacatctggaagatgttctaacatacatcgttttgtcttttgttatccagtgctgactgttttagcatatctaaccagatgaaagctctggagagggagaccaaggggaacatctggaagatgttctaacatacatccttttgtcttttgttatccagtgctgactgtttagcatatataaccaggtgaaagtcacaggtacttctcctaattcaactttctgttctgaaagggagagcgtgacgtcttctttagaaccattgagcagagcagagcatcaaagtgattgtttagagcacttcttaggactgtctttgccctgtttgcagcctgaattcagtacccaggtatacttggggtgtctagaacaatcagagggtgtcttgtctgtttctaacccacaaaggagcagctatggagtgaaaagcccctccctggtagaagagtattctgagcctcgcccagcccactgtcaaccttactgatgctatgctgtctagttggaggaatccattaggtactgagttgccagccaggatacatgcaaacagctctttcctgagtctcataggatggatccttctgtctgcctttgtcacagggacaatagaacctatggtacaagcaatgccttagcctataaatccagtagttagcaaataaggtgagggtggtagctggtagacaagagggacaggaagagtttaatgttttcttctaagttgtcttatatggctgagagtgaagatggagatgacaatttgcagtttctgaacccagaaaaacccttgaaatatgatgtttggtgacaggagggccaggaaaacatttaaactctgttaaagcattgcctaaaatgtcagcagcgatttttagggacgtcactgtgtgtccttccctctacagggcacagcaatattgctcatttagggaagaggactaataggtaaatgaacaggtgagagtctatgctggctagtttcttgtcagcttgacataggctggactcatcagggaagagggaacttcaactggggggttgctttcatcaaatgctgtaggagaatctgtggggattggtgactgataggaagggtccagctcactgtcataagtgccactccccagggctgaaggtcctatgctgtataagaaagcaggctgagcaaggcagtaagcagagttccttgatggtctctgctttggtacctgcctccaggttcctgtcccagctgtgtctcattgtgaactatgagggtctataagccactttccccaagtttgttttggtcagtgttttactatagcaacagaaacctaagttgggtgtaatccagtgtaaatttaggtagtgagaaggtctagggtgggaagacagggaatgagaatttgcacacaggtcgcagtctctgtgagcgtgtgagaaaagcattctgggtccttgatatagctgtctcttgtgagactaggccggggcctagcaaacacagaagtggatgctcacagtcaactattggatgggtcacacggccaccaatggaggagctagagaaagtacccaagtagctaaagggaactgcagccctatatgtggaacaacaatatgaactaaccagtaccccggagctcttgtctctagttgcatatgtatcaaaagatggcctagtcggccatcactggaaagagaggccctttagacttgcaaacttaatatgccccagtacaggggaatgccagggccaaaaagtggaagtgggtgggtaggggattggggggtggggtgagtatggaggacttttgggatagcattggaaatataaacggggaaaatacctaatttaaaaaaaaagaaaaaaagaaagaaaagcattctggacacaaggaaaagcaaattccaagacgtggcagaaacagactccatggactgtgaagacagtgatgggacctctgtggctggagtgagacagagacaaagggacaatggcaggagacagatctagacaggaaggtttggcttagtagaccaagggaagaaacttgaatgatctctcaagcatgatgggaaaacaatgatttttctatggtcaagtgtctcagttagggtttctgttgctgtgatgaaacactgtgaccaaattgcggatgaaagggtttatcggactgaagctcccaactcacaattcatcactgaaggaagtcaggacagaaactcaagcagggaaggagcctggaggcaggagttgatgcagagaccatggaagggttctgttcactggcttgctcagcctgctttcttatagaacccaggaccagcagcccagatatagcactacccacaatggactggaccctcccccccatcgattaccaattaataaaatatccttcaagcttctctgaagcctgatcttgagacattttctcagttgaggttccgtctcctcagatgactttagtgtctgtcaagttgacttaagactgcccagcgcatcaagtgctgtgatctgattgacattgtttacaaagtcaccatggataccttgttgacactgcttggcttgtgaggggggcaggaaggaagcagaggaggggatggacacaggccaccatggccgcaaaagcactggtgacatggtgacagtgcaggccacacttgtggtctggaagtcatttgtggtccaggtgtgatgagttgaaaaaaagaaaaagaaaaaaaattacagattgagaattatcagtggagcctggctggctgatataccatttgatgatgtgggaacagctgacagggaggctagatgggcagagactaatggagatcaatcactgtgttaggtctagagatctgttggacttctaagtgcactcgcctgtgaacacagttcaaaggacagacgtcaagacagggccataaattggatgtatttggattaaaattccagctctaatattttaatcataagtatagacaataattaggatgttatagacaaaaaaaacagacttgaagtcagagccttaggtgacctcaacattttgatatagtcaaaggaaaggggtctgaaactttgaccgggaaaataggttgagaatggacagccctgataccctggaggcaaagtccccatatcaccttatgctgtcctgcatcagggaagtttatttcttcttttaggcatcttaacatggctgagaatgttatttttatgtgagatgtctgtagaagtcacagccacaatttcagactcaactggagcggtacaggagtctggctcacgagaaaatgtgcctgtcatgtgtcctcgcacagagcaggtgctggggccatgtctgacatgaagtgttctttaagcaaccaagctcctccggtaggcgagcgtgctctgctcgtcaggctgacaccaagcagtgctcttgctgcagatgtcatgttcctgttgcagaggtcgctggcaggtcagacagcagcttctgttcctgtggagtctgatctaccctccctgccctcccctttgcacccatgctaggcacaggcagtttcttcttagtgagtggccagaatttcttgcagggtagaaatctgaatgcattcaagtgtcttccaagcagtgtttcaactgtaaagtactatttccagattcatttgttaccaaaaaaatattaatctatagaatcatacctccctcaaaagaagaaaatgaccctgttttatgttgtgagtgtctatgctccatttggactttctgcttctcttttgttgtttctcttcagtgtaacaagtctcctatgtcatgcttgtgttctataccaaaataaaatggcagttaagaatacagaaaaagaagccacgtgtggtatgcatgctcttaactccagcacttgggaggagaggtaggcagatctctgtgactttgaggctaggcaggactataaagagagaccttatctctaagcaaataaacaaacaaaccagcctccattaaaaaaaaaatcaccctagggatataaagaagccgtattatatctttggccttgcttgcaggtttacataattctcacaatactgtgggctgggaaccacccactgttgtgagcaggcgtgctgagaatcagggaatttaagtgctggagtggaggagagggcttattgctcatacacccgtatgcctggcaatgtggcagaaaaaggtgttgagaggggctgtcacagggcagggttacatcagtaaccctggtgcatggaaggagggacttaaatccagctaactcttcctcttatgtgattgacaggctcaggagcaaatgacttgcagtgcaatgggcccaagtctttctgttcccaggacccttatcacagtgttagaaatttgacatgggaaatgtaagaactatttgctaacccttttttttttggcgtcatgttatttggtgtcaacccatgtcatatgtccacataaatattttatgagcaataattctactttctcaccctccaaatatactgtgaagaaatacagaggtattagtctaaccctgataaaatttaggctagtgttacattgtaagtggccagtcttggcaggagaagctgaaccttcatcagcactatcttcctgtctgggtttggagaactcaaaaacagctagcttatgacttccttataggtcctaagcatggacagacagattgtccccatttgtctttgtgatttgagggaatgttgcagatgtgcctgcacctggaggatggagattgtcaaatgcctttcctagatcatttacattttggggggggggggtggtgtctcactgaagctgaagccgccattcagctacggtggctggccagggagctccaggaatctgtctgtctccatctccacagtgctaagatcacaggggcaccaaacttttttgtatggatgctaaagtccaaagtctggtcgtcgcacagcaagtattcctggctgagccatctcccctgccccaactgtatcttttccaaagactgatacagtaacaagaggctgggtctgggaaagtggctgtcctttaagctttcttccacttgatacatttaaagaagattccttgcattttcattaatcacattcaattagagttatccttctgcaaagtatgcgttgggcagttgggacatcctccatccaaatctagtaattgtttacaattgagccttcaagtactggccgttggttccaagaattacacactccttagagatctctgggaagtttctgttccatttgacattcctgtccacccccatctttattcccccttttcctgacctttatgtttacccatctaactgttggccagctttggttttcaatgtgatggcgtgtcagaagtgccgcttagaaacataatgtgttatgtatggataaagaagcagggggcgtggttcctggggagacacacttctccagagccgtagagcatcatgccttgcaggaaaaggacaactgcaagaagtcaccccgaggttactgacactgatgctttaacagggagaaaatattttcttcccaatgattgggaggcagcaatcacaccatatgctctggacagtggtgatgggtgaggaaggagctgggtggctgcaccttcagcctgtgcctgcacttcttgagagtcttattttcgacgggtacctcactggaaaagcatgtgaatgattttgtccccttatgttccagtagaaaaagtgatcaagcagtgaatagtgatcttctgactctgtgagcatcagacccagccaatctgatgcattgttgaagcatctccatccgaccaatcagatacattcgcttgtgttttagagaagcgactggatataagatgtcttcttgacagtatcgttgcaggatcttgctgtgcatggattaaaggtgctgtttaataagctgtctcttggtgatcttttttttttttttaatgtgtctgcagctgtctgtgagaatggatgccagaacggggggcgttgtatcggccctaaccgctgtgcttgcgtttatggattcaccgggccgcagtgcgaaagaggtaagagggaaggagagactgcgggagttaaagtttcaaactttattctgtaacttttaatattataatgacgaatgcacgtttttgctatccagtgagaactggtctagtgaaatgtctattgttttgctccagtagcttgaatggtaagatttggggcagcaagcatatcagtggttttcatgacaatgaccctagtctgagaagccagttgagaagtagtcgcttcagggtgatgttagcttactgacccatggtagattctcatcatgttcatttattctctggacactgttgggaatacaccctctactgtagatgatgatgatggtggtggtggtggcagcaatatgtccctggctgaactccacaaaatccgacacaagttgtcctaataataagaacacacattatactccataacactagtccagaagtctccggattatatgcttctgttggtccttactggagaggatgctggagtgttttcttttttattggttggttgtctggtgatcgtatgagaactttaatcattactgaggcaacccacatccttgatccatctgtagagagaaccttctcctatcaccgagtctgggtcagttagagtcttcagagatatttcatgctaaagggattaatcttaggttccgcacagtagtccgcagtgaaagtaaagtgttctgtgttgtctgtgggttcagcagcctttcccgcagcatggtatgggaataagccttcccaacgccacttgcaaggaagagctaggtatggaaacccagcagaacttcctttaggcaagacagctaagaaagtatcctgtgctgggcactgtatctctgtaagcagtcatgaaagccattataaaatcagctgacagtaatttccatagcaactaaacctgtttcctctcagctgctgagaacagccggcattgatgctctggcaatgtagtcatatagcctaatagcaggtgtggccaccatgatccaccaaagaagttaaaccttagaaaatgtaataaataactgcttagtgctgagtcatgagagcaaacctaagtttagattaaaagtaatattacagtatcatattattgctagatacatcttcaattttttttgccccatgggctgtggtgacatctaaagacacatggaacttcactggaaattaaagtgtacggtgttaatgtcagtgagatgattgcaggtatatgtgcagagaatgcttaaattgtgaatataccttgcactttcaaactgagactcactatcctcagaaaaatttcatcttggcatttagtgtaagtcttgagaaaaaaatgggaaatttgaataatatggtgaagtctgagaagttagacttatgccaacttttaacatatgtctgtgtgtatgcacattgagatatttatgctatccctaatgtaattgagatttcttgggacagaagtacattccacagatgacagagtttatcattattcttcggataaattctaaagcttttaccagatgttcttactggggaaaggaaaatgagttgtgacatgttagcacagattgttggaatggagtgatacagattccctaagccatgtgatgtaaagaccacagaatataagatggcaaacctaaaaaggcaaacgcagtcctgaccagtggaaacgatgctcgaaactctacagctctctcatctctaagcaggattcaaatcagtttctaactggcacagagagggttgtgtccttcagcctagacttccattgcagctctgcaacagttactcctttgctgcaggtgatttgactcctccggtagagctgtctacattgtacatgcacagtaacatgtttgcagaagaaattataaaattaatccgttaatgaattgaccttaaggatactttaaaaaaaaaaacttgtttaaaaataagcttttaatcactgcccttctgtattgaaagtataaaagctttgtttctttctaagaagcagccaggaatttccactcctaaattgcagccgtgaactttaatctttcaaggacacatttctttttccgttgatttttttttacataaacatgataatttttataaaactggagttcctattcttccttcaaaactatcgtaactattatatacaagaggaatgacccatttatgttgagtaaataggttaatttgcctgtttatagttaaagtccatgttcttactcaattactgatttcagaatacatgttctttattatataagaaaaaaaaaggagttttataaagtcaaggaaaatttccctgtttaatgtgaaatacatagaatttccctttaaactggcctcctgggctcaggggccccgtagagcaggtctgcttttccagcgatctgggttctggtagactactctctggaaccaggcagagactgtgtgtagctaatgactggcatgattaagcgatttaacttgagtcttggagctgtaatctgaaactctggagtctcttgtctttatgatacacacaatgaccttttatagttagcagaagaagagggagaggccttgtggtcacgtgctaaagtgcagaatgctcagttctgtccaaagcacatacaagtttttcattagttttgcttttttcaccaaatagatgaaaaaaaatatttcctatgcacctgaggggggggggaacaagaacagaaatcagtattatagagtaggcctcaatgttcccccaagcagaccttatttcttaccaacagaaatttcaaggagacagagaggaagtaaaggagtctgcctaaaggatgtttagacacactaaaatgattatgtgattcccaaagtgttttcccacagtcctttctaaaaacttctttgacttcagtgaaaaacttacttaatgattgcatttctcttgaaatgttccctgaagagcgtctggtaaaaacatatgtcacaccttcttagttgcatacaaactgtgactgcagattgtttttgtcatgtaaaatatgtttttcttacaaaagcctttaattctataaaacttcaacgaccctgatatctagtgacattgcctttcattttttaagtcttgtcaacactaccagaagaaggtgctttttaaaaagcgggtctagaagattagtttttgaatcaacgtttgcaagataaacctttccaagatgtgcatttgcaagggcatgggattgtgggtcagttgtgtggcttgtaacagcaaagattagggaaggtgtatgaaatcatacagttgtgtagacttaaacctgaactcattgtccaaagggatgttgaggcagagtcctctagtgttcccggagccctggagccacagggctctcatgtctacctgcagcaatttccttgtcactatcctgattggttgaatctcctacatggtttcactcctactcaactgggacatttaaagcacaaacacacacacacacacacacacacacacacaccatattacctggttcagtatgaatgtggcatcagcaccttctccaacagatccaatcatagttgccactagagtagttcatgattgcaacctcaagtctcattagaaaaatttgaattgtctggatgtttgttcgcctctgcatatgtcaagagctaagataactgtgatagtcagtaaaccacttagacctcatctatattccccaaaacaggaggagagccaccttagagtttctctgaaatctgggaataacgtagaccaactccaagttgtaaatcactcatacacttgttatcctgtattgatttccagggcttggaatttattataatggatgcacggcggcgggcttctgtagtattttagtaacacggagaataaataatatgtgcagagatacaggaatgtgtgatgggagaagcaaaccagtatcctacagatctctgtgggcagtagatttgatactttcaaggaatgtcgatgcaatactttttatttaaactatattttattgtactttttaaatgaacagaaatatgcatataatacaaggtaattgagaaaataatacaaggtaaaagagaagttgcagatattcatatttccaggctcagagttaattactatttatttactagataattttagcctcttgtttttattggacataaagtattttcagagaaggggaccttgccattcttcctagaacctgctcctccgcaatcggaaacactcttatgcgtccgttctcctttggcactgtcagatacaccgtgggcttcaatggctgcattacaccctatagttacaaggatgaatctgcatctgttgaccaagcctctgctctttataaagccattctccaatctcacagacagggaagttttgctcagatcagacatgtagcactgtgactatgaaaatcggcagacatatactgcagtccaactcaaggccccagccttagtccctccgtcacaggtatacggccaggctgttttatgtcacttgacatttaagtgacacttggttttgttttggattcagctctgtgcaataaacatatctgtggataaatctatatcctgagctatattcttaatctatatcatataaatataacaagaagtttgcaggatgtttgagaacaatggagactttgacacattcttctcatttccgtggaaaagcccaccgtgattcattccgtggtcactgtgtttggaaaatcctttcttattctaaaatcttatgagtgactatttattttcaagctctggtattttatttcttttaatctcttcagccataaattagaatatacgactactgctaaactacttttatttagaatatttaacttttactcctcactcaaatatttgttaagaacttatcaagtattgatcttgggaatctagttatgaagaaatagtgtatactccattcaagagaagctaattgtgtatttagggaccaggactggaaatcttcttccaatacaaaggtacagtttccgtggtagacgccataataggaatggaaagaagtcatgagctcagagatgcttctcagctgtgggcaatcagaacagtgctcctgtcagcaatgaaaatctagactgaaaaacagaacgtatagctttccaccacagtaaaacgccattagactatcgcctgtacttgatattacaaatgatattatggctcagtctaactctatttaagcttcataattagttatattactgtaatgtgactatgccagttctccccagaagtacatttcccttttctttcacactgaagatttagtagaatggaaattgcaaagaagaggtagtatggagtataaatgttaaacccacatatgcttatgtgcctgtgagcacacacatcttagcacttacacacacatgcttacacacacacacacacacacacacacacacacacacacacacacattctgctccagcaaagtcattaagaagaacattttataaccttgtacgctttaagctaaacttagccttaaatgggcatcagagaaataccagaagatctgtgagaactttatgtctttggcactggctcagatggcatctttatcttgaatgccattgagaagacaaggggggaggggggatggagcagactctaagaagcagaagcaaaggaagagaagaaaaaataaaagaggacagagatggaagaatcagtggtcatcagggcatgtgatgctggtgtgtgtcgagggaggatttgggatttggagaaaatcaattcttgaataggtttatctagaaaaaggccatgactccacctctctatttttaacttaagcctctctgcttacatctgcagaatacgacatttccccacttcaacatcagatcagatggcactatattaacatgtctggaagctaggcaatgctgccataccatatataaactcataaaaaacttaattgtcataaaatattgctatgtaggagtttgttgaaaggaattaaatacatatatgtagagtgagcatgaagtaacaaatgcagttttagcccaaagatccaaaacaaataatacttgtctctaggagtgactataaccttgtaattctcccttagaattattgagaggattaacagtcatgtaacctgacatataattagtgtgcccacggaacggcaggcatccaatgctatctattgtgtcttaggaatgttgggtacggtaaaacttcagaagttggtattaccctggttagcattgcccgccttctctgacaactgcttctatacagataataagtttctgtgggaattaaatgacaataataaagcttgacagcgcatagatgatgatactgatagtttccacagctccctaagttatcaaaaagatggatgcaatggttacttgttcaaacgtaagtctcatgtggaccaggttgtagaggtactgtttaatgctgcttctcttgacaggaagggcttacaatacatgggaacattttagagaatttcatcttcataaaaggagcattaacggaggaagttcctagctgctgtttggcacagagaaggtgctatagctataaaaaccatgaagccaagtcagagagctgcacacttagacatgatgatcttaataggtgtggtgagacggggctgatgagttaggattctgggctctcactccttgctctggttcatggtacatgaacagttagcgacaggacaccagttcctatccttgttattttgtaacaatataaggttggctagaaaacgttctgtagcatcctcaccatcttgcttgttacacagtttaatgatcggacaatgtagtgtaacttactttaacagatttattttaccctaaatatctgaattgctgttactcatttctgattatttgacccctttaaaacccatcactgtccacagagtatggttcttagatttttcacaaagaagggtctttggacagttcaggagtccaataatctgcaaaactatttcttccccacttcttacttctctatgacaattagacacacaccctttattttatctgccacttatccatttctgtagaatagccgtgtttatccttgtgttatgtgcacattagcggcagaggatttttctctcctccagcttcacattatacagtgtagctgaagccatggcatagctgcactgtgagcctgtaggattccaaacagaaggagccagagaagaaatgcacagtaaaggtccttgagtgttctgggggcacattcataagtgtgaccataatacacagtcgatgaaaggaaggacaaggctgcaagaaaagactcagacctccatgtacagtgtcagggaagtcaaagccaaaagactgctctttattcactccacattgagggaggggctctgagtgacttctggacttgaaagtaattaccacaaaggtcagtctagggtgacaagatggaatgttgactgggaagagagagagcgcaccaagaagactttggagaattcacatatatcaaagtgtagcaactgagtatcgaggttatatggtatatccactggaataacagtgtttatgtacctaagttagactattagtataactattaagttaaaaaaggtatgtaatattacgaaataatacttactgaacatttgctatgattgatgctttaaagtatttaaagtattgtactaacacaaagaaaacatattttaacttaattcattttaaaaattgtaactatagggggccatgggagtttgctccccttgaagtgcatctgtgggagcctgtgcttggtattgggtgtcttctcctcactcttccaccttagatttctgaaacggcatctcccatctcccactgaacttagagctcacctgttggctagatgggctggatccgcttgttagtacttcactgctggggttacacacatccaccactacatccagctttcatgcggatgacatcgacctcaactccagtcattattcttgggtagcaatcactttacccactgtattatctcccaaggcccaaagatagcacttttaaatttttcttacaaaaataaaaacggtggtccacaagaaggtaatttatccaaattccccaaagctaataggtgggggggggggggcacttgaacacaggagtcatagcctcagaacctgcaggtttgggcacaccttcaggtggagcccatatgctgtctccttagaaatgcactgtgacaaccagtcagtgtgtgtaagaataacggatgtgctactgaagtcaataaaacagctaacgctggaatttccttattttgctatctgccataaatgagtttatttttgcatataatttcagattatatttctggactcatataatcaaagtttggggttttttttgtttttgttttttgttttttgtttttttgtcctaaaatgatcaaaattcctcatcttaaaagaaagttgagacttttatctgagaccaggataaaccagtggaaggccatattgatcctcctgattgaaaaggaaaagtaaaatgtttaagacaattctgaaaaatattggacacctagctttatggattggatcataaatgtccctaagcacccatgacagtttgatcctcagtaaagcagtgtttcactaggcagcagacaatagaatgctgatgcattctccagcttcctccatgtgactccattaatgggtttggaggaggtgctctttctcttcttcctagtggcagtaaggtgggtggccttgttcctctccctgctgtgaggttttgccttagcacagacacagaaacagtgaaacccagcgacctccaattgaaaccctgagtcaaaataagacttttcttctttggctgatttccttggatgcttgattgtgaggaattcaaaaagcaatgaacatactatgcagcaaatcccggctattgatgagagaaaggaaaatggacaggatgagccatccgactttccagttagctgctggagtctcccatgctgtgttacagttagaaaggacacaggcccagcctcacagactccctgagatgcagtaaggcagttgagatcccagaagaccacgatggctagaattcttaggacaaagcactaaggaggagttgaacttctataaagaactgtacatacgggatcacaccattcacctctgtaaaatgtgatgaggccatgaggtgcttgagccgtcatcctaaaactggagaaggaacagcacaacccaggagcctcaaaatgaatctcggggcgtgctcttccatcagactaagatgtaaaatcacataggtatggactttaacaatcaggaaagtatttaaagcacagggtgttaaaaaaataaaagcaactaattagccatagaataaattttattctggtcccgactattgactcagaactactgtaaatactcaagaggatcaaatatcccttatctaaattatgtgattacgaaagttccaaatagtcaggcaagcactggcaacactcggcatctagtaagttattaacaatcaaaagttccccgtggtcagccacagtggaatcatagtcactcagaactcatgcaaacattagggttgtagaggagacaatgtaagattgcttcaatgatattttgtttgtccataacactagagaaaacattagcagcattggtaccaaacagaacatttagacatgcgctattgagtactatagatgaaaatattagtaaagctaaggacacatcaagagaaatattaaaaatatattacagaggcagaggccatcgaatgcaagggtacagtattgagctttgtgtcaaattctagcaaatttaaatacaagcagttggagttatcagaggggcagatgaaagaaaaaataatagttgaaaataccccaaattctttcatgttgttaactgacataaccaagaataccaatgaggcctaagccaagaaacatttaaaatatcaaggaacatgatagtcacatttcttaaaaggcaaggatgttgagaaactcttcctagcagccagaggaaacagatgtatctctataaagaaaaggaaggtaagcctgctgatgccagcgagtttctgactggggagaaagcaggtcagaggatggcagagcggcatgctcagggggctgcctttaaacataaacctgggcagacttagaaaatactctttcaaaaaggaaaaatgaaataaatcaattttaagatgtgaaatataaaaacgtcaccactgtgaagtgttaaagagagtctttcagaccaaaggaaaaatattactgggcaaaaaaccattaattcatataaaaaaaaaatgacgagccttacagcacttaatcatgagtaaataacttttattttcaattcttgagtcttttgaagacaaatctgtctgttgaaccacaaggtaattacagtgttcctttcttcacaacatggttgcccaatgacattttataatggaatagcttctcaaaaatctactcctgagtgtcttctcgtcatcaggaatgtggagctattgtctcaggtttgaactacgagagctttatacactttccactcacttctttggatataatacaattagtctttggctttgaatatgccgtgaagacattcgggtctagccttatctttttcatttaagttactgcctatttttctgcaatgctgagtactttggctttttaattgtgtgcagtatttcttcattatctaatttttagagattgattgatctagacgaataacctctcgaaagcctaatggaacttttcttctattatatctttgagctcaagtttaggtcctccacttcagtcatattaatatgtatcaataaacttaatatgctatctgctctataattgttttaatctttgttagaaagtcagttctgagccacgtctgttcttttcaccaattgacagttttataataatctgcttttgtcttcagtttctgtctttagttttatcacctagatgccgctcttttgttttctttttaattttttttctttttactttatgtgtatgagtgttttacctgcatgtacaaatgtgtgccacatgcatgcctgctgccattggaggttagaagaggacatcccacccttggaacaggagctaggaatgtttatgagatatcatttgggtcttaaaaaccaaacctaggtcctgtgcatatgctctaaactgctgagtcatctcttcaggccttcagttcatcttcttacatagtcttcagcagagactttagtagtgcaaagaactcctgtctactttttgtttgggttcctagtgacacctttcttccccagtaatggaacagtcttgttcctacagatcattttcattctgtagctcttgttggaagcctaggaatttcaggatcttggtgatctgagccccctgggacagaggaagacctcagctgggctatggtggttggtggtcccacctccatttaagggatggtgccttgctgtgagaagactctgcttggtttagctttcccccatccctttctttgcagagtctaccccttctcccccgtccttgtaaaggatttcacccagtctcttgccccctccccatgagactcttttttcccctacgtccctcatttattttcttctgtttaatgctggagataattggccctatgtggtgatgaccagcaaatcatctgtaacttccttccatctggtagagatcacactggttggggccttccagggttttggctttcccttccagtgtgatgctatattggttagcggggcctctacccctacacattttctctagttcataatctaaagtcaaagatggctctctgtggagaactggtggaccttctcagaattttaagtagctatcctcactccctctctggtctgcaggggaaagcttgcagagtccttccttctgggtcatcctggcctatcattgcaatggctttctgggggctgttttcttaattaagtgttggtgataatcttgtcttgatggttggtttgacctctcttgagctgttgttgttcacgtcggctgtgggaaagggaagaggctgcgatatggtttcaatttgctgtgttttctaagacgttgacatcacataggaaatttttttgacttggaaatttatctaaagccatacaggaagccaagtgtaggtactcctcatagggtataatttgtgattctatatctggtatctacaagcacaattatggcaatgcatcaggtacatctattggaaccaggaacccccaattccacgggtgcctcttcttctgtgggttacagatgtttcccatgaccgtacttaatgtcacagtttaatgcatgcaaatcccttccatatgggccaagctgcatgttcgtgagtgttttcatctgatttagaaatagcacacgaggcacattccagtcttgaacaagaccattttcatcttgaaaggaaaagaattaagttctgaatattacagtagaagcttgaatcggaatttaacgctttactgtgtaagtaaaattgctgtctgggaaatgaagacttggtgtttgccgtttctcagtcataagaataacctggatattttggcccaaacacacgtccccatgccagttcctagaggttctgattcagtgctcagcttcagtgatctcaggatgaggcggcgttaaagatgctgacgcaggcttcacctgtgttcaatcactaagctgtgaaacccatcgctggtctgcaagcctctgaagaaatcccattagagggtaaaggttgtgaaatacttgctgacacatgctccttttaaaacacctcagggtgctttctttgctaactaaataaggggtttacaaagtattcctattttttttttcttcagaaagccccaaataaagccatttgggatgaaattcacttttaggatattttgaaccaagttgtaagtcctcaaattatattattagaacagttgaatcctgatacagaataacaagatttgagagtagtctacttttatcataaggttttccccgtacctcctattttaaatcctaagacttcagtcagaagcttaacacatgctggtggcaaaacagcccggaacctttatgttggcttagggagtcagtgtgggtgtggtgacataaaccagaagtatgccagaaaaactttagaagttatgtgtacaaaatggaaagcttccttgatatttttcaaaaggacaatctaactcatttgaagcaaacttccgacctatctcattgtaattgaactgtattttattcaataattacaagagcagtttgaaggatttaataaggtagtgttgtgtggactgtagtaagatacatgaaggaacacacaagtatgttactttttatgtttataatgcttcctccttttagaacgctgtcaatttttaatacttgcatattttaaaaccatgcatctcctgtggatgatgaaagagcaaagctaagtcaatacatttggaacaaggccagaggaccatggtgaatgtgaatgtcttttggttccatcaagaatgtttgtgacggaggaagaatgtgaaaggctatttgttaaaaaacaaacaaacaaaaacaaaaacaacaattaaaaaaaccagctcgggatgcgtggctcaggcatcctttgccagataaatatcacttatctgtagtgagggttgatggaaaaccctcactacagaactaaatgagactggggactagctcatcagaaaatcctgaaggaacggtggaggtgaaggggcatcctgacgggaagtctaactatctgccaattaaagccttaatgctgttgtggtattttcctcctatttttcctcttcttttatccttttttgcctattaagtgtgactataagaatatatatataagattctgcagcagtccctagccacaccctctatcaagttctaagctgttcagagctatgcaggaattacttggagaaggctggatttgctgagtcctcagagaagacaaatataccctgccctctgtctcttttgagttcctctatcttcccaccgtacttctctggacaatgaactaatggtgtcagaggaggaagcattgctgtagggattgaggattctagatttggatttatttcccattgtgcactttggcaagtagaaagaagtcaataccttgcatgatacaaatacctgatttttttttttttttttttttttttagttactaacgttatgaaacacgttcctccgggcgttttattagaagttctgtggagaattttgtgttgtttattttaaaaatccaattacagtggatctcaaagtctagatttaacattctctagtccaaagtcaccatgaattaggaacaagttccttctcataggggacacttcggtgccattgatttagcatgataactggaaatcaggtgactctactgtaagtctatattattcctatattattgaatgactatattattccttctgtcagattgctcctgtctgaactaaagcaaacctggaatgtagttatctgaatattatttagtaattccaagtaaactattcactaatttgctcttccttcgtttnnnnnnnnnnnnnnnnnnnngatcatgggtttgatcatgtgtcacatactaaattttcctaagtccaacatttggtattccaggaagttgccctggcacttctgagtatccatttgccaaacagtatatgtagcttgaagtatccttctcttatttgttgaaaacattttagagaagatgtttgatagtcttaagttaccattggtttgttaagatagttctttgttccaacttttggagataaggattcatgacatcttacagatgattacggagtccttcattaagagaaagtaacacaggagctgaagtggagaccatggaggaatactgtttactaccttgttctccatggcttgttcagtttgctttcttatacaacccttgaccactgcccacagtgggctggaccctctttgtcagttatcaatcaagacatgctcacaggacagtgatgggggcgagggtgattcctcacttgacgttctctcttcccaggtgactcaagttgtgtcaagaaatctgtttaatttgatttttgtttcttccaaccaatttttttttctaatttatttcttttttaaaaagataacctcagaggtgtttagtatttaggtaaatggtattcttaattttatttctcatcatttattgctaatggttagaagcacaattgattttcatgctttgattttgtatcccgaaattttggagaactagttattaaaatgggtaatagtggataatacaagagcatgatcatgtcacctaaaaacagacagacttttatttcctttacttgcctaatgactctggtggaagcctctactctcgagttgaacaaacatggtgaacttgctttccttgtcttaattctcgatttagaaaaatgtacccattatttcaccgttgtagcatgcattttctgtcctgttttcttccttccttcttttttccttcctttctttcttccttccttccttcctcccttcctttctttccttttgtagatatccttactagattaaagacattcccttctagtcctattttgtgtgtgtgtgtgtgtgtgtgtgtgtgtttatcataaaagatactgggttttcttaaatgtttttcctgagttaattagattgattttgacttttattagattgatattgtatattacaatgattaatctctatacattgaaccagcttaaacctttgcttaaatctttttagtgatgaatatatttctctgaatgggtttttagtccctgcctgtcattgttttgctgaagattttggatctgcttccctaagaagggtctatggtttgtttctttgtttgtttaattttgatatctttctttgcttttgatgctctttaaactgtgactccgtagaatgatttgctacaacttcagtctgatttgtagctcctctagagagagttttcatatttttggccatatctataacaagcttattgatatgattgaccatattcgtagtatcactttatgatcaattttatttcatataatcagcaacaattatcttctcggtcctgatgttaattattctattgcctcctttttctttggttcaatctagtgaaagacttgccaattttatctatgaatggacaaatttttacttttgttgctgttttttttttaatctttccattttttagtttcatccatttctcggatcttcttcttttggtttgctttaattttagtttgctcttcttttcccagtctcaaatttgtctctttttttcttttttttcccccctctggcaaggaagctattaattatactggggttcttttgtgtgggaggtgttggttttttccaactactttaatagttgccctctttgtctaggtttcagtttctgattttaaggagttggagtgtattgaaattctttgcggttttcttatctactatgataaagtagagcaaccaagacaacttatagaagaagaggatttttgaagacttacagtnnnnnnnnnnnnnnnnnnnnagggagggggagagagagagagagagagagagagagagagagagagagagagagagagagagagaatatgagaatggtgagggcctttgaaacctcaaaactagtccccagtgatatatgtcctccaacaaatccatacctcctaattcttcccagtttctccaactcgggatcaagcattcaaatatatgaacatatgtggaccattctcgttaaaccaccacagagctgtagattcattaatgatgtgttcaatcaggccaggagatttttctgctagtatttcttccactgttaattttgctttctctctttttctgatacctatatttttctttttcttattacccatattgccagatacttagtggtgttcccacatttctctgaatctcccttcatagccatgctctgccttcaaaatgtaaccccaacaaaacaagccagtgaccatcagatccttgaagataatggcatttgccaccaagcctaacactgtaatttcaacccccggaacccatgacaaaagaagaaaacttaagcccacaagtttacctgtgtgctccacatgtgcgccacgtgtgcatgacccctcccacacacacccacacaccaaacacacacacacacaccaaacacgcaaattagttttaaaaagaaataccagctaatattaggtcattacattcttgtaatcctgacacttgaagtactgaaacaggtataattaccaaaagtttgaggccaacctgttctccatagtgaattccaggctacccaggctatagtataagacccaacctcaaagaaaaggaagagaaatcaaatgggaaagtcagaggttgtccactttgcctagtccactctcacgcctgcttccatcttgtcgcttcagacttcctgtttgatcctttttcctaattgcctaattgattatgaaactctcatcacacactgcttgtccagcaagatctcctttagtccttgagcaataatcatgagattgctttgaattccatcagacctggtcttgaggggcctctcccaggctgggtatctcctatgcaaactctagttacagtcagctctttctccctctggcttttgttgaaaactttaagagacgatacattgtagcaagtctatacttctaaggctcccaagcccgatgctactgttgcctgctgaagagactgagacagaaaacaagttctgagcatgctcgctcaccctgggggaactagtggttttagcaaagctttctttgactctccctttctctgatctctgttaagctgtctgcttctgttgatgtcacacccatttgtggggttccactaattgctcactaattacttcattgtttctctaatgccttagggcataaattgctccacaggctctttcaattaaattcaggcctctttgcagaagaattctttgagactggtctttgaagtccttagggatctttttctgtgggttttcttccagataactaactgggctgtggttcagctcattgtccccataaagctacctgcatcctcttgcttgcttaccaccaaaatttccatgttcaaaagtattcttatgtaatattttaaatatttaaatagttcttgtgaactaaatctctgagtgcttgttcaggattggagctagagacagtcagtggtctgcatctcctcagcttgctgtccttactggaaacctctcccctttgcagcatactgcaacagtagcagtgtctgccctagtgttcttggccagatgcaccctgagtagcagggtagtatccattccttcagagctctaacctgtctgtccccgcaagtgaacttctgcaataccaagctgaggacacgagtcatagcctgtcttccccggaagacaagactcagcccttaaaagaaaagggagaaggggtgatgtctcgctgttcttgcttgtactggaacctcctcaccctgagctggcacatcagaaggagggcgtggctcccaaagacacagactcttgctgttactgcagtgttgtagactttcttgaagacatgttaattagtctgctttgtgcccctaggacaatattcccagacttaaaatggctgctgtttgaagtcgttttattcattgtttactggggaccaggttagcaaatcttctatcatctttctataaatttcttttatgtgtatgtgagtgtatctttaaattcatcaacttcctttatgacatttaattaatcaaaccatctctttattttttttaaatgtcatatatttccccctttgatcgttctcctgggccagtttacaatctcacttcatctctgttgtgcttcttatccattccttaaaatctgtctccagcttagactgagtctcagccgacaccgaacctcaggcctctccacctgcatcccaggttccagttcttctgtctttttgagtctgggtttattgaagcaagacctcctaagggtttagcctcccaacagtctctatgtgagaaatgaacagtcatgaatgagcaggactggaagatatattcatttgcaagaagacagtagggaggcaagtttagtgtccacattcctcatagcttctacataatggcatgtttataactcttgtgactttttttttttaattttgcgtagttctacactgtttatgcagactacatctgaggttacctaagagtcaggaaagttcctttctcagggttcttatgtggaaggggctgtgtccctattgtaaaatgagcttatattatatatatatatatatatatatatatatatatatatacatatatatatacatatatatatgtacatatatatatatatattcaagtttgggattttacatgtgttttaattttttcctgtgtgtttaatcttttgctacttgcatttattgtaataaagtaagtaatatttactatttgaattttttgcctaagaatacggtgtttcagagtttataaggtacctgcagtattgtaacaaagtaaaacacttattcattctgcactactcacgagtaaacagctagtcacacacaaaacaaaagatacattctccggtggaaataaacaatttttctgataaattagtctggagaaatttcaaataattgcgtaggaattttcactctgagggtgtcatttagtctaagacctctgttaattgtggtggtttaggtcaaggcttctgctaccatttctactctcaatatcttttcattcaagaaattttcctgtgatcatgggtgcatgggcatataaactgggaatacagagagtcttttttttccacatcaaattaatattaaatcctagaaatacatatgaattaataccaactcttcataaataatttaaaaacctgaatgatacatgtatatgtaccattactcttataaagccagtataacggataataagttatgaagaaaagtttaagacttgtttttattttatgtgtacaagtgatttttgcctgcttgtactaagtgcagcatgtggatacagttccaatgaagcctagaagagggcgacaggcctccgtggaactcgagttgccgactgttgtgacccaccatgtgggtgctaggaactgaacccaagtcctctgcaagaacagcccttaactgctggtccatgagtctggttccagggattaaatgattgcttggacatatatatatatatatatatatatatatatatatatatatatacacacacacacacacacacacacatatatatatatatatttgtggaaatggtgtacttctttgctattacatgaataattggatattgagctcaataactatttgatcccatcatacatagagcaacttccatgcttctcagaattaactcacatttgaacaccactcagtatgtatagaaaacagcagaaataagtgtggagctgtttcagaaattgttagaaactctatcctaatcctaaaccaaaactaatgtaatgaatttttgtgaacctcaaagccaactacacaggcagcaattctaagaaccctgacattctaacttaatgcaacccagtatactaatagatgcaggctgagagtggcagttgggaaaccttctgtctgcattttctataatcaggccatcctgttgctgtaccttggagtgtacagtgaaaactgcagtttaaaaacatggaacagagccagctttagcccgggtccttcaggcagtcattgtgagcttgtgagcatcgggctgcatgtgcaaagtgtgcatatggtatgttaacaaacacaactagggccacctgggccattgctggcagaatgacctcttcagatttgtcacaggtgtggatttgtattccttttggataatgtgtgttcagaacctttttactattgcctggttttgttttgtttggtttggtttggtttttttgaaactcccacattcaataatatgaccccatgtggagtttccacccacaatctgtgaggttgtgagaactggcataccaaccagttataagactgctatgcagtttacttagtcagcaaaggttaatttcagtttacccaaatatccaggggaggctggtgggagctttgatggtcatagcagctcgtggctatgaaaaggaaaaggctgactctcatacccacccctgtagatactgaagcagggagaggagacggtggcctggaagctagcaggacacttctgttcttgctttattgacaataaatgtcatgtgctacagttacacctttgtaagggacaaagacttgtttcttcccgtgtgtctgaaaaggggcaggttgtatttgacaagcagcgatatgaaccagtacaggtctggagagtgaaagagtctgcctggccttttttttttttttttttttttttttttttgtggaatctgggcattttaaagacctggttattttaaggacctgactgttttgagagttgtagaagcaaggtgcttgacaaaagagacttcacgggaaaggctttaactttggagagagttgagtgtgtttgagagacacaagagacacaagagacacaagagaaggaagaacccgtcgtaatggttcaaagctgtgagtttaggttcctagtagttatcattgcatgtttgccacttgtcagcagaaatatttttctgttctgcaggttttgtttatagtggtggcacaagggtatggaactaaaattcatgtttcttttgggggatcttaatttaatgtcaagtgtacttggttttaaaaccaaccatgatttttttccctccaatttggcttgtctgtgacaacccttagcagagaaagaggtcttcggataaaaactgtgggctaagggactatagagtggacagcataaagttctcattgtaattttttaaatacctgatctctggtgatatatatgtatgttatcttgcagctaagcagagaaatgtctctaaataagtcatatatatgaattattactttgattcagtctctgaatcaaagatgattctgaataagatgattctccccagtgcatcatttgtttaagacaattctgttcttaccaaggtaggctttgtgtgaaacttagtaatttaaaaacatggtgtgcagggtctagggagatggctcagtgggcaagagggctctctgtgcagtcatcaggatctgagcttgatttctggcacccactcaaaatggggcggggggggggggatagccctggtgcctgtatcctcagggttgcagaaggctgagacaggaggactgctgtgacttactgcctccactcaagctccaggttcagtgagagactccatattaaaggcatatgatagagaggattcagcgggactcctaacttcctcctctgcatagacacgtgcaaatagccacatacatatacacatacaccacatagagtatgctatacatgtaaacacacaaagaaagaaaactagagaaagtggcttgtcgttatttttgcctttctcctctctgtcccttcaatgactacagctttattgatataatcttttgtattttcttttcatttctaactttccttccttactaaacgcagtgactgttatgcatgcacaagacatctaagcttgcactgaatcaccagggatcaacgccagggttctcccatacgcttgccaaatgtgccaccgcttgatatatgtccccagccggtgtgatctctagtcattgacattttggtagtactaatgtttttattcacaaaacatttcggtttttatcaaatccctttatggcttctgcttagaacgtaagtgacacctcatctccaggcgttcagatatgcagtgctatacgtgaacttagtcattacagaacaattccaaaaccgcttcgttatcaaggttgcaactgagagacaatgtagctgaacataaatgtactcagacatgagcaggtcaagcaagagaaagcagtaattctacagaaatctacaccaacaactccaaaagccatgagaaacgggcttctgtgttgaacagttttaaccctttccctgcctttgctcattcaccttcagcagtgtgttaggcagcccagtcagttgcaagcctccattgtggaaaacgttgcattccttcacttgagtcagacactgcaagatggaaatgcagttatggagtctcttctggcagccagagtgtctactctgtaaagattgtgattttgaaaagtctgtctgcatacctaagttttccctgatgctttctttcacttacgatgttacaaagcatcgattcataggaaatactaatactctctggtccaccctggacactgtgtatttctcagagcatggagcactattaggtattcagaatcattgtattttattgttctcagccttctctgctctaagtgtttcgttgaggattacagagactttgtggacatgagtagacactaagcttcccaatgtctgtaaaggaagtgcctttagatggtcagcaccttaaaacatcagccagcctcaagcagttgacaagaccttccttcatttccagcttgagtcagctgtctctgtgtctctttgaaggttccacaaagtcagaccagtgcctcccatcggatcctttgtgcgtgtctttggaaagctcatatctgtcttcttgacaaatcagtgtaccagagacagagaagtatttcatgatgggggattccagcaggtgcaaaggcctctgtaagggttaggcctctttaaatggcattaatgttgggtaggactctttaagcatcttaacattacaggagatgtggaaaagattagaatttggaattgcagtggagactggtactaacattaccatggatgcttagacttctaaacggtggcgcacttgcaaagggtggctgccactggtacatgctgctccctagctacaaagtcagaaagagggaagaaatatggagtgggttcttacattgttaaattaacattttaaacttttagtaatttcatcgtccataagatgtcaacatacttcagttagggctctcagttgccagtctaccagaggaaaaaacatagcctatataattaaaaataggaagcagaggaatgctgtgtaagggtattgagtgtgctgtgggacaggacttgcaggaagagtggagaaaggggtctggggaaggtagacaggaaactacccaggtcctttctctggcctttgccacctcctcttgtgctgaggaaactatgtgactttgcatggtgctcccaccaagaactacaccatggaactctctcccaaatgaaaagaaagtttgaacctagtataagttaaatatagctacattttttttctctgtagttcatgttatattttgagtgtgagttttgggtgctctgtgaatctataagagatcatcttaagaatgaaagtgtattgcaaaaatggaacaattcaaccaaccttagctgttgattttttttttttgctccgaattagctagagttgtttttatgcataacatttgattttgctcctcaaagggatgatcaatttaggaagcccatctcataggtcttaaaatttcttgactgtatatcaagcaaagttgtctgtgattacctgagaactgggataattttcctaatgactagaaggaaaatagacacgggccttatataccaaaagtgaaaatgtggagtgtgtgattctgagctcaacgaagatatttttccaataataattttgaggtggatgataatactaaataaggagagaaggtgacaaatgattgaaaagaaagacaatagagggtaggatatggataaatgatagatgattgacagaaaacagatgcatagatatatagatgatagatgataaattgattggtgatatttagattgactgatagataaatagattacaatataatataattattacaatataataaaaatcacactcttctcaattttgagaatagaagtatacacataagcaaacaaaagcctgacgagtttttatattgagctacaactggattgactatgagatgtttcatatacctgcaatgttagtgacatttggaaacatggatgtccaggtaggttttctttgatgtcatcacaggtagggtcagttttcagtggctcaaagccactgagacccaagggaagccagagagtccacagagacttcatctgaacagataaccttaggactaatcaggaaaccataactgagcctttgtccaggtcagatcaacactgctgggagcaagagtgagagttggcaaccaagagtgctctctgtggcagcccagggacaccgagggacaccgacaggatttctgcttttgtctttgcccattgcacttttaagtgaggtgaaaagggagtgtcctcttttccctgccaaacttttttatggacctggtatttctctctgcaaaataatttattcctcgttgcatagtaccgtttttcagactgcaaatcctggctctggttccaaacagaactttgaaaaagagggagcttgaataataggctcagaagtgtattatttcttgggaagatctacttacccatttaagtggtttcctatggctttcacaagcaagaacactttatccacatataattaggaggctcaaagccacagtaagttttacgtagacttttctgcctccttcctgcttcaccttacaaaacttttctgttgtggcatgaagaactcaaagacagaagaagtgtttttcaaataagagtaacccaagatattagattattaatagtcatagtgataaggacaggaaccaggcagtgtgcatttattgaaaggcagacactgagttcagcactcaaggtgtgtccttacatccacatgttcagagagagcacctgctctgtgtaagttctcctggtttttgaggttcgttttacaaacacagagacagaagtaagcgaactcattggatatgcgatgtttccgaatgtctagactgttaatgacatttggaaacacggacacccaactagattttcttctatgttaatcactactgttcatcggccactggtgaggctggctctcagatcacaggcaagttgctggtgaaggcttgggttcctgaactggcagagtgcccctcccccctctccagccgttgaacttggtgcttctgtacagagaagtagaatgtggtaccttgcttatcagagttacagagaagcaactaaacgactagacgatctcggtaccatttgcagtaaccataagtgcctcaccatattgcactcatgagcaattgcacacaccaacatacatgatctcctgtgccctgcattgcttgcttagcaatgtaggaatcacattttaggcctgagatgtgagctgtggaagatagaagaacagcaccatgaagacagaagggcctcggagctataaccacctataaacactgtcagcgctgttagctgtcttagtatgggatctgctgcagaaagcttgtatatcacagcatggcgcaggttctgacgttcttcgtgatagttacagcagcagtgatgtcatctggaggagagccagtcacacaaaaggtatcttttcactaaatctgtttcaggcagcctcatttaaggctatgacagaggctcgcatagtgcaagataagtgtttgccaaagtgtgtttcacccgacactggtcttcaggaatgctcctgtgtaaaacttctttatgagcaaataaattttgaagactgcctactgatagcctcctcttggcagttaatacgtacctgagtacattaagcactcccaaaggttgcagcgtcgtatctacaaaggagcccgttttcttgaattctgatatatttcctgatgtttgaccacagaatccttttttaacaaaatattcctaatgttttgtgtaactggcctgacactgaccacatgtgagaaatgctgagttacactttactctgaatttcatgcaggtgtgtttggtcatgaatgtcatgaatcatatcaaagacaagcttgacacctcagggacctagcttgtaggtatccaggttccattttctattggatatgtcaggagaatgagccaggaggtccaggctctcacttaaattcttttgatgagacaattttgcagccttgtttcaccatctgttggtccataatcaaaccccttcatttctaacatgttccatctctaaaggctgtagaaaattattcaaatttaagtaatctgttacagtgcttaaaatgctttctatgttccatctcgtttggtctaaaacttttggggaggtaagcaacagagcctgcaggtgcccgcctaacacttcggattcaacggagactttactgggcagttccacattatcttctgtagatagtgtgtctggctgcttgggcacttgactagcattttctgtcatccatctaagccccgtcaccacagcctctttcagcactgaagcagcacttctttaccctctgcccatgaagagaccagcagcaaagctgctgataaggatgtgttcgagctgtgctgtcacactgtggagtagctgctgaaagagaacatccgtcgttgagaatgatgtaataggaacaggaatggaaacggctatacccaggcaatggttcagaagtctgagcgagacacagtggctcctgagatgcagatcaaagtgcccagtggagcactcagtaagccaagctaatttatcgacagaataaagaccttatagtcttaaaatatggaatggattagatggacacaaaaatgtagctagtacaaagcaagatgtattggtcgagtgtagaacaaactgtgccgtgataatcaaagatgctgagaaatagaagaaggagtgtgatgaccgagggtatggaattggggatggagacatggctcagacagtgaagtactcactctgtaatcatgaagacctaggttggattggcagcatctacataaaaaagccagacacaggggcaggtgactgtactcccagagctgaggacgtagaggcaggaggtccctggctagccaatctaatgggatcatagaaggagatagctctttcacggctgttcctattacaccattctccctggttcagggcgagactgtcagggagagtgtttgagaaagacacccaacactgatttcagggctccacatgtatgcacatacatgaacatgtacacataagattttgggaaaggggcaggattttctgttagatgcaatcactgattcaaaacctgcctcacttaggtaccagctatgccactttgggcaattctgcttaacctatgtaaaatcactaaaggagcgagacatgccaccaaataagactgttaacacaattaagcgtttttgtgcccatgacctacacacacttcactacttggcacatgtgtatcctttgtcttctttcctcttcctccacatgcccccattttcttccactcacagggcagtaccaaagaattgtcaaagagctactaaattattccttagatagatttttgatgatgaccagcatgtaagtccaaaatattattgtgttttgttgcacttaacgtctgtctgtctgtatgtatgtatgaatgtccatctgtctatttattgctttttcacgacagggtttctatctgaatctgcgtatcttcagacacataacccttgctagagctatcgcctcagtaccaagagctgtttcatttccgtttctctgtggtcttgggagatagccgcagccgcatgtatagatagaacattctctatctgggatgatgtaaatacttgtgctgtctggtttggtagccactaaccaccgtgcggcctctgagccctccacatgtggcaagagtgactgaagaactgaatgtttgttttatgtcgctcatgctttaagctgaaattgaggaagccacatgtggctgctggctgcttctttcagccacacagctatgcatgctggcaaaccccagagctgtgcagttttagagctgagtgcactttgcttccttaaaatgatcaatttcatgtcaccaattctctagttgggacaaaaaaaaaagtccctttgtaagcagcacgggatgctcttttcataggcgacacttcagctcttttgcctaaaattctacaactttcagttggcaactttcagtttcacctgctgtcaaattaaaggcatgtttagttagaaagatcaggaatccaatcattccaataattgcatggccataagcaaaaatttttatcaaaatcaattagtcaggttaccaaaataaataaatgaaataataaattaatatactttattgtgataaattttattatgataaactattgttctctaaaagcaaaaactatatgtaacatagaattgtagatcacctatgaaggcaagactttatttcacttttctcttttttttaaatttgaatttaattttattttttattagatatcatctttatttacatttcaaatgttatcccctttcctagtttcccctctgaaaaatctccctatcccctcccctccccctgctcctcaacccacccactcccattcctggccctggcactcccctatactggggcatatgatcttcgcaagaccaaggacctctcctcccattgatgaccaactaggccatcctctgctacttatacagcttgagccacaagttctaccatgtattttctttggtaggtggtatagttccaaggagctctgggggtactggttagttcatattgatgttcctcctatgggacttcgttgctcacttattttatttttgaaagactctttgtttctagaagtttttgcttttctttgtattccactgtgcctttcaatataaaaataagatcttatctcaattcaattttaacttttaatttcataataatcttataccagttgtcttagttagggttttgctactgtgaacagacaccatgaccaagacaagtcttataaaaacaacatttaattggggctggcttacaggttcagaggttcagtccattatcatcaagttgggagcatggcagcatccaggcaggcattgtgcaggaggagctgagagttctatgtcttcatccaaaggctgctagtggacgactgactcctaggcaactagggtggatcttaaggcctcacccacagtgacacacctactccaaccaggtcacacctccaaatggtgccactccctggcccagaaatatacaaaccatcacactagtcaatgctcgtgtgtgtgtgtgtgtgtgtgtgtgtgtgtgtgtgtgtgtgtgtacgtgcgcgcgtgtgccggagtaaggaaatctgggctgtgctttgtctgttcagggaatcttaatgcctctagcatgatgttgctctggggatcacgtgtcaggctgttaatcaggttcggaggggaagagtgagatattttaggctcgcctgacttagcagcagtggtagttcatgccactcaggagccattgatgtgacacactgagttacatcaacatgtactgttgtacaaagtatccctcagcaaattgtgtggaaaattttatttgtttccaccaaaatccagtcttaaggaccttattgtgtttgagtcaagggacacatgagatctgcacaagtgccacatttttattggttttagtctcccttgaatatgcataaatattttgtgagcatatatcattttttttccctgaaagatactcaggactactttgttttacatttttcttagagcccataaagaatgtctgttgttagtcagagctgtgagcgaacttcttttcacattcttcctttctatctctatttccccctcattaagtcaggtcaaaatgcctttttgtctcttcaaacctttatttcaaaagtggctttaatcctccgcttaatcctatttagcttttgatctacatcactttagggaggttgttctttaagtaagttaattgattttacttaggagcacacacttcaagtccataggccatgaatctcaggagcaggactttgacagccttcctccttatggagagtaacagcaatgacaggaattttgtttgtaccattggccagcacctaatgatcattctctccccctatctctaatgcatcctttgatgttagtgtcaaaaaacagcggtccttctctgccaagtacacatcccttccgacgtattaaataatgtctatgttagagataaactgcgctgcagctgtgctcactaaagtggctgctcatctaacacaaaagcaaatcttcagtgtcgacctcaggcaccaaggggtcatgacccctgatgtcagggatcaagtggaggcttaatctttggggaataatcaaaatgagagtaagacatctaattatttgtataaatattatttatcttaaactcatgcccatatacatacattttgcaacattagccatttgtaagttcaggaacatggactacactcacactgaggcacacacactcttatgcagtctctctccccacccatttgtagaacccttttgattttgttaagctgacatctccttgccacttagacactagcttcccacccacatctcccggctcctccaggcaaccactgacataattgccattttgataaattcagttattctggtcatctcatgtgagtgaggtcacatggcttccgtcctcgtgtgactgacttacttcagtccacgtgcctgcacctccccattttggtgaggggagtggtactccattgtaaggacttaccacattttactattcattcatctgtcactgggtgggccctaccacttgatcattgcaaatgctgctagctggagcattagtatactgaatgataaatattgagtgttgaaatattaacaagcatgttttagtagccattttaacagaacttcaagtaatctttggttttctcttatactgtagctggaacactacactactctatgggctgcttgtcatattacaggtttgtcacatatacatgtctgatgccctccataagtgactcagctgtataccttaaaagcccacctagcactcaggacttacaagctgatagactcaaagctatacatattaatgtacaaacataaaaacttaaaaacacatagagttcacctaacacttatattcaggatcttgtgcaacagtgaatctctctgttcatcactgttcactaactggagagtcttgtctgagtaaacccaagagtgggcatggggacgcagggcagtctgatgctatatcaatctagataaatagcagtattcagttcttccttggggcctatgatcccccttgctatggggtgtcctagatcaaggtttctattacaaggtttgtgttttctcttgtgaagcagtctctaatccaaggagaaagcagatggttacccccatgaccagagttctcctaggacacaccttacttacataagtggttcttgtagggtcgtattattcacagataagttagaccattgatccctcttctccctcagcagcctgcatagcatcttctggcacgatgaaagctagcaggaagggaggacatttccagctcagtcctaggtgttttctgcatatcacacatccaagatggatagtgtctttagtagtaggctcttctcatctacctctggtaggcaagcaaaaagaatggcaagaacttgtattgttttagagacctggggatgcctccatgactcccaattcagaggtacaggacctgtttcactggggctttaataactcatagcttctgcaaacagctttttctggctatatgaggtagctcctgttaaagtctctttttaaaatatatatgtaaattttaaaatgtggttatgaaatactaggtacgtttatggctctctctctctctctctctctctctctctctctctctctcctctctctctctctctctctctctctctctgccagtgtgttttgattaatcccctccttcatctcatctgcatgtcttctctcatgatacaagcttgcatttcagcatcctagcctccctccatcatgttctagagtgttttcaaacctcactcttctgaggataactcccatatacaggttcaagcctatgatgtcatttattcatatgaattgtcctgaagatgcaaattcatagtgccacggtgctcagagagcagttgtctaggatttggctgataatagtcctaacgagtcttggggaagtagtaatcatgttccagaactgaactgtgataaatagttcctcatttcaattaatgtaccataagtcatctaattgagtgtttcagacagatagatttatgacatgtaatctattccttaattaagttgtttggagaggaaagaaatgcaagggtctgacaattgttttatgagtttgctaattgcccaaatgtgcaaaagcatgagataaagagccaggcagatggttcagcctgctactccaagctgaaagcctgctggcagaggaaagtatacatagtagcagggctggggggagggagaaggaggaaacttattgttgggaagggagcctaaggttgcctgggtttttacattccaccaggaaggctgattgcaaaggacacagggttacttgtatccactaacaatatgttaagatgcttacattttgagaaggtgctgtggttagatagagggatgagtctcctggcccactggtttgcttgagggtgggttagaggaaagcaccacaggcctctttcctgggaacctgaaacccctaaagaatttggagatacacatttatccatgcatctcgagaagtcataatttcactgctgtttggtaagaaatggagttttcctacatgtccagaacatgatataattgaaaaccacaaatccaatatttaaaatggcaaaatatgggttttatgaaggctttaaaaagttatgacctggcaaatgcttattcataaggccggtatatcttcccatatacacaaaaggattttcttcaagaatgtactttgcagccagtacatctgctgttctcatgaaggattaaaatgagctatttttgtggaagttaatctgcaaacatataaaaaccttaatccagcttgtgccaaaatacctgctcgagattttgtttcattacgttgactttaattatcttcgtgttagctctcaaagtacactgaactttcaaaacatccatttcttatttgcaaagaagcttcatttctcactaaacacttctgcatgtggttttaagtttcgtttgatcattttcagcctttatatgctagataatgtcatacgtgtcattctgaatgtcattttgttggagtttgattttcacagtagaagttttctcataaaaaccacaccactcatctttgcaatgaagtcccgagacatcttgtattccccaagggttagtcaacgatgagatacagtctttctggaaagagaactcttttgcatatgtccctcttcagtgttcagggccaatgggagtcattacatcagtctgacactaggagacggactttacccctgttcctcacattttatgaatcagcatcaattccactcaaaggctgtcttgctggtgattcagctctgtctacaagaatgtttactggatgcctagagtgtttatcgaagtaaatttacaacatgaagaaaataggctagaaatacccagagccagcctttgagtcgcctgtagtctgattcagccctcaagctttgaagtgcatgtggagttcttgaacatttcattaaatacactgagtctggatcagggagtcttaaggggctatgaagtcacaccaagatagcttggccttggaccttaactttgatgtgtagtgatgacgtggaaagtcctcatacgtgttagggcctcataggaaggtcataggagtgctgcacatcacacagttgtcatttattcagtctttgctcatcatctatagcagagcaagacaatggtcatttgatagagagcaaagaggatataatgtccacttgctggtaaagaatccacgattgcaagtctttcttagcatgtctttcttcctaagtgagctaacaatacgagtgcagcctggtgcaaagatgggtgtccacttgttatacttaactatttatgcactgtttggattgctgcaatttacatttggtatacaaaagacatctttatcgtgtcactttagctttctaaactcctgatcacttggtctgaaaagaaaatacttctgcgctaagtaggtaggggattaaggtgggggaatccttggcaggaaaacttgttcatctcatcatttccatgtggcatgttgggtttagcatagctagaaccttcaatttttcaaggaaagttcgaaatacacatttcttgtgaaatgtcccgtttttacaatactggctaccaatcccgattctttaaaatgatccaagccaagacagcacatctgtgcatccatttgcagtgcccagtgcataatccactgtggtctcttaatacatgtctcatgattggaaacttataaagtttctaaatgaaactcaactgctcttctgtccttagatgatttgctcagaagtaagagtttcaggtttttgcatatggggtttaagaggatctaagattggagcatgatcataaaagccatctttccccctccgttctcattccagattacaggacaggcccgtgtttcactcaagtcaataatcagatgtgccaggggcagctgacaggcatcgtctgcacaaagacactgtgttgtgccaccatcggacgagcctggggccatccttgtgagatgtgtccagcccagcctcagccctgccgccggggcttcattcctaacatccgcactggagcatgtcaaggtgagtcaactgtttgccacaagtgtcacctctttgatgggaatcagacaacgtgtaggaaccacgaacacagtacccatggcaacagcagatcctgctcagaggactgatgagagatggtttgtatttatagtttacattttagcttccaatgaagtttcaactcttagcatcaatggagaggaagaggaggaggaggaggaaggaaaggaggaagagaaggaggaactcttaaaactactacttaaaatgtagaatgcattgagagacgagatgctcctgtctgcatccagatggcttaagtgtgcacacacacagttcttctggagagactgatttcttctctcttctcaccatccatcatgtctttctctccagatcgtcttctgcaactctccaacctcataagtggctctggtacttatatcaaaggcagatctgagacccgaggctcctacagccaccgtgtccaactcaagtgacctagaatggccctcttcttgctagttagttctactaggttttagcccacagagcccttgccattcgttggctacttttgtgatgttatctatactaaatccatcttctgagcttggggatactctttctagtaagttgttgaatgggagttgaaatgtcttttgtattattaatagaaacggtatctcatggagttagaagtaaatcatgtgcaaggttaagcttgttttcagacagaattcaccaagaagtaaacatgacactacccactgagtagatgtcatagtgtggtaagcagaccattgtcccttatgtcaaaattacagctggggatgtgcatgcagctctagctcattgaataatcaaccatggatagtctacacagtttggtaaatgatccatgacagaagcatcaaaagatttttgctagtttcatagtgctattaaaggatacagggatagtaccctgagctgaaaaaacaaaatttcaaatattccccaaaccaagaacattttgagtactgacaccatgctatgaatggaaaaattccactgtgaactcatgtaataagactttttatcaaaatgcacaataatcagggctgtagaaatggctcagcagttaaggatactgttgctcttgcagaggaactaagttcggttccatgaacctacattaggaggctcctactgcctgtaacctgagttgcaggcaaccctaaggtacctgaacccatttggaagacacacagaagtgcacacatacaaacaaagagaaacataagtcttttttaaaatgcacagattcattaaaatactgaataaaaattaccttgaagttctgtgtgcaagtatgagaaacatagtgaactttgtgattagaattgcacttcatcagcaagacatcccatgtgggtgctgatagcccagaccttgaaaacaacgctatccgatcttctaaggcagctaaaaattaagctggtgttaatcacggattaatcataataattttcaaaagagagcttcagggtccttgaggtgatcacagtacaactctacagatcagaaaataaatatgtagcaagaaagaaggccatgtcagttgtggacctactgtggtattttagtaaaaattacagattagacctcaagggtgaggtcccctcccctccccctctcnnnnnnnnnnnnnnnnnnnntcccctcccctctcctcccctcccctcctcttttctcttctcttcttttctttgtattcgagtgctctatctgcaccgtactctgcgtgcaagaacagccagtgctcttaaccactgggccatctttccagctctgcactttattcttaatatctgtttatttttgagtgagcctaggcatttgtaactttcaaaggacttgcatatttcaccttaattattgaatttctattgttcacattttacatctttttcatcttttttactatttggtgacatgtttattgttggtacttatgttacatagtttttcttatatctgagattaatattgatgagatacatcagttttactcatatttccagaaggccagatttcagagtaattacctgttgttttttggttggttggttggttttgcttgcttgtttttggtcttgtgttttattatattctctgacttctattcagcttccatttgttgagtgcttttaaaatttgtgaatatggaaacttagatcattaggcatagaatttactctttgcaatataaacacttactgctctgtgtgtacttctaggtcccagtttagctgtagctcacaagctttaatgggtatatgttcattatttaattaaatatgtgttcaagttttaatttctggtttgatccatgcattattacagaatatattgttaaattcaaatatctgagctttgttctagatcttttccatttctgcttttagattaacttttgtgcttacctagcttgcatgcgcgtgcacacacacacacacacacacacacacacacacacacacctacttgtgaatctgggggcggaacccacaatcttttacatgccaagcgttatatcaaccagagctgtgaatgcaatctctccttcatatatgtaattccatataataagcctttatacttaatctcgctgtatgtaattcactagtgtgggtggtctgtgtgcatttgcagaaaaaaagtctcttcagctgaagtatgtgatgggtacagagaggtgaggtgcttgaaagaaaaccaagtcctgtgtgtcctgtgggatttcccgtctatttgctttattaatcacgaagagacacgtgtggaagtttccattccaattgtgcattaattgccttcatttctaattctgtatgatcaagttccatttgctctgggtgtttactgtctcatgggacacatacagagttagcatttttgtttcttctaagtgaactgaatccttggtcattagaaaatgtcagtttttaatctttggtattgtttgtttgtttgttttctcatggcaaacccttacttacttttgccacggtagacttcttgtgaccaaaaattgtttgaattacctttgggtcttcctttttaagttgtccaagtggctttcttgtgaactacataaagttgggacttggtgtttcaacataaaacattacaatctcagccttttgcatttgactgttacattatttaaatccatgtagctgtgaacattatcacgaggaaatgtgcatttcaccattttctgtttgtcttgttcacttttcatatctcccttttcctgcttctactgggttgactatgttcatattggcttttatttccagtggattgtgagctgggattttgttcattttatagtgttacctacacatatttaactgatcacagttaaattattttcaaatatgaacaatccatttttatagtgtggtgactttatatccctattcttctcttttaatttgtagtgttcacttattattattttactttttgtttctttatgcattacaacctacaaaatacattagccttatttactatttttgtttgcagccaacaattatcttttaagctttcaaaaataagagaaacatactttgtattccttaacacactatttctagtgccttttattttgaggaaaggtttaaacatccatctaacttttccctgaagaaattcatttggcttttcttagagactcacattttatctgttggtaacttttattattacttcattaatgtcactatgacaacattaaagattcaacacttgttcctaaatgggtgaaattaatacatagtataagattaagaaggctatggccatctaaaactgaggccataaatgggaggtcactaaccccagtacaatactgtttaagggatataaatccataactttcaaacaagaaaataaaaaccctaataaacttagtaataagtaattgaagtaacaagagccaaagtactatatatttacaaccgttagataaaggaaagttaagagattaggtagtaataagtagcaaaaagtgggaaagttgtatcaagaaagagggaagacggagcgttcatgagttatgaaggtgggttgggattgctgtggtcatttgggagaacacagagtgccctttatgcatagcaggtgtgtgtacgctctgtccaagacttctgccctgggtctgtggtagagagattgagtgactttgaatcctcaaggcccatagtcagtgagatccacaaggaagcccactggggacattttggggacattctctttatggctgacaagatagggatgaactcagtgccagaaccaggagagcacacagtagaagcacacagcagaaagcattctgtaacaaagcaaagcagctgattgtaacacattctgtaacacagcacagcacagcacagcacagcacagcacagcacagcacagcacagcacagcacagcacagcacagcacagcacagcacaggtgggtctccatcaggcatctttctccggaagagaacatcacggataagctgataagaagcatgcagggagggcccgctttcctcgtcctgttgtcgtcttgaggtcaacattttcccttgtacataaaagaaaccagcggatggagtctggaaatcagttttgattacgtgtaaaatgtcttctctttgcagatgttgacgaatgccaggcgattccaggactgtgccaggggggaaactgtatcaacacagtgggctcgtttgagtgcagatgccctgctggtcacaagcagagtgaaaccacacagaaatgtgaaggtgagagtatgtggggtgcaagcctggcacaggggtgctagcctggtgtgggggcataaacctggtgctgattttgaagttttaaaaaagatgcatctggaatggttaaaactaatgaccataatcaatatttcttaccttaatatgaaaatgaaggtgtaacccataacatttggtgttaggatcatgtgttatagccttaaaggatttgatctgcacaaaggcaggctacatctgattggtctcaatagctacaagcagggggagtcatttaacctctgataatttctttcataatgtaggttttcatttcatctgtgaacttgtttgaagaagagtacatttttgttctaacttatccgtgaacaaagtctgtgtcattatgaaacttaagaaatttctaaatgaatgtagcttcaaagatcatgtatatttagaatgccatatatgtgtgtgtgcgtatgtgtatatgtatgtgtatatgcatgtgtatatgtatgtgtatatgtatgtgtatgtgtatgtgtatgtgtatgtgtatgtgtatgcatgccatggtatgtctgggtaaggtagcttcaggtgtctgccctcatctgtcttatttgagacaactctcttggaacttcctatctctgccttctctctgcaaggggctacagaaatgctaccacattcgcctttagacagattttgaagatctgaacttaggccctcatgcttctacaataggccttttatccactgagccaccagctagcccaaaggtagtttctaaagacagtgccatatggattattctagttggttgtggaagagcagcctcatttactccagttaagatttttcttattcttttataaaaggcagtattttgttagtgtatgctgatcaattataaagcggggtgcctatctatgtagacaagaaaatggcaaagtgagaaatctagaatttaactgcacaaagtcaattggagtctaagtactgttagaaagtaagaactagtgtgtgggcatcgtggctcacactaacaaggtttcaccacaagcaaccacaatcccatgagttgttggataacaccagcctctatttcctgtgttcctctacttatgtacagtcagtctgaactcatctttacagtctgatgcatttaataccattcccagataatttcatgttccttacaacatgaaggtgagaaggacgtagttgattattttaaggaacaaataagttttttctgacactgtttttttttttaaataatatccaagtggtttgtgctacttcaatacaatgttaattatcaacctacttgcaatgaaaaggttcagaaaaatgcatgcacagtgaaggaaagtgagttctgaattagcacagaaagtgaatcaaacattcagtggtcttcagaaagggtgctactattccaaaatcctcctaggtttttggaagagttgatacttttgcctttttccccccactgctctctacttttaacttctggaataaactgcaagctctatgcaagcacgagggaagaaaagccagcctttgactgtaggtgagaaggcacagccactaactgattctagtggttgtgacatttccattacacatcaaacaatgagtttcttcttagtcgaaaatggaagaagtcttttctccatcacatttcatcaaaagagcatgcagagccaaggcagagctcggggagagacagggccgctctttatttctgctctcctccttctttgggaatgggagtcattgatataacataggcaccacccggagccctgaatccagtcgtgtcttggcttccttcctgcccaggcagccagctccatttaaacattgcccagagagaattatatgatttagtatttgtgatttgtgggaatggaggaattggaacaagggctgattaaggcctgaaatctaagggctctgtgaaagctttacttgtttataaagcctatttatttagatgtcttaaaagtagctattatcaattttctttgggtaatactgttcctgtatacaaaagaccaagcagtacttatataaaattatttaatttaatctgtatcaaagcataccttgaaataccagagctgtggctatgcccgacgtcagggtttgaagcaaactcatatctagtttaataatctgatgggtgttctaaataagaatgaaaccacggcagtctctcttgtctaccaaaacgtaggtatttaaatttcagtgttaaaaaaatgtaaagtggagtattagctgatttattttttgaatcatgcccttcctgtttgtactgtatgaagttccatgcttctgttcatgtaaaagaagcctcttgcttttaaatttcttctgtctgctcaaaactaagagaactgagtcactggggagatggtattcttgcttggaaaatgcaactcaaggctgatgattttggcaagtgtgatgtgactattgctttcaaatgcttgagtaagattcctaaggacagaaattcttccttctccactactgtcctccagacctgagcccctgagccttatttctaatatacttggcagattccttaccaataaatgttggtgagcagggtccaaagtttataaaatggtggtcggtttgacctgaattcatgtccaaaaactaggtgaactgtgaaaccaggataaggctgtctttggaaagaggaaagtcatctaagcagattattttctgcagtggcccagctctcatgtctctttcaaagtgcataattatttgttcgtttgtttgtttattcgtgcagagactagatttcatcatatagccctggctgcctacaattcactatgtagcccaggctagccttaaacttgtagcgatcttcctgcctcccctttcggagtctggattcattggactgcaccaccatgcccgccttcatttaaaacataataatttcattattgttgaatgtaccactgtaagtccaagagggacattaaatggggtgggttggggctggagagatggctcagcggttaagagctttgaccgctcttctgaaggtcctgagttcaaatcccagcaaccccatggtggctcacaaccatccgtcatgggatctgatgctctcctctagtgtgtgtctgaagacagcgacagtgtactcacagataataagtaactaaatctttgactgtggtgtgttgctttcctctcctgtgtcattgtccctttatgctgacctattgttctgagtttagggaacctttgctgtctttgaagtagaaagatgtctgttcacttaccagaacgtcatccttcaccactgtaaaaaggcttgatctgccaagttatatgcgattacgcacgagtagcttatgctggaactcaagcagaggggagagcccatttctttaaggtttgaaacccatgccttggtgccttcagggaggctgtgtgtgttatgtagctggtcctggtatgttctgctgaaggatccctttcccctcttgtggacaatatagactactgctcaagtcctaaatctcagcccaaatctggaagtagtatacatctatattgttcacgtgtgtgtaaagaagaacatctctcccctttctttggttaggggcccagttccatgaaattcctcaagatggcaactgcaactgtgtcttatctctcctgagccagcttgcttctaaaaatctaatgtcctcgttccattggacagcaggcaaatggttcttcagtgggggtgggcgggaaccaattccttcacatccaaagaggaagttggttcagccacttatcccactcagacatccattaatataaataaatatctgtgtggcttaaatgaagatgaggcactgaggactaagtacctctgtgcaacatgatgctgcacaattgggctgcccagctttttctttctgcaaacattatgttggtttgcccaccctgcacataaatagagacaagtgggtaccagatgtccttgcttgcccccctccccctccatgccttctttaacatacctaagtcacgtattctgtcttggttgttgggtagtcaggaaagttacatcgaagtttttccttcagtggctttacatgtcagatgcttattttaaactattctgaagagtctttgtccccagtctatttatatgacattttgtcatttggggtctgaagataccaaatgtatctatttattcatgcttgtgaaaacccccaatacatgttggcataatgtctttgctgctattacaaccctgctttaataaacccaaggagataaattattcataataggattaaaagtatttgtttttagtcagatctccaaaagtaaattaactttaaaataaataaggaatgccccgccttatatgaactgttcagtcatggaggtcggttgttcacaatggcgaacaacgaaagcttggaggtcagcaatgcaaaaataatgaaagccaacatcttttaaatccttcggaaagtttagaactttgaggttgaaacggatatattccctctgttgaagagggaagtgggcagagaaatatccaaacctatttctcggtcccataataaataatccttaatccctctgtcacctatttcactgtgttttaggtgcctttgttatttttctcatgcccgagtctgccagcagactctatctagcaatagtaatgcctgatgttcaccgcgaacttactataacctttggagctactgagaaaacaagataacccagtttacagaggttgttgtactgaattagcacaaaggagctggaaagtggcaaaaactaatatacttcacagctgagaaaaaaacctctgtaggagggccctagggactctccaggtaacaggagaaaacctggacattactgagatccagctggtcctcggacagggctgtcaatcacacagctggatgccagcgaggcacagcccagcagaggattctactcagccaagccattcagccctctctacgtttatgtattgtggcaggactctggaatagctatgggtcagaactgatgtcgtttcacagtccagtcactggacatggaacttcatgaatgaaaaaggcaccatctctctgccctgacgttgacaaagacagaaaacatgaaactttagtcttcattcttcacttcagccttcatgttcacaaaaagttttcctgtgtcctcgatgatggtagacatttgtaacctagagctctctggctcctggtgagtcaccatcccagctctttagtcagactgggcatctgaagcatgacacacagccagtgtccatgtgcttcgcaggaaactggttcacaagacctacttctttgaggtgtttacttccttctgaagtgtgttctgctgcctccctgaaccacacatttggagactcagatagtgggttctctgttgcattcaagattctttaaaatgggatttattctgtgccactgcactgaattaatccagtcaccaggactgtagattttagtagatgtcagaaagcaagagtccagggtaagcgggtagaactgaaataatccccttgttcatggaaggaggcaatagcagtactctagagcagtagttctaaagtagggatgtgctcaactgttcctatggaagaataagatgaaaacttaaagtagagaattaatggatgtggtgacaacagctttcatcccaacacgaggaggcagagtgaagttagctcttctgaacacagaagtatgacagaaatctaaaatatttactacagcatttgtggtagccactttctggtctgtgaaacaaattccaaagattttttttttctaatcaggaagtgtctctgaaagagtctccccaaaggcagagaaccctcaagccctcaaagacagttgtttatgttttcttgtttttatacatctttgacttctttgtcaccacataaggtgacatatgttctgatgagatgtaaagagtaagtagaatagcgaggaaggaaatggtgtacaagagagatctggtggagtcacacatcactcaagcacactgaccaacaggtgactgttctcctgatttctttcttcatgattttcaggggcctaggatgcaagtagcgtgacccaaagacattcaacaaagcaagtccagtaaaacaaagcatgtataataaggaaggtcattgggtacacagtgaatagtgttgagaaaagtgcatatcaaatttgaaaaggattggactagaccatcacatcttataccagtggttctcaaccttcctaatgctgcgaccctttaatacagctcctcaggttgtggtgacccttgattaaaagattattttcactgctacttcataactataaatttgctactattgtgaattataacattaatatctgtgtttacagatggtcttaggcaacccctgtaaaagggactttgaatcccccaaaggggtcacacctcatagcttgagaatcactgccttatgccaagagtgacctttaatattagtatcaatgaagacacataatatccaaagtcatcgtgaacgttttttttttgtgtgtgtatactcagccaaagaagacatactccctgccaggcgtggtggcacacgcctttaatcccagcactctggaggcagaggcaggcggatttctgagtttgaggccagcctgatctacagagtgagttccaggacagccaggactatacagagaaaccctgtcttgaaaaaaaaaacaaaaacaaacaacaacaacaacaaaaaacaaaaaaaagacatactccaacattttgtcaaccctgaatctatagaggaatagattggtaaattcaactctataaaaaaataaattccatgccaatacaagatggaaaaaagcaacatgaaagaaagaaaaaatacacagatgaagacaaatatttcaaaatatatataaagaaattctatgaaacaataagaacatttctaataaaaaaattaaatatcgaaatatacatagaaattctatgaaccagagaacatatctaataaagaaaagatcaaatatatgactgttgacaaaggcagttgttatttgactactatatttaaacatgcttttccttacatggaataaaatatgtaaaccaatactgagctaacttttttagctataatttatgataaaataaaattcaaatgaaaactataccactaaaggtgttagaccatggacatgatcacaaattccttataaacatatcaggaatattttttgtctatcgaaataaaaacatccatgccattacatccaaaaataagttaacctgttggatataagaattgactttgctatgggatgaaaatcaaatgctgcaatatctacatctgggctggtgaaaaaacttagtcggtgaagttgagttcagattcctagcaccacacccaaataagacacttcagggtggcggggtagggggtagggtagagatgggagggtcactggagcatttagccactcactccagtcaattaaggaaaaaccgatgtgtcagaaaggggagggcgagctggagaatgtggatgacaaagatgatggagatgatgctgactaggacagagaatagaggaaaatattggacattgacctctgacctccacatgcatacgcacctgcacatgggcttctgcacctgcacaccatgcatacatgcacacaccatgcatacaggcacacacacacacacacacacacacagagagagaggcaggtcatacttttaactactgtcatagttttattttcagagttttataaccaagcaagaggaaacacagggagagagatggtaagataggtaggaagtgttattcagaaggtcccggggagataggataacagaggacctgtagcccgcagtcagtgcccacgcatcagaacagcacgatttgtgtcagcccgagcacattaatgtctcagccttgatgcagttgtcctgcttggcgtttttggctatgatttccatgtgcatcataacatacagtaatttttatgtcacagtttattgagatttttgatgtaaccttttagtgggggtggacattcagtacagcattcaatcagtaagcttttttccaagctagcaaacgttttcaaaaatataattggcataccggagcatatatttgcataaatctgataaagctgatgaagacaatgacgtggtgatgagagaaagtagaaccagatggtcatttactttcggcttggtctcagcctgattctactccccatgtcccagttagtttcatacaaatcacagccatgaacatatgagactcggatgactaagtttatttagcataagacagtgattaggaaattattctttgctcgatccagggatatcctctcaaatatgagaaaccggtgctattcaccagggctagtgtgtcttcacatcctgttatgcagtactgaaaactggtaaagtaagcccgtggtgcttgtgtctgttgaagatcactgaaaaaacgagcctccaaagcacccttttcatagatgtaaaactacatgtatggtaatgtcagaggactgagtcccccatggagtgaaaggaccagacaggtgctttgaacctgggctttgatgttctaaattctaaagtagattctaaacctgtatctctattacctttaccaagctgctgcgttgacagatgccacaggcaagtcgccctcattttccctttaagtaattataacagacagttagaaaagggtctcctggcatggttggagagaagatagagacctcaattttgagtctcctcaaaatagaaggtgcagtaagctttatgccctcgaccaaaaggaccactcttgccagaatcattacttcaaaagtctgacttcttgagttgctgtttttcctagcatgagcatagaagctgaaaccagacacccaaatccttgctcacgggaagactgtactaaagacaaagaagagatgagacgcttgtaacctatgtagctgaacacaatcaaatcaataggaacaacaaaaaaaccagagtttataaaacgatgtcataaaattttattagtacctggaaagtcactaagatgctgctgtttgagcaaaactctgagagtgtgaaggaatcaagtatgggtgactaggaaggaagactcttgtgccattttgggtagtggccattgtcaaacagaggccagggcacagcagaagtttggaggagatgttaggagatggggggggaggggagtgagaaagagaaggaacaggaccccttcatcgtgaaggtaattcagtcttactgaagcctatgaagtgtttaagtttctatgaaaactgtccagatacatccctcgtgggttagcagcagagaattgtcacctacagcataatgtggtcaatggtgcagaatgacatgtcagcctattagagggatcatctgatgaggttcatctgtggataactttattattttttgtcattccattatttccttgtgaaaatcaaagtgtgcactttataggctgagcctgaaggtgacccttccatactaatatatccagttacacaatccactttttttcaattttttattagatattttcttcatttacatttcaaatgctatcccgaaagtcccctataccctccccccgccctgctcccctacccacccactcccacttcttggccctggcgttcccctgtactggggcatataaagtttgttagacctaggggcttctcttcccaatgatggccaactaggccatcttctgctacatatgcagctagagacacaagctccaggggtactggttagttcatattgttgttccatctatagggttgcagactccttcagctccttgggtactttctctagctcctccacacaatccacttttatatgtacacaaatagtgtttatatcatacagtaaatatacagctgctttttggagtgttggagattgaaaacagagccttgctcattctgagcatgtgttctgatttgcctgtggattcccccagctgtgtaccctactttaaaaattgacctgttacaagaattttttaaatagaacacagctaagaaaatacaattaagaaatgttctttataggaattgtgcatagtatgcatgttagtgaatgagcgtagagactccattcagtctcctttttctttctagaaagtaagaaaagcacagaggtagattaccactcctgacatcatactgcctcagaggaatgtagaactaagttcattttcacttgagaccatttatatagaagataaaaaataaattactcttagatgtatcattagagcgctgaggacagcccagcttccttacatttctcacgctgttttgccaaaatgctctttaaaatatcaacgttttacatcccacatgctaatgagaacaggagtgcacagtgctgaattcctgaaacgtcgccaagtccaaatggctatagaacaatttaactttggaatttcctgactttcgtgttggtgaaatttaagtttttatccaaccttaaagggagactttccattcatcatctccgtgttgggattttcataaacttgtgaaaatgggagattggaacaaaaaatgaccaagagtctgctggaatatggttgtggggtgagtgcttgctaagcgggagtttgatccccaaaactgggagtagaaataaaaaacaagaaagatgtcggaagatttaataggactcctctgctcttagaggcactgtcttacagatgagtagctttcaatctgttgaatcgtcagcattttaaagtaataaataataattggttcaatttatcctgaagtccatgttttaaatgtagtattgtttcctatgtgtcttaagtttggattaacaaagggtaacaaaatattctctccccccccaaaaacaatgattgtgcagttaaccactgttggtaaatggctgtgttttccaaatgacccattttagaatgtagatcaaaaactaaagctcatgttgtttgactatgttatcagtagcctttattttgaagtggaaatagtttccagagtgttgtcacaatgttataaaacatcatggtggcattgtcccttgctgccaatacctcatgcctgggttactccaaattagtgtctaggaagatgcagcaatgacttcaggtcagtggggaaccttttatgttattgctcaatagtagccttttaaagagaaaattattgtgaacataaaactgtggaaaaattctactagcatccacttaagctaatttacaaagactgtttcaaatgtactttcctatattgacagcaatagaaaaggggggatcaagaaattagatagatagatagatagatagatagatagatagatagataggtaggtagggattctttgctgatacacagacacagatttatagagactggttaatctattagtaaatagatgatagagatacagatatgtggatccataaatagatagtgataggtagatagatgatagatacattggatggatggatggatggatagatagatagatagatagatagatagatagatagatagatagatgatagattaataaatggatggatagataggataagatagaaaggtgatagatagatagatagatagatagatagatagatagatagatagatagatagatactgcatcatagccttgcagtgacataggacactgatgtgaagctatagactacagcccttttccacacagcccctggtgttcgccaccatcctggaaaaatgtcattccctcccattttttccatggctgctatcagtctcctgattttcacatagacttttggaattgttgatagtcattctctagtttctcccttctctgcttaccttccaggctcctttgttcctcacatactcatgccagacacaggcacgcagttccttagataaagcactctggccgagtcttgtgtgtgtgtgctttccctcctcctcagttactgttggcctgcttatcttggttctcccctctcagggtcccctggggaacctctgttggcccattctctctgagttctccttctgccaggcactattcaagttgtcatactgtcacaccatcttgtcctcaggtctagtactgttctttgggtcaccagtgctagcttccagagtccttggcttgggctcagctcatccctttgatatgctatttctggtcaagggaaatgtttatcttgtattctgaaaccagccatatcgtttctctttggtcgtcagatatttttctgttagtgttgtgtgcttggaatcaaggcagggaagcagagtggaaatcaagatctgcatgtgtaactattagctcaggtgacttctaagcacactggggttttctgacatctgccctctatgtccctctatcaagaaagtgggaagtatccggtgtgaactttttaaaacctcccattttcaccacatcctcattttctgtctcccttgtgtttgggtagatgtcttccaaattttccaaataaagttttcctcactcatgtaaccccattctctgtgcagctttgaacccctgcctccactagccattaattcaagctgctgacatcacacaactgaagccattcaaaagaccacaatactctcctgactgtctctcagtctcctctcaccgcactgtgtcctgtagacttccttctgtagagagattgttctcaagctgccccctccctgctcatggttgtctttccttttgtgacattgtgttagttgtctccagggcctggtagctttttcattagtgcacatgactcaacatcgtaggagctgaacattcaacagttgtcagagtgaagtcagtgaagtcagagatgctgtctcgtgctcaaactcttgtctcctgtcagtaatgctttaaaacacaggctctggcagaagcaaagcaaaagctgcaattttcaattcaggaagctggaaagatgaagaaggttcctgtagcagcaggggacttgaaatgggtatggctgagctgttgggctctctttacagcctttggtgtaggacttaggcagaacctctttttttcttcttgcttctactgtgatctcctctctgtgttataacttccaccctaatgattgtatctatcctgatggcctcatcctcccagactcttgactgactttcagtttaactgtttccctgtaactagagtcaatgaagagaccattggttttcccccctcaaagctgttctgtcttgctttactggtttgctaattctagctcagtaatgaaactggctgtgccttcctcttacccttccttctcacgttcacggtattcttgacatgagcaattcctttctccctgagtcttgatctcatcggctgaagcttggagacctttactgccccgtctgcattattaactctgccctgccttacttattagcacctgtagatcttcttcatcagcactgaagcttgggtcagcctccacctcactttccaagatccagttgccccatctttgctctgaaacagggacagcaatgtgttctaggtctttctctttaccttttcactttatcttctaaataaatgacctcaactcacaggaaagctcattcctcactcaatgggttcccttcatcgtttggatctcactatttcttacctggaaaacatttcacttcttcttcctctataggcaaaggctatgcaatagtctctaaggtcctttatcagatactgtgacttccaggtattcattctgagtgtcaaaactgagctggattagaattctgctataacatggtgttgtatttcagggtgatcaggcatcttatgcttcattttatatccatcttcttagcaaattgaaaattcttggtagttacagaccatgcataattagttcttggtatgtgacaagtcaaaggctttgaatcagcagtaacttcctgaatttgtaaatgaacagcatgcatccaatcgatacttcattgtttaaagaattaaaaggatttttaaaaatattattttaattattatttttattccaatcagattgcttgaaatattttgccttttaaggaaaatcagtgtcaagaagttaaagagtctgtgtttgtttaaactcccatctcctccaaccttttctacaaaacatcgatgatgtattgataactaaaactaatatctatgaattagagttgaaggttcaacaatgatcatttagaaatgatgtacctgcttttcctgcctttctgtatgtttttactgggggggggggtggaaactcacaagattctagagattgtatttttcaaatgactcataaatacattttatataagagaaaataattttatgctagtggctggctgatcttgagaaattagtgttttcattttttattgttatagtaacaacataatgagtaacatttcatcctaaatagataaatttagaaagcttaattttgtatagaatggcatgaaaaaaatgtcaaagacttcacaaagatcaagtaagaatcctggtagaatttctcttagcagggcaggaattcaattggcaaaaacattgatttgggggaaatttcatttgtttaaaatctggacataagaaaacaaggtcctatgtaaaaatgagtatggttcattgtcagtagcagatcttcgtccacagatgagcagctatttatcactatcttttaaaatctgtcctaataattggctcagcatctttaaatgaatccacggagaatgtcagagtagattaaagattactatctccacaaaagatgcaggaaaaacatgaaaaacaaaggaagctgaactttctagtgtcacttcctagtgtcacttcctagtgccacttcctgatcagaaaatctacacattagcaatttcttgaaacggctttcgccaccctgatcacgtgcctctgtgtaaaactacagttcatatcttcctaaataataaaagaatgtttctccaacatcaggaatacaacagagtctgctgccaccatgtctgttcagttgcagtggagactgtagccagggcaattaggtaagaaaaggagtaaaaagagtgacctagaacagcagaagaaaactacaacagtctctccttgacttcaagggatgaatctcagctgtcccagtggatgcatgaaactgtagttagtatttgtctatttctgtttctctgattgtctagatagctatctctttacatacatagtgctttccattcatatatatatatatatatgaatacatgtattcatgcatacatatctgtagtaaagtttaacttacacatgagacatgttaactaggtgtggtactcacattagcacaatattaagatccttatgggattcttgaaaacaggaaacatcaaggggacaaggcaggagaatgtatacagtgcaggtgtgctcagtaatggggtgtttgaatcccaagtaagacacagggttttatccctccactcaaaatgaacacaatggttctcttttccatttagtattctagatgaagcatgactaactggaatcagagaacactgagtcatggataagaggggtgttgtgagcaggctatatcagacatatagatacatgtgcatatgcctttacacagtgtcagaacatattgaataacaatgtatttacgaagtacagaggtttcaacagcaacaatgtctaattatctgcttccctcagtaatctggttgagatgaacacattcctttattccagttctagttactgattttaactcttatattagagctcacatacccccgtgtgtgtgtgtgtgtgtgtgtgtgtgtgtgtgtgtgtgtgtgtgtgtgtgtctgtttatctatttctctctctgcgtgtatgtttttattgggatacaaaatggataaagggataaaaagactacagaagggttttcagagattttagaagtaggctgataaaaatgccaacagagtctagattgacatgataacaaacctaaaccagctacaggtaaaaaggcaaggcctggttactaaccgcaatgaacagacgtttgggcagcaggaccagaggacacagagggatgagcagaaggcatttgagttgcatcagcaatagcgattagctggggaatagtagaagtactctgcatgttgacccttgaggtcggtggttgaaggggccattgacatcgtcttattggtggatgtctacctcttcatggggtgcatgtgagacagtttaatgaatccctctcatgagtctactataccagataaattcttgaccatggaatccttgatatggtttcagtatgctcatgtgtccatgaggtctctgtgtatcatgatatgttaataaaatggcagaaataagtcgtgtatcagtctgcactgtgtgggtgatgctggataggtggtggtgtgtgtaaacatacttaggctcacagtgatctcccatcctcaggttgtagtcagaagctgcttgtgagatggagtgttttaggatggggacaaaactgaaatacaacatttacatcaagaatagtttagtgcaggacacagcctggtctccacaaggcgagtagtgtgtctgtattgtggatggcatgctgagcagctaagataccacccaaatgcaatgagatctctgctaacaagcctgcaggatactctaaaatgatcttagagctggtaaactggttcatcattgccgtagctcaatatcaatatacaaaacgaattttgtagaccttgacagtgagcattctgaaattgaaattaagagaatcccattaataataagatcaaaagggatgaaatgctttgaaatcaatttaaaagtaatcaaaaaatagcacactgaaaactataaatattgttgaagtaaattaaagaataaataaatagaaatgcatgctacttttataaatcggaaggcttagtattgccaaagtgtaaggagaagacaaagagcacactgggaatggaactacaaagcccaccccagtgacacagcgcctccaagaagaccacgcctcctaatccttcccaagcagtaggctactctcattcatagcaccacaaaaatgtcatttttttgaataggcaaaggaattaaatacagtatctacaaagaagatacacaaaagacctaaaagcacaaaatgaaaatatcaacagggtatcattagggcacggcaaaccacactgcagtttgatagcactccacccctattttaaaaataactgccccccccaaaataccttcaacaaacaaacaagagcgaataataagtgtggctaaagcgatgagaaattgaggtgctcatacactgttggtgggagtgtaaaatatcactgccactttgaagacagttggtcttcacaactccttagatttcaggtgtgatggcaggtttgtgtccactggcacccaaaggtgagccacccagatatttatccacggtaggtgataagctgcatgctgtattcagtgaccccacggaacaaaacacaccacagcatggagcagctttgcaaatgtcaagctgcgtggaaacatcctgttacgagagaccacatacttcatggtctcctttgcatggactggacagaacagcccattgtgtaacaacagaagtctagattaatgcttttctggggcttacaggaggctgtggagagtgattaacaatggagtggaattagttgtagctgtggggggggggcagtgaaggtgtcataaaattgggttggagtgatggttgtgcagtcctgcactatatttaaaaaacacaaaacacagtagaatttagcgagctgagtgtgtgaactgttcagcaaaggggctgcttctcagttaagccgcccacgcacgacacaactcagaccggttcatatacattgcactctcaaaagtaggagaaaacatgcatgagtttgcagttgcaattcattttatcacaccagcgttccctattctgacttaaaaaaaaaaaacatatcaattgactgtacatcacatcccagctcacagatttacctactatacactaacatacattaagaagtagaaatttaatatataacaaaaacaattatatatcaaaaaagtttttcaggttgtacttagtatgtacaggcttttgccaccagtgggaaggaactattctatagtattttataaacgaaatcacttattttattcccattaatttttctggagcaggtgttgatagggggtggggagaaggttgaaaatgctgtgtccctgttacagcagagcatcaccagggcagtgttcttaggaatcagtggtatctgagatctctccactcactaagttagcaccatctcctgctaggagtagatcctgctaggagtaggacttacaagaacatgaggttctgtggcttgtcatcagaaagctatcagacggttctctttagaccctgttttcttttcccaaagccccatgttcagattcatcaactccccatacactctgatggtcctcttactttacctcctgtttcctggggctcttcctctgtctctgtcctcttatatcttagcctcttctccctagacttccatctcctctcttcatgaattttcctctaggtatggatggtttgcacagctgcttctttaaattcatctctgtttctcttttttaaactcccatccactgatacacctaatatgagttgtctactttataaaccatataagtatgtgtcttagtcagggtttctattcctgcacaaacatcatgaccaagaagcaagttggggaggaaagggtttattcgacttacactttccatgctgctgttcatcaccaaaggaagtcaggactggaactcaaacaggtcagtgagcaggagctgatgcagaggccatgaagggatgttacttactggcttgcttctcctggcttgctcagcctgctctcttattgacccaagactaccagcccagagatggtcccacccacaaggggcctttcccccttgatcactaattgagaaaatgccttacagctggatctcatggaggcatttcctcaactgaagctcctttctctgtggtaactccagctgtgtcaagttgacacaaaactagccagtacagtatgtgtttgggaacttagccctcagctgaactccatacacaaaatttgagttatgtagctcattagtctacttccctaacactagactctcctttggtgtggctcccccttctccatatcctgttccctcttaatcattctgcaccatctatctgtcaatcaaggttgatgtctaacacatcttctcagtgacaaagttctgtccttttgtcctgtttccttcttgacttgttttctttttcctcaagcctagcttcgggcatcctgcaatattgttccttcaggtaacactcttggtttatttaaaatctttcttagaaagtagactgatccttcggaataaaaagcaatgctctacaggtgatgctccaggatttggcacgtgtcttcctaattatgcaatgtatccccaaagtttctcagccatccatgctcatgcaagtcccagtcgtcaacagtacagtgtttcagactcacccacactcttctacttcctgttacgtatgcgtctaaacttagtcgtgttgagaactccaggcttatgctggtgaagacttattcaggtattgcttgtgagacaatctgagatgttaggatgtaaggaaagattgatggggattttcttggcgagcttttcttcctcttaaaagggcagagaccctggagagacaaccagtgttttactgcatggcctagtcaaatgtccagctatgcttgctgtagccctcttgaccccactggggaaaccagatgcaagatactgtcagagaacagaaaggctgtcacaggatgttcgggtctgtaactaactgcccgagcttccctattttccaaaaaccttccaggatactgagtttgataaaggaaaatggggtattaccagtttagccaagccaggcgaagaatttagttttcctctgtaccatgcctgtatcagttcatagaaccttagaattcgtagtaaagtaacgcagggagaagacgctttggacagctgggtctctaacagtttaatctgcacttccgtggaacacaggagaaagatcttcttgacccgatccgttctcagaatggcatcttgattctcctatctttttacaaggttaatgtggtggtagaacatcagcccaggtgtcttgtgaccccaacaggagaccctggcctaaccaatcctgaggtccatggtacctggactctcagcccaatgctgttaaacctctggcttgggtttagatcggtctttctgagatctgaaaactaaagctcccaactcacatgctttaaaggctcaaaatagtcaggatgtgggggaagcataataaatgtgcagaatggccttaccttaacccgtgaatagatctgccaccttcaaacacacttgcttatacaaacatcggtgtgtgaggtccattttataggccttcttccaaatctggttatcatatagagtcctgaagaaatgacttataagacaactaagttcaggtagcccactgatataaatgttaatgctaaattttatttgataaatacataataggcattattatactgaaatttacaatgtctggaccattattatgtttctgtgcttgcttgcttgcttgcttgcttgcttttcttgttttcagcgatctctataattcttaaaacttggggagtaatttgtttaagataagttttaaaaattcatattttttacaggacccccaaactcaaacagactgtgtatagcataaatctatttttaaccctatttttttaaggtttctatctcattctaaacacacagagatctttcagtgactattttaacagaaaacctcaaaattgaatgtcagaggatgctggttaggttttctttgtttttgttttaatcaagttaacaaataactagagccaaccagtaagatgataatttgtttgaggaattgccaccaacagattggcccatgggcatgtctgcggggcattttcttaattgatggatgtgagagagtgcagcccactgtgagtgctgctatccttgggcaggtattttaggtagtagaaaagggcacactgagtaagccagtaaatactgttcctctgcatggactaagtgtattggtgaccaactctgtgtcaccaacaatgcattgatcttaccctaaggacaggaaagcggttcctgccaggagtcatccaaccaagagcaagtacagattcggattctctacttcacactccctgagtcttctgtttcatgtcggtttggtatatgagtctgaatccttgcctgtctctgtacctgtgtctgtccatatgtctgtctgttgtatctgtgtgtctgtctctcccagagggttttgctttgtctatattgaactgtacagaaagcatagcatggggaaggagtagaatactttacagaaacctttaacagaactttacaaggaattaagtcactggctccaattgatcccaactgacccagatagcaagcattattgtttatcaaccaatatccataaatgattgctttctatctttctgctttattttgggaaattattcacagcttccatatttgctgatttcagcaaatgatgcacaaacattatttgggtcagggcatggaagaatacattcctcaagcttaggttgtaaaatcatgaggttgtttatatgaaattgtaaaagttgtttacatgagaaagccaaggcaagtaagaatgactgttccattgttctcttaaaagcaggttagacaaactatgtgagtagatgtaaatggccatcttaaatctgaagtgacctcgatgtgaggtccagcaaaggttccagtctcttagaatataagaaatatttttgtaatattgcattagcacccccccaacatgacgtcagctttagttcctgtctccgtgttccttccttgagttcctgtcttggtttgcctcaataatggaatgtatgtggctgtaagaagcaacaaacaatttcttttctttgtttttggtcagtgttttatcacaacagaaatattgtatttgtctatatcctagatagttcttccaaaaatgccttccctcaaatgtcaagcatctttcatttttgggttttggacaaaatcatactttgtgaggaaatgcatgtacatgaaaattagtgttcaaatgaacgacatgagatcttataatttcgtttatcctaaactacacaaacccttgaattgttggcatttttggacaatggagagaatatggatgcagggtttggcctgccctttgtgctgcctgcttcacatcattccattctcagttttgtctcccttggggagaggtgatttatcacagtacttgttgattgcagtctctctgcacctgcttcatctccatgcccctctccattgtctgaaagcatggagcaggaagatggcagcacgggatgcaacaggtcctaatttgcacagatggtttcattttgctggatgaaggctgatgggaaggctagtaccacattacacatttgctcctcgtttgtgcaggcaattcatgttaggattctgatctcttgggggattggtaggtgtggatttgtgcccctgtccttcagaagttattgaatctcagatgaagttagtattgtagatgatgtctgacgttagccttctttttgaagaacatatggaggagatagcaaaaccccacggttgcttcttgatgcaatcagttagcctggcgatttgtcagaataaatgggtgaagagtaaatgagtggacccatggagggataccaaaaggagacggctaactttgtgtgctattatttaaaactttgaatcgtttgtttctaatacttcccatctcatagttttaattattttctggttgagagttccaaactcgtatatgatgtctttggtcaaatattcacacattctcccctccagttctttctcttcctccccatctctccccgaactgctctgttttcaagcccactgagtccacattgtactccctgcatgtgtatggctgtaaggactctttattcctgagtagcctctcagggaccaaatccctaagaaaactgtctctcccttctctggccaatagctagctcctccactaagggcaggatttatggtccagcttccttctccataccgagttttggctagcttcatcttgtgcatgttgtcacaggccctggaagttcacgtgaactctctgtgtactgccatgctcaggacatactgtttcaccgtggaagttcaccaccctttaagatctttctactcctgtagcgatctctgaggcttaggggacggagcaggaatgtgtgtgtgtgggggggggggggtaattatggagtttaaccatgttcccttgcatttataattaaaacgcaattatttcccctgtcttttaaattgagacattctgaaagaatgtatacaacacaagaggacaagaacataaaagaaacaaaacgttcccatttactttgatttttgagtaattatgtttatgacttttataattgcttcctctattcattggtctttactacaccagttgctctgcaaacaatgctaacaattgggtatccctgcctgggtttcttccagtggctcatttccttttgtaaaagggattagccttcagctcccagtgctcctaattgaggttttgtttgactttccacctctctctccctcatgggattaaaagtgaagtacagggaagtttagagaaatgctcaggtttccctactttagggacaatttaagaaaaaaaaaaaacggacttttgttcttgtcaaaggaaacagcccattcccagagttaaactgagcagataagcacctcactaggagaagtgggcccttcccagtgcctctggggtgtttatttgccatagctctatattgtttcatattgaacttattcccagaatgtcaaatatactcatgttcacgtgcacctaccaaaagcacaccctacagccaaataggaaaaaaaatatgataccatttgttggttccaatgattattgtaaaaattagctatatgtttgtatttaattattccatatttaagaggtgattgtatatgtgttttctgatgggccctggtaggataattccctcgttgatatagaacaggaactaaaactttgacatccttacttatttgcaatttaagttgcatttgagcagaaagggctgtatagagttttgcttgagttggccttgtttggctgctctgggaggatgctgtcaactcagttcccagagatacgtgcgagaaattcctcagggcctgaaagaagactatcttcagggttatatgatccacctaatcagctgcgagtgctctcatagtttggaaatccttttgtttaacgaaggcctttctcaattatcttctcttgattagacattgatgagtgcagtgtgattcctggggtctgtgagactggcgactgttccaacaccgtgggaagctatttttgtctctgtccccgtggcttcgtaacctcaacagatggctcgcgttgcattggtaagccttgtgttttgaaggtacagtatgtggcttctttataatgacagaacagcccaaacaggtatgaggatggtaatgattataaaaccattgggcgaacggatgaaaggattgctctaaggccttaataatatttagcatcacggagggattgatagaccagatactgttcgtaaagtctttgctttcaggagccagctggcttagttttatgttgtcaggatcattttttttttggaagaaagacttgctcaagatgtaattgttgcccagcattgcaggcacagagcacaagaaagatgtaaaatctgttagggagctgggatatagtaatttatattctggtgctaggaatcatgaacccagacagcatctgtttacttaaagcttattctggtaaaaatgcttactataaagaagtaattggcacccctaattttgtgtttcaagtgtattcaaattaaataaagccaaatatacttacacggtctgctctgtttagagagatgaagctttgtagttcgcagacgtgatataggttatccatcaggcaacatactttgggtttctgtcttgtgagcccagagataatgaaatggcctttgatgtacaagcatggtagatttagctacctttatatttcttgccttgagcgttcagcctggttagttccaaaaccgaactgataatagctacaaatagatggagaaataagtacagtgacgatagcagcactcgagatttatgcatgacgagttagagaaagtagcctagtgtctgaagaatagagcttcatggtccagtgaagggaagaagtggggtacagagctctccctgagtctggcagtcagtgtatcagtacctccctgagggatctatggaccctagtgatggggccaaacgaaccagttcatgagctgaaagtacagagttaaggcgataaactgaaaagctcataccagcagtcaacagcttatggcttgaacctctttgataaatgcacttatctactgggcactaaactagcctcggccatccatcagcaagaatgaaaggtgtatatactcccattacagggccatgttgtcctcacatagtataaataacaggatgggcatatcagatataggagtctcgtttggctagtgacaactttgtgtcctttggcctcctgatggacaagatgatatggggctgagttagggtcctgcatatgccatacatccactactgaagctgagttctgggcctccagaaatccccttcatctcagaggaaacattctatccctgggggccagagagagggcgccctaaaataggaaagtggaaaatgactcccaggaattagaaagccagtgctaaaactaagtaaacagcctgattttttttaagataatccatattctattttgaatagggatgtgtttctgtgtgtgagaagaaaaacaaacccagcgttctaatgtggggggaggagcttcgggttttaaaaatccaagtgtttattttcttagatcgaaattatttatgatcgaatcatatgtcatgaatatatgaatccccctctgttttctgttctataaacacatggtgggcatgcaaatggcactgagctgggtgacgtcagaattttcttcagcctgagacagcacgctatttgaactttactctgagagtttgtgactctaccctgcttccttgtcctgtttcacacagttctccctacaggatcgtaagaaaatcagcaagtacgctgagtctaaaccaccttgtaaactgtcagcgagctacatcctttctctctcaggaacaagggaagagtttcatggggcagaggcatttagctagtcatttttaatcttcaaaaaccagagctttccccattccatttaatgctaatttaggaagacagatcctaacttaattttacctagtgtgttaatcaaaattttctttttaaaaaacccaggaaaaaatatctttaacatagaaactaacatttgccacatttaaaaagagttgaagtgtcactaataagtcttttctttaaaagcattttaatagcaagatttaacgagccttatgtcattttggaattcactccccttgggcatcattaatacctaatttccacaatttaatgcaggccccgaagaatgactggcacaagcagtaatgagtaatgaatatttgagccacagagagagagcaagccggatgcaggcagagggggctgactctcttggtgctcacacagctagcagaagccctcagcaggaacaggatacagcctgccagaggcaacaaaggtttagaaaaagacatgaaacagttagaaattcttgcagaaagtgatgtcctcacgacgttctgacgccttttcctccagctttccgtgtctcattgcgcagcctcacctgaaaagtctgaagataccaaccgcaaagtataatgtgaagtgtgtgtgtgtgtgtgtgtgtgtgtgtgcatatgtgcatgcacacacacgtgtaagtttgagggaagaagtgattcactactgaatcatttccctgtataatggataccattaagcgaagcaaaacagaaggctaagcctgccaggatggnnnnnnnnnnnnnnnnnnnnacttgtacaagcctaatgtgctgggttcgatccccagttcccacattaaagtggaaggggaaatccaactccatactgttgtgtctgaccttcacatgtagagagtaataacgaacaaagatgttttaaacattgctaaagtgaaactttttaaggggagtgctggagagaagactgggtgaattaagttcttgttccccaagcttgagggcagagattggcccccataacccacacaggagacaggaaggtggggcagtggtttgtaatctcagcagtcagagggcagaaacagggtccctgagcaggctacccagaaatagttatctccaggctcagtaagaaactctgctcaattaagtaagtgggggagaaactgagaaagatgcctttcaccaatgttgggcttctattcatatgtccacactcttgaacatatatccctttacacacatgagtccacacagagatgtacataataaatgtaacacacacacacacacacacacacacacacacacacacacacacacatgtgcacacgcacaaataaaaaacgaaaacaaacaaacaaaaaaccttggaaagaaaattctcaaggagatgaacactaacaaagatctcgataaatgcgtaagagctggatctgtggaaggaacgggagttgccaaacaagagagtcctgtgagccagtggatgctgagaggattccatatggatgcaggagacattcaacagagcttggctgggaaagaactgagcaagacactggctggcaatagagtaaaagggctgatgctgatgctgatgctgatgctagagttccctactgtctgatgatgaatacttgagtgtccatcaagagctcaaagcaggatgaggcatcaaaatagatgggcaagcagaggtatggggtggatcctgtcagtcaaggcagaagaggactcttcaatgacatagtttgatggcagtcgtatgctcttcaagtatcagagtgtagtcaatggtgtgtatagtgtgtaggagtctgggttatgtgtggtgctaatttctgatacatttgcaagaaaacacttgaggaaggacctgaaattcctcacaagtgtgtttatgacaggtaggtgactcaaggacaagcagtgtagtaggtcgtccacaatcctataaaggaagactgatggttttaggatactattttattactaatgattgctaatatttttttcaatttgaagactccttttgaatatcaaacttttttccatactcccatgtgatggggatgtgttgtgtgaattaaaatacataattaagtggctgcttagcatgctgtcctatttgtaaatgaagccctgcttggcaggcccatcaacacgaagaactgtttgtatgtagcgggggacatgcgtcactcactctccaatactcatgacaaatagagtttctgaccttgcagtatcccagcagaggactaaagggcggggcccacacagaatggcttcctgataaacttgctatctggtagtttacacgtacgacctcattccaaatggaacgttgagcctgaactcatgcagcgtgctgaagtgggtagagttgtcttggtagagcttctttagctattgatagccaatttcattgcgttcattctggtcagagaagtctctggtgtttgctgtcagcagagcaaatgcttagttttttttttttttaaaggaatgagctctcaagtctgtggctggtagactctatgcctatgaaatgaaactcagtggtttggtgttcagatctctcctcacctacagaattaattctgatgttactgtcagtttctgaaaaagctattaccattctactatggggctagagttattgaaagcttttaccgtggacctctattagtattatttgatatagtttgggcttgttctttcttctcccactttggatttactgtggatttcttaggccttagcttgtcttatgacatggctagaaatttctggaaggtttgaaggtgtagaatggtacctgttattctgtttatgccttcttctagaccccttattagatattccccattttctttcatctcctcatgtcttaaactttttgcagcatctcccatctctgtctatcagaacaacattgacgagaatgtgtatttacaaacctccccgaccagtaaccactctctccattcgcatctggcagccttagtgtatgtgtgaggctccttgccccagctctggccccttccagacacagagtacatagagcttgtctaaggcaattctctccttgtgtatagcattttatacagcatccataggttaggctttcgttgcttaaacattaaaaatgatctagatactaattgatctttaactgtgaatgatttaaaatggtacctatgtgtcaggttgatgttgtcattctgatatcaaacccactgtttatttccttttcttccctgtgtctcattccttggcgtgggtcacttctccgttactactctgttttctttgaagttcgtggaactcctctgagatgtctccgtgttgtcctctacttgggttgacttggtctagctgctgttgtatctttacctgagaaactgtgcttctttgaaaggtttcagagcagaagcttggtgtgagttgcaacgtcaaagctgtttagatgggaagagcctatgattataatatcttgaggccactcctccatttctccatgcagaagcagcacagagatgggcagtctccactgtgctccctagggtgctaacaccctcaggcccctgttctttgaggcgcctgattacactgtgctgggtaggatttggactttctgttttgtatgctttgagccttgtgaaactgtaccagacgcttggtgtatctgtacttcattagaagcttaaaagtgaaccaagccatttacacatagaattcccaaatctcctgtctccatnnnnnnnnnnnnnnnnnnnnacacaagcaagacaactcttcctcccctttgacaagggagaaagccagggagaagaaattaatcaactgtgttgctttttaaggaaataggctaccactttacggaaggattagagtgatgctctgtgtgtggacaacacgaagagctgtgggtgtccatgcgtcatgaaggcattttcacccaaggagcagtgctgtggcactatcatccagagggagaggactgtgggcaggagccccccaacccccccaccccgctttttatcttgcttttcatgtgaagcagagtgctttttttattatgagggatgtttctgggagacagtctactactggttggcaaaacaacaacaaccaaaacaacaacaacaacaacaaaaacattgttttatttctttttcccaccagctctgatctatgagtaagaaatattaaatacagttatggaagtaaatctaggtctcttgactcgaggctgtgattttgatttcgtattcaaacatgctacaactgccttagtgtagaaacctcgccaaatgtcacattttcatcctatcttgctgcactggttggatgctagagtatgggggattagtcgtaagagtttggggctttcttatcttcatttacatcttgttcccaagaagtacagcaaccaagtagagctaagaatatgagcctttggctcccagaatgaatggtcttaaatgtgttcccatggctcactttacaatagacctgggaagtcactcacagacgccaactgttcaaacttagctcctaagagtcttagtgtctcccatggctttacatgggatgcatgtggccagttctgtgctttgctttaaagcaagctgaatgtcttctgtaaatgagaggatgtgttccacatcttactggctatctgcaagacagcttcaactgtgtcctgctgggttggaagcaatctgagaatgctatggaccgtttggggaaataatgtatttatgctagactgtgtaattagagccaggaatgtcagctgtatccattactggaattatttgcaatgatttttaatttaattttaaaaatatattttatgagtactgtcaatttacatacaccgtttctatccctctttccagctcctcccatattcctctatcagattaatgatctctattactttaattaatattgttaaatacatgtgggtctgcacatgtgagtgtgagtgtgtgtgtgtgtgtgtgtatgtgtgtgtgtgtgacttactcagtccatttagtgttgcttatatttagttgtgtttaagactgatcaactccggtctgtataaactatcaggaagcttgtccctggagagaactaattttttctctctgttggcatcactggtgtgaggctcctgaatattgcctgtaacttcttatgatactagagaaaatgtctttaaataaccaggcatggtggcagacattcatgatctgagcacttccgagactgaggaaggatggtcaagtttgaagtgtctctaggctccacagtaacgttgagggctgccttggctatcagtcataatcctgggcttgggcttggtttttttcatttatttgtttgacaaaggatcttgatcacatttcagtagtacttagctaacttcatttgttaaaagaaaagtggttgtatatcaagtttgctgatgatttggggtttttattcctgtgtgatttggaattgagagccttttgttaccattacggtttttcttcctgtgttttctacccttctgattctttctcaatttagtcgacagggtgcgctctatcagactcaaatctgattgtgttaatttcctaccccaaatccctcagatagtgtactgagattttagcacaacagattttgccaaactcagtggtgcttcagtctcctcgccttgctttgtttcgcatctgacttccttagctaccttgagctcttacaagacacctcatccggccttacagttttagattatgtatgtgcgctggcaacttccagatacacatattccaagtttgtttattcaacagcctaagtgtgttgtggattacagaagagccttgcctggtaccctctcagcctgcttatttcctattcattgacatctgagcagtccaagtcgagactcaggaaatttccagcactctttcccttacatccagcatataagtgatttcccattaggtctgtcttccaacgtgtctgccaagggttcttacaacacaacacagtccactgctgctctcatcaaagccgtggctctcctaaacatctcctgtgtcctcttgttgctcttccatctcttcttacatcagtcatgatcctaaagatgtcagccactgccttttgtctatttgaagccatccacaaaccttcacaacatggccttcaaatcccaatgaccttagggctcctatgacaatacccatcttctcttcttaagacccatgggaccctgttctttgtatggctgtgactcattctcttgttcccttgcaagctgcttttgcagttattgccaggttttaagtgggcgctcagacatcggtgtcttagggggcttctgactgatctttcagtcagcaccctcgttagacattgttgcaaagctaataccggcatagatctcagtggcagacctcaggacacaggtgggtcatgtttgatgctggtgtgagatacattgtaagctctaggccaacctcagctacatagtacaaccctcacccatccccaactcctcaggttcaaaaagtgtcttgatcaagcgcacgtgttcggttgccactatttcttgagctccagacctatttggtttgtcaagggaagcttgcctcggatttacatgcctctcacttttgacttagagtcactaatcataggaacctttgctgacaaaaaggagtagagcgctgatcagatgtgtaagaattaagaggcaaaggaatgaactggtataaaaaatgattaagtcagaggaattcacctcgcctctatttgcctaacatgggaaatgattgctgcaagacctggaggtaattctgctgtgtctcctgtttgtcctttacatcttcagatcagagggctggaacatgcttctccggcctggtgaatggccgttgtgcccaagaactcccgggccgaatggcaaaagctcaatgttgttgtgagcccggccgttgctggagcatcgggaccattccggaggcctgtcctgtcagaggttccggtgagtggcaggctactgtctccttggcaccaacagagttgaaaaagtcaatgaccgtgatgcactttgcccttctccttggaagcaggtcagatggttattttggatagccggcagcttatagtgcaccaggcctttacaatgttttctttcctttctcacgaccttgagaattaatccctctcatatcctgtgcattataaataagtttgtactgggaaaatccccttaggatgaatgagaagttcctcttgctgtagatagcataaatagtaaagtttgattagagtttccaaaacaaatatttttgttatctttattatgggaaaaattgagatacagtctttgttctctcaaaatcatgaagccataatatactaccaagatggatctctaatatgctatcctaattccatgaataattaataaaatatggtagttgcttctttttatttagtttcaatactcatacaactaaataaagaatttacaggctacctgaatgcattcgactaccaaaattcattttaaaacattattctgcacatatattaatatctaactcctgaaaaatgaataaaacagacataatattcagttagacataatactgatgagaattcaagtaaaaccaaatatgtagactgagttacccaaagcttttcacctgctcaagtaaatttcttgcattcatagttacgtctggacttttatgagttatacttagagtgtaaagtaaaaaaggttcacacaaaggactctttgtttttgtagcttggttaaaataatgaggaccgtaagttttaaatatttttgaaatgcctataccttgttcttgttactacacagcactgaacatatctaataacagaataacctccttattcgtgttgtatagaaaaagtgagcaaaaaatgatccatgacaactacttctatgatgggacaagagctctatttgtgtttaaccaaactctcttttcttacagaggaatatcgtagactgtgcctggatggtcttccgatgggtggcattccagggagctcggtttctaggcctgggggcacggggagcaacggcaatggctatggccccggtggaacaggcttcctccccatccctggagacaatggcttttctccgggtgttgggggagctggagtaggagctgggggacagggacccatcatcacgggactaagtaagtaatcacacttcctgcacattcttgagttctcagccttacgtgatactatatcagctaacacgtgtgtgtgtgtgtgtgtgtgtgtgtgtgtgtgtgtgtgtgtgtgtgtgtgtatgtaccaatattaatttaagaaaatttggtaggaaagcattttatctattcctcacaccttttgataaatcggaacaaatgcgtgacctaggctcttccaaaatacaaatgcgagtccaagaatatccgatctagatgacatcactgcaaagcacatttgggtcttggtggagttcgttcatctggcctatttcactgctccactcatatactgcttggattatatcccaagaccgggtctcaagggagagaaagcaagccccgctctgtgcctctcccagcattctaaagtacacatcttctctaccacacactttgccattgttgtcaaattgcttgaaactgagaaccgtgggctccagagtggaattggtgcccgattgcttgacgtttaagcccactctttcaaaagcacagttcttgataatattttataatgtcccactgtgctatgtttattctttctggcatactgcctacttgctacatctaaatattcaacaagttccaaaaaaaaaaaaaaaaaaaaggaaagcactcaaacgtatggaagaacattcctgacatttttcaaaaagacacaagcaaagtttccagatgtgtgacttacagatgcaacttcaggcctgtgcctcaagtatttatttttaagatcctccatacaaaagcttaatagaaaatgtgaggctcacaaagaatgactacgagaaaagtatacatgtatatttttcataaccccccaaattgaaaaatataatttaataaaatacagagtaatgcaggcttctgatacaaatttaattaatttctattaaacttctaaaaaaattagtttgcatatataatacatgttgtaatgaccctgtatgctttgtttcaactttccgtagcaattctcaaccagacaatagacatctgtaagcaccatgccaatctctgtttgaatggacggtgcatacctactgtttctagctacagatgcgagtgtaatatgggctacaagcaggatgctaatggagattgtataggtaagttcacattctttaagccttctccatctttctttagttagctgggagcccatacaaacaaatggggctgaatacaaatgtttaaggtctgttgaagtaaaaggaatttctgtgctgttttcctgccactctctgcagcctggggccccttaactggttgctgcccttatatcccatcaaaaattccccatcccttcttttcctagaggtaatttctgtctcatgtttctttagagagttgcctatccttaatatgaattaaaattttaaagtgaatgtatttagaaaacaatattcattcaatccatccaaggtgacaatggacaacgaactataaatatttaaatattttggtttaaagtcttgagaagtactgggtttgactgtatgactgcaaacattaacatcacttcttcatcctctttgtcttcatccacttcctccttctactcctccttccttgtgtgtgttttgtttgttttggtttttgtagtcattgttttgatttggttttggttggttgggtttaggttttcttttgtagttgttgttttattttgttttgggattttgtgcagtttggagaggggtctgattttttttttaagacaaggtctctctttgtagccctaacagtcctagaactcactacatagaccagaatggcatcaaactcacagaaatccacctgcctctgctgcccactgagtgctgagattaaaggaatacattaccaccgccaacaattattaattccttagatactgacgggctatatctaacaaatacagagggctttgggtatagctcagcaggtaaagtgttgactatgtaaacatgaagagttcagatccctggatgtgcacatgagaagcagagaagtgtgtgtctgtaatcccagcaatggggaagcagacacgggaggattcctgggacctgctggtcaactggtctaccctaccagtgatgtccagattcaataagaataactatcaatggagaataattgtgagcgacagggatattcaatctttggcttctatgcacatccgcatatatgaatgcccacacagagagaataaccataaataaaatgttttaaaatataataacagaagcaagagagacggcttagcagttaagagacttcctgcttttccagagggcctacatttggtgcccagggcccttgtcaagtagctcacaatctgcctgtaactccagttccaggggatctgacagcctgttcagtccttgacaggcactcattcacatgtggcatacattacacacacacacacacacacacacacacacacacacacacattatttaaaaataaaaatctaaagctaatttaaataacaatataaatattgcatatcgatgtaagtaccacatgcatgtgtaaaaattgcatattctaaagtaaatgaaagtgtactgctaattcaaaaaataaaaaagtgtattctctgtgtcagtattattcagcttggtaagttgtttgagctggacagtataataaactcaacatttagtcataaaaatccccataaataaaatacttgagaagggagaggacgtcttgaaggctttcagaatgttgtgaatcttctctactatttcattcaaggccggtgagtggtgatgcatagatcttatctgtaatgtggaaacatcaacaaacctgctgtgtgttgtgctgagtccactgaccccttttgtgtattgagtgaagtttgtaatgtgccttggatctcaccagagatagaacggctccctgtgttacaagtgattccacagtcaagatatttcaccattattttaaacagcaaaaacagaggctgaagagatggctcagtggttaagaacactgactgctcttccagaggtcctgagttcaaatcccagcacccacatggtggctcacaaccatctgtaatgggatctgatgccttctggtgtgtctgaagacagccacagtgtactcacattaaaatcaatcgatcaaaaaataaataaataaataaatctttaaaaaataaacgaataaaatacatcaatctatttttaaaaaaaccaaacagaacaaaaatctgaaaacccacatatatatatatatatatatatatatatatatatatatatatatattatcaccttcagactcattacaaactctgttacacttttagaaaattggcagtattactttttaattctgccacagtaaaaacttaaataccaaaccctgacctgtaaatgagctttctaaaatctctaaggaaagcgatgcatatgaccctttaccatcaactaggctttttaaaaatttccttaaagggacaggttcttgtttttcttcaagaaactgacaaattcacacatttgaagagctgtcatttgcatggcagctaatctttgagtaaaaatagcattctgtgataaaatgtggcttaccaatgtgcagtgttgcaccaattcatttctgagacacgtgtggtacttcagtcagcaatggtgtgtaacatgcatcgctgtcatcagagattttagaaagcacattggcaggtcagggtttagtatgatgagttttcactgtcacaaatgaagccctttgctgaacctggcttttctttgcactactgtcctgtgtatccttggtaatgtggcttccatttgtgttcaggtatttgtgcttaaagcaccgctttgtcctgtatcacagaaaatgtccccacagtgaaaaaggcagtggcatcaagtggttatgataacactctttaaagatttatttattcttatatgcattggtgttctgcctacatgtctgtgtgaaggtgtcaggtctcctggaactggagtgacagacaattgtgagctgccatgtgggtgctgggaattgaacttgagtcctctggaaaaacagtcaatactccttaccactgagccatttctccaaccccatgaaaaagaaacgttttaattgtgtttctgaaatcccagtgacttccaggagcccatagaccaaatcttgagaccagttgttatagagaatccccaactttgccctgaaccatgtatgaaccagcctttaccagtgctgtgattaatggcgtgtgcctataagccattttctcacaaaccaaaaagtagtcttggagggtctggtgtttctaaattctatctatttgatttagagttatggatggtgacatgatagtaaaatggaagccaatgtgggacctctagaagcaggctctacagtagctgggatcatgatctcttgataaatccgaatttccttggggctttaaaaaaaaagccacactcagcacatctgcctgtccctgctcaagttctgaaccactagagagaaacacatatgtttctctcatatgttgttgtacagatactgaaaattacatctccatgtgttgtatagtctccacatttgggcttaccaaggctgaagtcctgaagaagtcggccatacttttatatattagtcaaaggtgtatttacttgtccaaatttatactcatgcctgcagaggccaacaaggctcactgaaggctttgggttctcccagttgatttatctttgcagacaccactccttgatcttcatcctgcagaagccattggcatgactgttgctcacatcatggaacgatggtacaagagaccacatccaaccagttgccctggagttgagtttgataagtttaacattgtagggcctgatatgttaggcactaggaaggaagggttcttgttttatctcctattacttctgcctaatgtggtgtggagactgtatatctgcataacttaatatgttgggggaagcccagagcttctgcactttgcccaattacacatggctgcactttagattcatcattcagtccttcagcaaggaaacctcaccaggattctccttcacactattataattcacagccatagcttaacaatgaagcccatattcaggaaaaaaaaaggagttttcagtcttttcatgcctttctggtgtcagcttttaaccattttgagttcatgaggaacaagttattctgttagaaaaaaaaaaaaacttactttagtactcatgataaaaatggtacctgcttaaaatatgccagtgttttgaggagtgataaactgacttttatctgagaacttctttacatgcttgctaaagacataaatcatatgttaaacattaaaaaacaaagcacataaacattaaaagcaagaaaaccagagcttgacccttatttcttccataagaatttctcctgggtcctgagaacagttacattccctcccgtatttctcttcttctcttgttcttctgttaacatgaaattcggcaatgcctagtgcctgtctttaaataaatatttaaactcgtggtgtctgaaattttaataactttaataatcatttttttcatgattcttttcatttgttttcagagtcttaggattcccatgaacttaacactactgagtccttaatggaatcgtagaaagaaaggaaggaaggaagaaagaaaggaaggaaggaaggaaggaagaaagaaagaaagaaagaaagaaagaaaggaagaaagaaagagagagaaagacccaaaatatagtgactataacagtcgttgtctctgtccctgttcctttaaggtagatgtgatcactttgcggtactggagtgtgaggcacatcatgcagaagaggcatggaatgcagggttcagaagataaggctggggatttgtggtcactctaaatccaaatctctagctgccagggctggaacttaccgttggagtgccagcctacatgcttgaggccatggacctgattcccagaactaccaaagataaataaaaaggaaagctaaatatcccgatcctgttaaacacacagaaagaaagaaaccgagcttaaagggctcttggaattataaagcaactcaattaatttgctggtgaggaactaaaaatatcagtgagtgagtggatacagcctattggtcagctggacccttgtagaagactaaggagagagctttgataacactgaatgaccagggggtgggaagagttgtcatggcaacaggaagccatgggggtgggttcttaagagagaaagatgtgctgagtgacactgtagattcttccatttttccatggccccctagacaggtgacctggtggggggcgtgggggaggttggttgcttgctctcttagagacttcatttaaacacagtttaacactgggctttcaacaagagacagccatgaatcacatttaattgttgggcttcaacggtgcacatctagataaccgaggtgatttttagcagtgcaaagcagaggtgcggtttcattgtggaaagcgctcagattgtacctgatgtgtttgctaatgctctaaactctctcttcccccttctgctccattcctttggctcagtagaattgatgtatcaaccaaaagtgtcaatgtaagtgagtcttaaggggctgaaagggccctgggatgaataaaaaaaacgcacttaatcctgttagactttgctgtcttaattgtattcaccgcgaggttttgttttgccctccccctcctttaccagagagggtgtaattgcagtccctcagcaagtttatagaaatgaggctggtgtgtgtgagagagcgcagtccctctggcagaaacatctgtgagaggagcaatctgtttattaacatggtcaccctgggttgactgcattgttctttcctgcagtctagctaaaattgtaatgctaatggattctacatgggcctgagatggcaaaacagtatggcagcttttttaacttgccagcattcagaatattacctagtgggcatgtctaagaaaagagaggttcaatgcacactggcccagtgattttacctgggatttgcctggtcagatttgttcagtctagtctttggttttacaaacccaatgtaatggattcgaatttaactacgcctaaggagaccttacatggaaacttccaacttactctggtttcagatcagctaataattgcatcagattttattttctgtgaaaaacaaaaatcctcagagccaatcttaagactcttaggagatctaaagttaatcggggggggggggggggaatcgctgtttaattggtttttgttgtctgtatactttatgtttgttactgcaaaataaaacctcggtgaatatatctagctgtttatgtataaacaagtctgcaacagcgtaacaaagaaactccgtagtccatcagttcctttatttaaaactaacagtattgaccacatgtagtgtgtgtgtgtgtgtgtgtgtgtgtggtgtgtgtgtgtgtgtgtgtgtgtgtgtgtgtgtgtgtgtgagtgtgtgtgtatgtgtgtatgtgtgtgtctttacaaaccatccattgttcacatgatattgtccaaggccttaggctattaacttgcctagattgctgtagctgctgagtgttattgtctgctggaactcacagttgttgcttttcgaggcctgtgcccttaatcactgggcattattccagctgggaaaaannnnnnnnnnnnnnnnnnnnnnnnnnnnnnnnnnnnnnnnnnnnnnnnnnnnnnnnnnnnnnnnnnnnnnnnnnnnnnnncaaattggactctgtgtgtatttgatgaaaggaattttcattcatttataaatactctgctatttagactattaccacggcctggccttctctcaagtttaggaggctaaatgcactttaaacaaacatttctacaaattgagtgacgtctgtaatggtttcttttgctgctcgcatatgttgatgaatgtacatccaatccctgcagtaatggagattgtgttaacacacctggatcctattactgtaaatgtcacgctggattccagaggactcctacgaaacaagcgtgcatcggtaagacagggattgtgtgcggaaacggcttctctgtgaagtagagtcagcaaggctgttgaagttaaagggaacttattaaaatgagacagggattagctaagcactgttacgttgtggaattgttttaggacgctcttgaagaatctcccattaaacataagtaccgggtgcgtgtataatccaggagatgtcgcatctggctcctaaactctttagtctgctttctttgcctataaagcacggcttcctttctccaaatgacgtcagcattgccgttcactgaatttaagatttatagtcattttcaactactgggtttttaaaaaaaatttattagatattttcttcatttacatttcaaatgctataccctccccccccaaccccagccctgctcccctacccacccactttttggccctggcgttcccctgtactggggcatataaagtttgtaagaccaaggggcctctcttcccaatgatggctgactaggccatcttcttacgccgtactcacaatccagcacctaatctttccttgtctgtattcagtctcattgcttcccccaccaacatcacccaaaacctacctccctgctgactcattgcagaaaccctttaccagaccagttcagttgttttccgtttcctgttcatccgcacactgttaggtgcctggatggactttctcaggcagttgtccttgtattgccctgaaaccagaaattcctcagtttccttcactgacccagcattgagttctgactttaaggcctttgtccactatgccaaaaaaacagctgcctcgataattctagcctcctcctacctgctcttaggctaaccgcaccccatgttcttttccctgtctttccctcttcatccactatctggtaaggaaaaagaaaatgcttacattttctatccaaaaggaaaagctagtgagaggtgaggatgttgcatcatcgtagacatcacgtgactatttcaaattgcatgcattattttactgttccttcaacacgcatgacaaagaaagactgtttggctctctttaaccttgtcagatatcgatgagtgcatccagaatggagttctgtgtaagaatggccgatgtgtgaacacagatggcagtttccagtgcatttgtaatgctggctttgaattaaccacagacggaaaaaactgtgttggtatggaatttctcttcccttggaaaaaaagacttctagaagatatacattttatttagagccacatagaggatgcctacaaggcttccatttctcatgggtgtaagaaagttggtcacattacctaggcaaataaaatatgaaagcatttgacatgaccagaaacttaaagtgtcagaattagtgagcaatgaatgctacagccacacataattcatgacttgctgcatttttcctatgctgtgcatatttaaatatacatagcagttattctccagcaatgtgctggattttcttttttttttttttttccattttttattaggtatttaactcatttacatttccaatgctataccaaaagtcccccatatccacccacccccactcccctgcccacccactccccctttttggccctggtattcccctgtactggggcatataaagtttgcaaatccaatgggcctctctttccagtgatggccgactaggccatcttttgatatatatgcagctagagtcaagagctccggggtactggttagctcataatgttgttccacctatagggttgcagatccctttagctccttggctactttctctagctcctccattgggagccctatgatccatccattagctgactgtgagcatccacttctgtgtttgctgggccccggcatagtctcacaagagacagctacatctgcgtcctttcaataaaatcttgctagtgtatgcaatggtgtcagcgtttggatgctgattatggggtggatccctggctatggcagtctctacatggtccatcctttcatctcagctccaaactccgtctctgtaactccttccatgggtgttttgttcccaaatctaaggaggggcatagtgtccacacttcagtcttcattctccttgagtttcatgtgtttagcaaattatatcttatatcttgggtatcctaggtttggggctaatatccacttatcagtgaatacatattgtgtgagtttctttgtgaatgtgttacctcactgaggatgatgccctccaggtccatccatttggctaggaatttcataaattcattctttttaatagctgagtagtactccattgtgtagatgtaccacattttctgtatccattcctctgttgaggggcatcnnnnnnnnnnnnnnnnnnnnnnnnnnnnnnnnnnnnnnnnnnnnnnnnnnnnnnnnnnnnnnnnnnnnnnnnnnnnnnnnnnnnnnnnnnnnnnnnnnnnnnnnnnnnnnnnnnnnnnnnnnnnnnnnnnnnnnnnnnnnnnnnnnnnnnnnnnnnnnnnnnnnnnnnnnnnnnnnnnnnnnnnnnnnnnnnnnnnnnnnnnnnnnnnnnnnnnnnnnnnnnnnnnnnnnnnnnnnnnnnnnnnnnnnnnnnnnnnnnnnnnnnnnnnnnnnnnnnnnnnnnnnnnnnnnnnnnnnnnnnnnnnnnnnnnnnnnnnnnnnnnnnnnnnnnnnnnnnnnnnnnnnnnnnnnnnnnnnnnnnnnnnnnnnnnnnnnnnnnnnnnnnnnnnnnnnnnnnnnnnnnnnnnnnnnnnnnnnnnnnnnnnnnnnnnnnnnnnnnnnnnnnnnnnnnnnnnnnnnnnnnnnnnnnnnnnnnnnnnnnnnnnnnnnnnnnnnnnnnnnnnnnnnnnnnnnnnnnnnnnnnnnnnnnnnnnnnnnnnnnnnnnnnnnnnnnnnnnnnnnnnnnnnnnnnnnnnnnnnnnnnnnnnnnnnnnnnnnnnnnnnnnnnnnnnnnnnnnnnnnnnnnnnnnnnnnnnnnnnnnnnnnnnnnnnnnnnnnnnnnnnnnnnnnnnnnnnnnnnnnnnnnnnnnnnnnnnnnnnnnnnnnnnnnnnnnnnnnnnnnnnnnnnnnnnnnnnnnnnnnnnnnnnnnnnnnnnnnnnnnnnnnnnnnnnnnnnnnnnnnnnnnnnnnnnnnnnnnnnnnnnnnnnnnnnnnnnnnnnnnnnnnnnnnnnnnnnnnnnnnnnnnnnnnnnnnnnnnnnnnnnnnnnnnnnnnnnnnnnnnnnnnnnnnnnnnnnnnnnnnnnnnnnnnnnnnnnnnnnnnnnnnnnnnnnnnnnnnnnnnnnnnnnnnnnnnnnnnnnnnnnnnnnnnnnnnnnnnnnnnnnnnnnnnnnnnnnnnnnnnnnnnnnnnnnnnnnnnnnnnnnnnnnnnnnnnnnnnnnnnnnnnnnnnnnnnnnnnnnnnnnnnnnnnnnnnnnnnnnnnnnnnnnnnnnnnnnnnnnnnnnnnnnnnnnnnnnnnnnnnnnnnnnnnnnnnnnnnnnnnnnnnnnnnnnnnnnnnnnnnnnnnnnnnnnnnnnnnnnnnnnnnnnnnnnnnnnnnnnnnnnnnnnnnnnnnnnnnnnnnnnnnnnnnnnnnnnnnnnnnnnnnnnnnnnnnnnnnnnnnnnnnnnnnnnnnnnnnnnnnnnnnnnnnnnnnnnnnnnnnnnnnnnnnnnnnnnnnnnnnnnnnnnnnnnnnnnnnnnnnnnnnnnnnnnnnnnnnnnnnnnnnnnnnnnnnnnnnnnnnnnnnnnnnnnnnnnnnnnnnnnnnnnnnnnnnnnnnnnnnnnnnnnnnnnnnnnnnnnnnnnnnnnnnnnnnnnnnnnnnnnnnnnnnnnnnnnnnnnnnnnnnnnnnnnnnnnnnnnnnnnnnnnnnnnnnnnnnnnnnnnnnnnnnnnnnnnnnnnnnnnnnnnnnnnnnnnnnnnnnnnnnnnnnnnnnnnnnnnnnnnnnnnnnnnnnnnnnnnnnnnnnnnnnnnnnnnnnnnnnnnnnnnnnnnnnnnnnnnnnnnnnnnnnnnnnnnnnnnnnnnnnnnnnnnnnnnnnnnnnnnnnnnnnnnnnnnnnnnnnnnnnnnnnnnnnnnnnnnnnnnnnnnnnnnnnnnnnnnnnnnnnnnnnnnnnnnnnnnnnnnnnnnnnnnnnnnnnnnnnnnnnnnnnnnnnnnnnnnnnnnnnnnnnnnnnnnnnnnnnnnnnnnnnnnnnnnnnnnnnnnnnnnnnnnnnnnnnnnnnnnnnnnnnnnnnnnnnnnnnnnnnnnnnnnnnnnnnnnnnnnnnnnnnnnnnnnnnnnnnnnnnnnnnnnnnnnnnnnnnnnnnnnnnnnnnnnnnnnnnnnnnnnnnnnnnnnnnnnnnnnnnnnnnnnnnnnnnnnnnnnnnnnnnnnnnnnnnnnnnnnnnnnnnnnnnnnnnnnnnnnnnnnnnnnnnnnnnnnnnnnnnnnnnnnnnnnnnnnnnnnnnnnnnnnnnnnnnnnnnnnnnnnnnnnnnnnnnnnnnnnnnnnnnnnnnnnnnnnnnnnnnnnnnnnnnnnnnnnnnnnnnnnnnnnnnnnnnnnnnnnnnnnnnnnnnnnnnnnnnnnnnnnnnnnnnnnnnnnnnnnnnnnnnnnnnnnnnnnnnnnnnnnnnnnnnnnnnnnnnnnnnnnnnnnnnnnnnnnnnnnnnnnnnnnnnnnnnnnnnnnnnnnnnnnnnnnnnnnnnnnnnnnnnnnnnnnnnnnnnnnnnnnnnnnnnnnnnnnnnnnnnnnnnnnnnnnnnnnnnnnnnnnnnnnnnnnnnnnnnnnnnnnnnnnnnnnnnnnnnnnnnnnnnnnnnnnnnnnnnnnnnnnnnnnnnnnnnnnnnnnnnnnnnnnnnnnnnnnnnnnnnnnnnnnnnnnnnnnnnnnnnnnnnnnnnnnnnnnnnnnnnnnnnnnnnnnnnnnnnnnnnnnnnnnnnnnnnnnnnnnnnnnnnnnnnnnnnnnnnnnnnnnnnnnnnnnnnnnnnnnnnnnnnnnnnnnnnnnnnnnnnnnnnnnnnnnnnnnnnnnnnnnnnnnnnnnnnnnnnnnnnnnnnnnnnnnnnnnnnnnnnnnnnnnnnnnnnnnnnnnnnnnnnnnnnnnnnnnnnnnnnnnnnnnnnnnnnnnnnnnnnnnnnnnnnnnnnnnnnnnnnnnnnnnnnnnnnnnnnnnnnnnnnnnnnnnnnnnnnnnnnnnnnnnnnnnnnnnnnnnnnnnnnnnnnnnnnnnnnnnnnnnnnnnnnnnnnnnnnnnnnnnnnnnnnnnnnnnnnnnnnnnnnnnnnnnnnnnnnnnnnnnnnnnnnnnnnnnnnnnnnnnnnnnnnnnnnnnnnnnnnnnnnnnnaagccacatagaggatgcctacaaggcttccatttctaatgggtgtaaaaaagttggtcacattacctaggcaaataaaatatgaaagcatttgacatgaccagaaacttaaagtgtcaaaattagtgagcaatgaatgctacagccacacataattcatgacttgctgcatttttcctatgctgtgcatatttaaatatacatagcagttattctccagcaatgtgctggattttcgatgccatggtcctaacactggcaatttagagaaatttgggggaatgtggcaattttgatatctgttgtaactgaatctcttgataggttggcatgcttagttgagtaatcgatgccaaaagagatgtggaactcatacactcactaagaaaagtgcagatcattccacctgcgaggaggctctcggagctttttaattccattgtaaatgtgacacccactgggaactaaaagaccaaggatgctaatacagtcttaagatttattccttgccttgacattcactatactgaaggaccttcaagcagccacactacttgtgatcatgcactagacatccttatttttaaaattgaaataaacaggcagtcagccccgaaaacacatacagacaagcagcagtgtgcagagtgaacaggttgtatttatgtgtttaggaacatcgacagtaaatgggaaaagaggcaatgggtttgaaagagagcaaggaaaggacacatggaggaaagggcggggagagtgggaaggggagggagaaatgatgtaactataatctcaaagctaaataatttttaaagcatgaaatagtacccacaaggacaggattcctacggagataggtttgactgtagactatggaaggagaggcgtggttctcttgaggccaggggtcaagatcactgtgtctttctgccacagaccatgatgaatgtacaacgaccaacatgtgcttgaatggaatgtgtatcaacgaagatggcagcttcaagtgcgtgtgcaagccaggcttcgtcctggctccaaacggccgctactgcacaggtatgtatagctttgaggtaagaaagccaccatgactcacacagggcccttggctcatgcacaagtatactcagtatctcagtttgatgctactcattatctcttgctagtttagtaaggcagatgtctaaagtttcctaaggaaatatatattgttgagaaataactgtgtctttgcaaagtaataatggtatatgaaaaaaattaaaggaatggcagattgatttaattaagtctgaaggagacaatacagaaacaatgtcttcctgcttgttggctaaatgagcaagagtaatcaaatgcccttgcaaacttttcatttttgtatttctccaggatcggatttttctaaggtcatttttatgggcacagtatctcatatattccatagagctgatctgcagattctttgggaacatatcatcaatctaatttcatcttaatttcattaagtggagacataatttgagtgttttcattagctattttgtttatgaagcaattttggagaccaaataatttcaataaatagaacccccctggaaatactgtatgatgttcatactcacaagcggagctttgtaacatggaacatgttttgtggtttttgtcttggaagcaagcttttatttttatttcagtttcctccctcagaggaaatcaactttctgcctccagtttcaccagtctacctgaataaattaagattccttaccaagtcctatgacttcattaacatcccaggggcagtcgggatacaaagtggtacaagtttatatatagcagatagcttttgactttgcaaagaagggaactataaagtggactgggagagctacagctttggactcaaggtcagttgactgagatttagcacaggataggtgaccaccattgtactgcacaccagtttggaacttcacttgagagtttcttgggaaagttgaatgcccgtatcagatgcctggcttaacccttcctccctcctggggtttattcttcatcagctttcttactacaaatgttagaatccgtgggtcttgacttagcacttctgtatctgaggtgtgcctccgttgttgagaatctccttaatgttgggcagcttttgataaatacaagcagaatggaaattacaaggcaaatctcaacttttgttgttgttaatatgaaatgttcaaattgatgtcaaagcagaatctactcatgtgtgaagaaaattgtaaaacttggccacagatctgaagaggtttacttcacttcatttgaattagacaatattcacaaggttatcaaagagataatagaagtcgtgagactcttttttcccccctcaacgcatagagcagattttactcagcctttaccaaatgcgcttgctaggactgtattattgtagaggtcagtttgcatttgtgtgtaacactctacaagttactcagttaaaaggttgataggctagggcagttcagcaagcaaagtctgatactcagtaatggaccagcttctgcccccccccccccgggcagacgtggacgaatgccagaccccaggaatctgcatgaacgggcactgcatcaacaacgaaggatccttccgctgtgactgtcctcccggcctggctgtgggtgtggacggacgtgtatgtgttggtaagtgaggtcttcaataatggcccgatggtcccaagtgatctctgaaaacataaaatgggatatgtctacacaaaggaatagtatttgaccacaaacagaaggcatgcaaagacacgggtaagacttctctctcatgccaagtgagaggtgtcagtcacaaaaaggtgacattatattgtgttggatgttgttcagaggaaatggccagagaggccaagctgcatgcatttaatatgattgctgagcgcaagaggaggaaatgttagctaaataaagaacatgcaaatgttcctaaaacccactgtgagtgtaaacactcttaaaatgtagagttcccatgggtaaattttatggcgtataagttatatctcaataaaactgttttataacaccgaaaccctaaacttactcttttcaaagcttctgatggtatacaaagaaatggagttctgtgttcagtgggtgtttgtgttgttattaaccacggcatatgtaattgggggttacagttacatgcgtgtaaactctttttctcaaataaagcctgaagcatgaggaactcattctgtagaagtgtactaatatctaaagcttaaagtattcaagagtattcctcaccaccacgaagggagactatgagaccaaatgcacattttactctaagccactctgaactccctttggaaacacctgctgaatggatggcatgaaaatgaatctaaagggccatgagttggcgttgaaaaagcgtgtggagctttgaggggctgtgggcactccaagacctaagcagtaatgcttcggtgatgacagagagaagttaggaagatatgttaacagggtttccccttctaagcgcttctgtgagacttcagggatgggttggtccttttcatgccctctggatttcagcttatgcaggaagacagcaaggctggtttgaaggcacatttgagaaaaaggaaattcttagccatcacatttaaatactttacgtgtaactctcgaattccaggaggggtaaggagggacaaggaagggtgggcagatggaaatcatctgttctctcaaattcatcctccgcccagctgaggctccatcccagcctgcaggttgtcagcgctttgtccaggggaatttcaaacagaggccctagaagaatgtagctccttcctgtgtggaaagcccaagaagaatttttcagttgccttaaactatctagttgcttttcatctacacctaaatgattccgttgaaatcgaaagtgaacataaagctggtttaggatggagaaattattatttttttccttccaagcagccagtttatgagcatttatcacaaaactgatgttcaaaaccaagacttgattcttttctccacatgcctggaacacatcagaaacctttggaatgcttttgtgaacttttttgtccttgtggcaatttcaacattttaacatagagcatcatttttccgtgtggaaagttatatattgctattctgatactaagggagatttcatcagtcctcccaataaacagcgagaactgtcccttgttaccttaggaagaagtcaggcctatgtcttgttggaattggctctttaacagaggtttctttaattatatctttcttcctaaaagaattgagatttaaaaaaaacactttcataaaattaagcgatggttttagcatactgaagagccatggctcacagtgtaaacaggagacaaaacgaatgtttccctaccatccccacccctttacactattttgtagttgtttcaggagacagagaagatcccataatgaaagaagaaaagtcaggttatcccctaacttagcatttaggtaacaaaaaattccatgaagattttatttaatgggagagatccaaatcttgacattagaatgttcactagcacatgataattaacattcctgggttttaaataataaacacccttccaagctcagctcttcagtgagtgatggtgaaggcagggatgctttgtgttattagagtcaccctaggatggctttgcaaatatttaaagtcaccttgtgcgcctgccacatggagccctttcttcatgtgacccagtccatagacatatcatcctctgccctctgtcttccttacccacatccactgtgacccgaggctacctccttccaccatctgttcattgctgacacagtgggtaccatagcactggacctgactcttaaactgaataaaaagcccttccagggatcccatgggactcttttagtcttgataagatttaagtaaaaagaacttcaatttataacccagattatgcacttaacctttttaaataaacattcttttaagagtcagctacctagattatagatagataagtagatagatagatagatagatagatagatagatagatagatagatgatagatagatagatagatagatagatagatagatagacagatagacagatagacagatagataaacagatgacagatagatagacagaaaggcagacagatccttgactttgggcagatatgagagatctgcattaaattctctatattcaggatgggatctcaaatttatcttacctattgaaaaatttttagttaaatttcattttcagcaggttccttgaaacactagctttagaacattttatcatgttcccaagtcctaatatatttctttatagaaagttcacgttcacctcattactggttttgttgtttactatctatgtgctattggacaaggtatagaccctccaaaaaaaaaaaaaagcaacaacaacaacaaaaacaaaaagaacaaaaaaacccctccttccctcagtagctctgttgattaaatatgttattgctacatacttcacctatgtaaagcattgtacagtgtcagctcagagcaaacagataataagaaaacaatactggagagatgacccagtgatcaatagtacatagaactcttacagaagacccaactttgatttctagcaaaatcaaaggagattgtggtttttgtcaagtcacaatctcctgtgactccagacccaaggtatctgatatcttcctctggcttcatgggcacctgaacttatgtgtgtacgtgcacatgcaaattaaaaataaaaaatcttatttaaaagaaaaatagtactttttatttggataaaataatggtgtcatatctagtgtgagtcttaagagttgctgttttatgtagtgaagttgacaataacaagcaagtaatacaaaattagtattctgcatccatatgtattttgctactggcttctagaatttgctaatatactggttaaaaaaattctcaaaataatctcattttaaagaaaagataacatgctgaaatgcaatattatatgtaaaagatatgtatacctttagtgtatattaaagtatatatgtatacatatatcatgttaaatgcatatattactctggtccacacagtttccaccccagtcttgtgagtgcattctcgtagctcactgctggtattcgtctttcctattgtgactcggttacatgattagggaaatatgaactgaagttctatcttggggtccttgatcataatactgtccttgccaaagatcaaagaaatagggttgctaccccttagggctttgattttctgagtgatatttggtacctcacttaatgtttaactagcattcctgtttactttataaactacttcactgataagcaaagtgtgtagtaatctgagatagaccatctaatggagatctgaattcaggattggtgtggtcctaggcccacacaagaattatgctgctttctttcttggggaccttcttgtgtcaacggctttcagtaacttagtcaaccacacaaacttgtgtgtaatgcttttgttcctgtagtagattccacagctttttgcctacttgcttttattctttcattttatattttgactggtttagatttgtttgctcattatttttaccttcatatgtgtgagcctgggtgagcttatgtgtaccatgcatgttcaggagctctctaaaacaggtgaaggtgccagatcccctggaattgaagttaatttttcatgagggttgtggaaactggactggggtcctccacaaaagctgtaagttccattagatactgaatcatgtccccagcccagtcaacttgcttttgaaaagctgtacactgtatgttcttgttctgaaagcagcagtaacattgactacactaatccctccccaagcgctcacagaaatcctactttaagtcaaaactgtgtttctctggattagaatgataaactcgggaccctcttgtatgtggctatatgaacatctcagaagttaatggagctgtgaatctaatacatttcatggataaaaactacttgagcataagaaagcattagaaaccgggcagtggtggcacatgcctttaatcccagcaattgggaggcagaggcaggttctgagttcaaggccagcctggtctacagagtgagttccaggacagccagggtacacagagaaaccctgtctggaaaaaaaaacaaaagaaagaaagaaagaaagagagatagagagagaaagaaagaaagaaagaaagaaagaaagaaagaaagaaagaaaagaaagagaaagagagaaagaaaggaagaaagaaagaaggaaggaaagaaagaaagaaagaaagaaagaaagaaagaaagaaagaaagaaagaaagaaagaaagaaagaaagaaaggaaggaaggaaggaaggaaggaaggaaggaagaaagcaagcaagcattagaagacacatgctaagaaacagatacttgtttctaacaacttatcaacaatgtaacaatgttagggacttacaatggggactatctctgatgaaattgaccatgttctcctgcttagaaactttgctgactctctggcctttaagatgttcagaatttaaaaaaaaatagttcattgttgactccctcgtaaaactgtaacatatttcataagactagagagtgagggagtgaactactgcaggatttttaggggtgtggattggcataaagggagaagaggcaccttaggagtcactcaaacctaccgtgaatccaaacttgggtctttgagagtttgtaactttgattttttacctattcttcttcagcttgagtgacctctttcatgaggccatgtctgcatagccccttagtacagtgccagagagagagaggttgttttctttttcttatgtttgtttgtatcttaaatggctgttttggtttggtttggttttctacaacaaaacaccatgatcaaaacagcaaattgtggaagaaaggtttttttttttttttttttttttcagcttacacttctaagttgctgttcatcaacaaaagaaagtcaggacaggaactcaaacagagcagaaacctggtggcaagagctgatgcagaggccacagaggggtgctgcctactggattgctccccctggtttgctcatctcagggctaccagctcagggatggcaccacccacaatgggctggcctatgctccattgatcactaattgagaaaatgtgttatggctggatttcatggaggcatttcctcaactaacactcttcctctctgatgactctagcttgtgttcagttggcaaaaatttacccagtgcagtctttgtataaagacaggttgtcactatgtagctggcccagaactctgtggaccaagtgagccttgaacacacagagatcttcctgtctctgcctcctgagtgctgggattaagggcatgtgccaccgtgcccagctgctcattttctaaagtgtaattcttaattgagttgggatatgggaggagattaaaaacatagtcaccagcatcgtcctggggttgaaaagaaagacttcctaatttaagaagtcaaagcaaataatctcctaggcacctctcagttgcttcaaggcagtttatctgcatcgctccttagaagttctcaaatagaaacaagagtgcagtgccaggcgtggccaggacacggtgaggttaaagctcaaagtagtgatgtttgactgttgctatatcctcagccaatgaaacatctgtgagaatagtggggtaatggacacgtgtgtggcacagagaacttcggatgggtagggctggggaccatagtcgttggtacgttttcaattgtccccttacactacaaacatttgttcatttcctaaccttgaagatgctaaagatgcaaatggcagatgttccctgggcattcccaaggcagtaacctcttaggttaaagaagccttccatttcagtccctgatggtaagtccctttatctccactagacactcatatgcgtagcacctgctacggggaaatcaagaaaggagtgtgtgtgcgtccattcccgggtgcggtgaccaagtctgaatgctgctgtgctaatccagactatggttttggagaaccttgccagccttgccccgctaaaaattcaggtaactgcacatcgtaagaaactagaaactcaacagtaggattgggccaaagattatgtctactacaaaatgatttgtcttctgaattgaagaagaaagagccgggtttacattatcatataagggaggtagtcaaacgtgaacaagatctatttgctgttgtgatggtggcccagattttatacatgactgctaccctggcagtataaataggttgacatcgtacttgccagtattgagcttacaaatacaaaacaatctgattgggtcctttaaactctagacaccttatgatgtcaagcctcaggtccatcaaggttgactcttgttcattgataattgcgatgagcctctttcaaatacaaataagttcagtggggttcaaaaataaacaaactccctgccttttctctaactattcgctgatttcaaattcttgagatgatattctcaggaaagcactgatttttatcattgttaaaatgaatgtacataaaattgttattttaatgactgagttatggaatgggcttagcataacgtctttgtttttactgttatattaatggctgagtgcagagtattgtctaacttttctgtctctattgttatgctaatgagtgggtgtggcgtgggtgtggcttaacatttcctgtttgtttttgatcacacagctgagttccatggcctctgtagcagtggcatcggcatcactgtggatggaagaggtgattctgttcaacttgtgattattaaaatataacggtatagcttgctgattgtcagatgaatgtggttatatttactgtgaaaattcacaagtggataaatggttgttaagttagatggtgttaagtggtgttttccatgtgactgcttttcaatacagacaaatatttattggttaaaagtgcttccttgagaatgttactaacaatccataggcatgattttatgtgcaaattttctaagacggtgctatatcatgtgattatacagacacagttagaaaagtatccatctgtagggatatttgatatggatcaagtcttagacatactatcccaaaattaaattgtttgtgttttggaaacaccaagatgtttctgtcagactgtagaagtaaaattcatttaagttttcttattgcaaacagcgtcatgctgtaagaaacctctgatgggcaagggcatctgtgttgactagaggagaatgtttgatgtgatgttacgttttaaatgagtatctgaaaccaaagagggaggcagaattttgctgggatattttttttcctcagatgcaaaatgaaaagctagataatcagagagtttctaaggacgccttcccaattgctttttcccttttttaagacagagtctcaaagcccaggctggctctgaactcctgattctcctgccctgttcccaggtgctggggttatacaaatgttctatggctaaccaatttttgtaaattctaattcctataaacaatcattatcagaattctgatcacagtaaacaaaattggatttttgtatcacatttttgtcattgannnnnnnnnnnnnnnnnnnnnnnnnnnnnnnnnnnnnnnnnnnnnnnnnnnnnnnnnnnnnnnnnnnnnnnnnnnnnnnnnnnnnnnnnnnnnnnnnnnnnnnnnnnnnnnnnnnnnnnnnnnnnnnnnnnnnnnnnnnnnnnnnnnnnnnnnnnnnnnnnnnnnnnnnnnnnnnnnnnnnnnnnnnnnnnnnnnnnnnnnnnnnnnnnnnnnnnnnnnnnnnnnnnnnnnnnnnnnnnnnnnnnnnnnnnnnnnnnnnnnnnnnnnnnnnnnnnnnnnnnnnnnnnnnnnnnnnnnnnnnnnnnnnnnnnnnnnnnnnnnnnnnnnnnnnnnnnnnnnnnnnnnnnnnnnnnnnnnnnaggagtgagaggaggaagaggattccctgtcaatggcccccgactagagcctattgcctgtttggaaccgtacgtttgtttcacttggattcacaagtgacattgtccctgggagacatggcagtcatgtgcccattgtttgctgtaaatcactggattgtcagcagccatgttttatcatcttctgaatccattctaactcatcaacaatgagaaacactgcgtatcccatgacttagggaattgctaaatatgagaacaaagcaggaacgtcctgtgaccataaaatcatacaggccttcctcataaatttctatgttttaattagatggctgtgatacttattaaattgagttttcccttggattttgagccaacggcctgtaaattttctttattaattttgtcaaaaatatagacatactgcatgacttaattatttggttgctgccaacacctttctttttctctgacttaccagtggagtgtcttgtatccttccattttatttttctttcttttttttttctaaaaggcatattgcagttttcaaagttagatatttcacatgttggaagttccttattagatccctttttatcaacaaacaggtgtctgtgagtgttgaccatgctatattccacacagatattaacgagtgtgccttggaccctgacatatgtgccaatgggatctgtgaaaacctgcgaggcagctaccgctgtaactgcaacagtggctatgaaccagatgcctcaggaagaaattgcattggtaagttactggaggtttatacacaagggccatccatgtcgtctaaccccatggataagagaagaaacaacaattaatgagagcaacttagctcccctcattacctttgcaccatacattgatacagaagcattcgaactgagttttgcagcacagtatcaaactcaatggagtgctattatttaagataagttttacccaaatgagtgaatcatttgcccactgcttctctgtacttattttaatcctacatgtttccactgagacatggacttcaaaaactaacactcttggtaatagtaaagttggggaagggggatgctccaggttagaggaacttcagctttatccagaaaccactaattgccaccaggtgcctaaatatggcagcaaaagtaagtgtatccctttttcaacttataaaagaagataaaaaacaaaacaaaacttctgtgtgatctgcttcgagcagaaggaaagagggaaagattaacacttacagtgctttattggtttatagatttaagagactggaaagaaacaaaattgtcccacaggaaaattgactctattttcacaaaatgagaattattacatcattatatgtaatacttacaaataatttgtaatgctttaaaagccatcaattgatggctgtggataaagaaacttactattctatgtttctgctgctggctttattacccaatctatgcatttgaccttgagtttaagatatatacagatagacttctattactctctgactattgcatatttaaataggttgaacatcagtaggaaagggtaccagccaaagattctcaaacagttctaaaagcatgcaaacatgctagaggaccttgtcgagcactcaggttcaatccctggcaccacagaaaccaaagtgtggtgacacacacctataatccagaccttgagaggcagaaggctcaggaattcagtctcacggctatcgtagtcccaggccagcccgggctggaaatcctgtctcaataaataaataaatatgagctaaaccatcttttattcagcagaagccaaggcacttccagcttagcttctaagttcaggtgagtgtgtgagtgggacccttttaaagccaggggagtcctgtgaacattcccgctccaagcacaggtgacatgtctgtaacactttacactgtgtggtttttgttaaaatgtatacatgatgaagggcctggagagatgtctcagcaattcagagcactggctgctcttccagaggaccagagttcagttcccagcatgtacatggtggttgacatgtgatgccctctgctgacctccctagggactgtacacacgtgccacacattcatgcaggcaggcaaagcacccatacacataaaataaaaatatgtgagccttatcaaatggttgactcatccttttcttacccatttctcaaggaattggactgtacccctcgctaagcatgtgccagagtcctaaagcacaggatgtgacctcattttgggatcacttttatcttttaatatttatttaattttttgagaatttcagatgtgcatactgtggatgttgatcataaccacatcttctgccccttccccagcctcttccacactcaccccttactctctccctccttccaacttcctgccttcctgaaaaatgaatcaacaaataaatggttgagtccactttgtgcttcacatatatgcacgggtgtgtgatcatccgctagagcatggttgactcactgacctactagaggctatacccctcgtagaaaactgactgggtttgtacaattctaatttcaaagtacatattaaaatatctaataaaaattgaattgaaaaaaaaaagtcagactcggagcaaaacggaaaagtggagaaaactcaagcaaaacagaaaggtaattctgcctacagtaacaacatttgaaatcattttctgatctccattttcagtattatcagggtgactctgtatcatttgacaaagtgcaattgttcgcgagagtaaaattagcaaaacgaactctttatcccccaagtagagttactgtttcttccacttggtaattatacttgctgataagaaggcaatgtaacacatgcctgtaatctctgcacactagaagtgaattcaatgccaacctgagagacatagtgaggtctgtttccagtaaaacaaagccaaaaaagaaaagaaggaaggaaggagggagggagggaggcagggagggagggagggagggagggaaggaagagaaggaagaagaaggaaggaaggaaggaaggaaggaaggaatagtgagcaactaaagaagtaatgagcccttgctaagtcctgtgcattttgcaaagtcttgagaagatttttttaaagtattcaccagcataagaacatagcatttgaatagcacgtggtgtgtttgctctagtgtggtctaaagatactgaggcagagaggagagagggagccagggaccaaacaaagaaaagggaagcagaagtggtctgtgcattacgcctttaaccatttccatctcctgtcttccactggctgcttgcagacattgatgaatgcctggttaataggctgctttgtgacaacggcctatgcagaaatacccctggcagttacagctgcacgtgtccccctggctatgtgttccggacggagacagagacctgcgaaggtaaggacagtgttccttgactccggcatgcccttacccaggaagcaccaacatcagtcatagtgaatgagtatgctctaaggacatgtgtgaatgaatgtcttccctattttatgatctctgttcactgctttggaagttcaggaaatggcattcatataaacacagtttataaacaaatgtcagttcgttctgttcacatagtctctcaacaagcacttagaaaaaccaacagatagagccatattgtttgactcgttaaaataaaatatctgattttgttcatttggttcaccctggaaataaaaatcgctgtgacaccttaacctacaaaccttcattccaaaaagactcagttgttagccactttattatgaaatagatggttaacagtgtcaaaatcctgacccggaaaaatatttggagcctatgtgaaactaattccatgatgaaatagatagtctataaaaagtatcatttctgtttgacaagttaaaggatgttatttggatttgttcaatattttaagacttattttatgccatgagtttctatacagtgcaagttgcttgagccagttaacggcttaaggaaatctctggtttcagtgagattcagcttaggacatgagtgcatgaagctatgacatcagtgcataaggctgtgatatcagtgcatgaggctatgacatcatgatttggtatcttgatcacatggtatttcagaataatctgtttcttaactaccattcactctcctcctgtagtttctttacattctgtgggcctgcagggggctcctataatatgctcaaactcagttgctacttccagatacttcgatccttcttagaagggggtataaaacacccatggaaggagttacagagacaaagtgtggaacagagactgaaggaaaggccatccagagactgccccacctggggattcatcccatgtacaatcgcaaaacccagacacaattgtgaatgccaacaagtgcttgctgagaggagcctgatatagctgtctcctgagagagtctgccagtgcctggcaaatacagaagtggatgctcacagccatccattgtatggagcacagggtccccaatgaaggagcgagagaaaggacccaaggagctgaaagggtttgcagctccatagaaggaacaacagtatgaactagctagtatctccagagctccctgggattaaaccaccaaccaaagagtacaaatggtgagactcatggctccagctgcatatgtagcagatgatggcctaatcagtcatcaatgagaggaaagtccttggtcctgtgaaggctctatgccccagtgtaggggaatgccagggccaggaagtgggagtgggtaggttggtgacaaggaagggaggggtatgtggaggggggctttggaggggaaaccaggaaaggggatagcatttgaaatgtaaataaagaaaatatccaataaagaaaaagaaagggaaaaaaaaagaaagttcatattaattattgcagaatacccttcccttttctgtgggtgtacttgttgctcggtgactccacagtcgggaaaagtacaatagcgttaggatgaaaagaagaaggaggaggaggaggaggaggagggnnnnnnnnnnnnnnnnnnnnggttgcatcagcttcatctttaacttcaaagcattcttgtggacacaaacaagttgtattgaacaagatgctgcaacacagaagtctcagctgacgtcaatagaatgcaattacagagcacagttctaagtttgggttgagctgtgtgtgtggagaggaacctttgaaaaacagtaattcaccaaaaggtgtgggggtatgtgtgtggaggaagatagtcatttacgtaaaatcacattttcctaaacttaactgaggtaactgtttacccatggatcctgggtactgagtccatggcccctctctaccagatgctcacagggttccctaagagtgagggcatctgtcagtaaagccagcgcaggctcctcagctatgcatgtgacagttgctatctctggtctctggtctcactcctaacacccattacccttcaacattgctctgaggaaagtttgtctagtcagatttccctgtattgtccctgtccccccacacctaccccacagagggatgtggtaagggattgctggaggtttttggtttgtttgtttcggttttcctgggtattcacactttctgctgcctttagccattgtaccaattcagttctctattaaagggtaggttcgtctaaatctcgggaaacttaaaaagcaagagcagatgagatatcatctcatttagctcagtactgtccattatttggtccgttttcccattctgttgaaaccatacattctggtaatcacttgaggataaagtggaaaccgggtggttggggtctggttccgtgatatatatgcggaattgtcaaagcaggttagatggagtccaaggtactgagaggtggactaccaaacagggacacgacagaatgacatttagtcgtgaaatcttgggtggccacataaatttgaaggaacttccatagcaaatcagccaacaaggaaggttagagagacatcttgacttattttgttcaaaggacacttgctcttaacaaaccatctgtgccattcatgggaaagaagtttgtgttgtataaataaagatgaaataatagagaaatattttggccccaaccttatggtgttggtggacataaaacaaaacaaaacaaaaaaaacagatttacacagaaaacttgctccccccaaattttacattctgttattcgaatttcatcaaaagatttctcctaaatactatgtacgtacaaacccacaagctgttcagctcttctccccttgtgtctcctgacgtcccccattagccacagtcaattttgtcagcctgagttctctctctactctttcttcattaatttccaagggctagacagagaattattaccagcatcaatgcaaactttgacttcctgtatttatattttctctgttcgcttattctatttgtaatttgtgttttcgatggattaatttaaatatatataataaacaacagtaacaataagcaggatgttcctctgtgttttaggctgaagttaccaaaaaaaaattatttcatttttcctgagcttggagagtctgtgaaagttaaattttttacatcaatcgctgtggtttcgattgtgtttccagtgacataactagttaaatgtaaaccagatgtgctttgaagtttatttccagaaatgtacagtgaactgtttcaatttctggttccatgacatttataccataaaaaaatatatatttaagggaaaaactgaatagctgatatttgtacttgtccctgtatgtgttttcagtctttgagttcaccattgcttaattcaaaatgaatcttttaaaactatgacacaggcacttgtcttttggggaaatcttcttacacatgaattcattggagaattaaatggggaatcccctcagacagattgcctgttcccggcacatctagtttctttggctcttgccgaatattcatggaaggatttcaatgttgtagagcatttgcttcattaaaaaggcttacatctgaattagtgtattattaggaagacttttatttctcttataagagtctttttctactgcaagcactctgaaagccaaatgtaattgtatccctgcaccccgataatttatagttcaagaactaaattaacacctgagcacctctttagtcattctgaagtagcaataatctttctctatatagtttttttttaattaaaatacaactatataattctcaccttctctctcttctccctctaacaccttccatgtacttgtttctcaagctcatggcctctgtttcattgttgttgttgttgttgttgttttgtgtgtgtttgtgtgtgtgtgtttctaaatataaaaatataaccttctcagtccatatgttacttgtacatatatgtttttaaggctgaccacttggtgtcagataatcaatcagagattcttcctgactctcagagttccttacatgcctgtagttctttgtttacagttaggctcccatgacatttccctctcccatattactgcgtctttggtccttttacataggtttctgaattgctattttaaacctattagctggcagtcagttctgagcctgccccccctttcaggaccggtttatttacattttatttgagatagtcaggggcaagaattagagccttccggctttacttatatgtctttgtttcggtatttaaagaagagaagggtctatattaaatctaaagctatgtatggagggcagtgtctccttggaatctcagaaattctactgtttagctaagagtgttgaggcatgttgacatgtttggaatcacttagctagtagggatgggatctcaatgatgactcttggaagctgagtagttgagtttgtataggaagtgtccttaacgttattcatattttaaccgagagttgtgtttgcctcttagtgagtcatgtgttaagtgactttagaaccttgagaaagtcacctcttaaaaaaatgtaggctgatttctgaattcgaggccagcctggtctacaaagtgagttccaggacagccagggctatacagagaaaccctgtcttgaaaaacaaaaacaaaaaacaaaaaacaaaaacaaaaacaaaacaaaacaaaaaaacaggtgtactgtgattctttttacttttgtcaccaacaggatttgcttactggtatattgtttgatttnnnnnnnnnnnnnnnnnnnntgcttactggtatattgtttgatttaaggctaaaagccggtagtcatcaagtcctaattgagtgcaattaattcttcttcttttttctttttttggtctttggtttttccgagacagggtttctctgtgtagccctggctgtcctggaactcactttgtaaaccaggctggcctcgaactcagaaatctgcctgcctctgcctcccaagtgctgggattaaaggcgtgagccaccactgcccagcatttttttctatttctaatggttctgaagattgaatttagagcctgaggcatatgctctacctctgagccatgcccctgcctgagccatgcccctgcctggagccatgcccctgcctgagccatgcccctgcctgagccacgccccctcctgagccacgccccctgccactctgccccagcactcgttttcctatatcgtatctgaccaaacttgtggtgtaaagtaattctttaactaatcacataattaataaagggctcaagaaagagaataatgaatgacagctggggagagttctgtagcctggattgatatcccggttcttatttcttggtatgcctctaagagttcagaatgaaagccaatgttggtatacgtttgtcttcaaagcttcgcagaagcgtaagtgacagaaatatccaacccttgttgtgccccagagtcgtacctggagttagaacaaactacagagcaaaacaaatcgactatatacagttagagtcatagaagacacacatactgaatcatcttccgaatagactgttgctaatacggtcctcctgagtctccagtcatgtcgagggctatctgtgctgtagaacacatgtctgccttccctattcactttaggccctgtatatccatattaaaattataagagccaagtttaccagacgttctggcacagtctggcttgcctggaataatattttccagaaacacatggcagctctaatggaatttttttccttctggattgtagatgtaaatgaatgtgagagcaacccgtgtgtcaatggagcctgcaggaacaacctgggctctttccattgcgagtgctcgcccggcagcaagctcagctccaccggactcatttgcatcggtaagatccccgcacggatctccctgtgaccgtctctcatgctcttgcctcagcctgaggtgcaaacagagctgacggggaggagagcagaagagcagaagctgggcaggctttaaccagttaggctctagagcatcttcctttcgtgtctgtagatgcatgcacgctgccacgactgtgagcatttctgtgtgtacacttttcttacgtctgaatcccttaggcatgcgcacagtcaaatcccatcacagaaactttaaatctgtcgtgatgaaaggcatggtggggtttggattcagttcacaggacaagagtttgaagatttttttaggcactgaagcatagaaggagttcagtattctcctttccctcgccggtcgcaagttggtagactccagagaaagaaagataagtgctctcttactttggaaaatctctaggtgtgataatattttgctccaagatgggattttgacatatagcccaggctggcctaggatctgatggagagcaggctgaccaagaattccatgtaattcctctgtctcagcttcacaagtcctgggatgacgggtatgggccatcatgcctgctcaagtccaggtcttggtagtgacatataatgtatgcagggtaagataatttgatcaaagatgtataccgacaaggtctacccaagtcatttctttctatgtctagtggcagtggctctatttaccaggcatgcccagactcccatcctgcctagaatccacctttaaaggaaactaattcttctgatgatacttggcttcacatcgcaccatataaatgggcaagttcttgcttactatctaagcaagtgaattcatctctgcttgttgtcctttagagttactaatgaaacaatgatgtttattgagtcattttttttcacttgccaacaactgaatgctaccacattacccacacagaaactttaagtattttcattcattatgataaaattttgagtatttccgttggttctctttccatcatgtgaatctcagtcaggtcaccaggcttgtgggcaagcacgtttgtccaccgagccatctctccagccagccttgaacacgttcttagtggggctgttggtggttctgaccagtgatgagcctgccgctgctagtcacaggatctgagtcactaaatttgtaaaggaaagaaaattctactttgtggttactaattaaaagtcggatcatctgtgacttcactagggtactaaggctggctgcagagtttgagttagtcctacggatatactaaatgtgattttgtgaatgctaaggagactactgtatcctgggtagtgttgttcagctttctaggacagtgcagtaagttcatcctacagagttgtgttgctctcctgggttagcacccatatcccatgggcctgcactcttgccccatgtccttgacttctgcggacagaaggaacagcagcttccctgataacaggtcccactgtttatccctcgtggtagattataaagtcagccactcactttctcaggatcagcattgtaaacatcccaactgcaaccattttctggctcctttttccccctaatgtcttttgctctgttcttctcctgacccccagcctgcagtgtaccaccagtcagcccttgatctttttgcactcatgcctagttgctctctgcactgcttctcagttccattggatccatcctcacctttctattaatcccgggcttgtgtctccgcccggctgcagccgtttctatgtggatgtctctggacatctcagcagaagatgcctaacaccacccgattctgagtttcatacttgatcctgtttcctagaaacatttttgtcttggcaaatggcagccccattcttttcattgccaccccaaattctcctcttcaaccttaatggcttactcccaaacctcacattgaatacccacgacccagttttcaaccactctttacccccactcattatttgtcttctatttttaataattcatttaggttagcttagcacagcaatatatttcatcacagcatcttcatatgcatatatcattatattgtattcttatgcatccccctgtctctctgacctcccttgctagaccccatcaccttccctacacaaaccggttccttctctccccccagtcggccccccttcttatttcctgttatatatattccattactgtctttatttgcccctctctaaagatctatttctccccactcatgcttccctgtctagttgggatatacaaacatgtatgtataaatatacacacatacatatatacaggtgtatatttcaatctatgttgtgtatataatatttgtctttctgagtttgtttatttcatttaacctttccaattgggtttattttcctacaaaagtcacaaaatcccattatgtctatgtgcatactttctgtatgtttatctaattctgcctgccccctcacccagctcctcccatgtcctcattcccatgtcctcccacactctcagctcctcctacaccctcgtctccgcctatacccttagctcctcccatattctcactcagctcctcccacatcttcactcagctcctcccacacatacccagttcctcccacactctcatccagctcctcccacatcctcaccttctgcccacaccctcagcttatattttgatattcctaaggtgtgggcaacgatatgtgcttaagagtttattatcagaatcgtctgaggagaatgtcaagaatgcagatttctgacctgcacacctggacctatgaattaattaattaatcaaggatattgccagtctcatgcacacttggctgaactctgagttctccagagaaaactaggaatgtagctgtataggcagttagaatttgcatgtcagtcaatatttaacgtatgccatatttaaatacaagcacatgtcagtcttttcaaagaacatgctataaaaatgattttaagaatgaatactctggtgccttttcacactgttacatatctttagcatgcacaagagttcattgtctgccgagagaagaacttctcaacctctcctattcctttccagacagcctgaaaggaacctgctggctcaacatccaggacaaccgctgtgaggtgaacattaatggagccaccctgaaatccgaatgctgtgccacacttggagccgcttgggggagcccctgtgagcgctgtgagctaggtaggagcctgaccagaccctccgacttggccactggaaagtcctctttaaatcaacggtcactccttctcacagtgtgtcctaagtggtggggaaaacggctaggctgtcttctctccaaaactgtcttcccaggaaaattcattctcctcttgaaatgtatgtttaacagagagcagatcctctaagtatctcagatgtggagaggaaattggctcaaaccttatgtcctcatttgagtgtgtcccagtgggatgtgatagcctctcccctgaggttttgtctagctcgcttttaagtcagttgccaatttgaacagagatgaattgtaggagaaatcatttcaaactgtgtccacactgatagcgttaccatagcaactgaagtgctttctgaatcaaagacaattggtcctaggtctttgcgaccccactttaaatttaattccctcaccctgtttcttgagcctgagactcatgtactttttatatatgtatataaagaagtcaaatgctgtcctgctgttcttacagatgcagcttgcccaagagggtttgccaggatcaaaggtgtgacttgcgaaggtgggtgtgacgagtgaatggaatggactgctattttacttgcgagttgctagtcactgttctcaagacaaccttgagatttcaattttaaaaatcactccgtgtaattaacacgggtgcttaggaaatagctttgaggttcccacttctcttctttatacagttgaggaaatttcataaggaagtcccccagccttccaggcacagaacagctggcgagggagcacgtctgggctacacttttatggaccagcaagactgcggtcgtctgcacagctggtgcccaggaaagctggtggctgccttgtggaatattttttttttgcttaaactcaagtaataatccacactgtgttgcagattgaacacgccacacaggaaatgaggctacacctgctttttctatttgtgacatctttacctttctgcttactgcattctcccccctacagacgttaatgaatgcgaggtgtttcctggcgtctgtccaaatggacgctgtgtcaacagcaaaggctctttccactgtgaatgccctgaaggtcttactctggatggtaccggccgggtgtgtttgggtaagatgagttttcctgtctatatgccttgagctaaccatcagctcttttgtcctttggatggaagccagtccaaaaccagaaactattcttgaagaaatggctttaaatgagatactgtttgagggagaaaatatgtgttttatatatgtttaaatgtgtttaaatatatgtttaatatatgtttaaaatagtttaaaacattttcatgactaaaaaatatcatttaatccttagtttctgatactttagacaggttgagttattcatatgaagttaataggagaagaaaactaggcatagtttgaacctagtatttaaaacattatcatataccagcccactgcagctggactctccagacaaagggggaggggcaaaggtatgtcaatcatcctgctccctcctctgccaccattaaagggcagattttcttagtgcttttttttttttctaaagtcactatcaacaatgtatggatggtggtttggccttaggctttttcagggccgtagctgaaataatttaagtttcataaaatggaaaaaaaatgctctcctttatttcgcgttatatatgagcagaaagttctttttttaaagactacttttcccaataagctctggaatagtgaagttgtagtttgcaaaacattttttatgtcagcgttgttgtgtttggcacttaagaaggacagagaaggaatagtggtaatgccatattagacagtcttcaagtatttaaatgtatcaataatatttttccactactagtttagtagttaactccgcagtactacagagcttaatttactgtaacagagacttcattttaagttaatcttgacagcatatttaagtctggatagaaagcagtattgtggttcatatggaatcatttagaaagcacatattcaacatggaaatttttttttaatttggttgatttttcttcttgtggatgtgtgcatatctgagtgcttgcatagacattggtacacttaagagtcgatcacaagtcaactctttcttctcaggttctctccaacttcttcttgagacttgatctctcactgatgattctagagctttccatattggctagactaggagggcaatgaacaccccgccatcctttgtccccaccactccagagctggggtcataggtattcaccatcacacatggcttatactgagattgctggaaatctaagaacctcattcctgaacagcaaacctttgcctgactgacaacccaaatactgccttcttgagcctcttacttgatgaaagattttgttctttctaacttgttctaagttgacacctgctgaggatgtaagaacatttcagggggttggtgtgtggtagtgtgaagatgctaaggactggttagtgataagccgctgcattagagcttcatataaaataaggatgtcatctcaagcgtttgcaggaggtaagctgacataattgagtgaagcacaataggagcagaggggattgtggcaaactcccaagcccacatgccatcgggttcaaaggttctattataggttttgcaagccagtcaacgtgtctactttggttttgttgccctgtgccctggctatttcaattcttggtgtaaatactgatatgaatcttcacaataaagatacaaaattactcttctcaaatataaaggcttcttaaattcttggttcccataacccatggttccagtttatcacagaatgacttctgagcagattacttcagtggccctcgggccacctgtgtgtaattaaaatttagttattaaaaccttctcatctcaggaagagtcctccttccctagtggcagtgctgggtgaagccaacccagagatcagaactagggaagttgtgctaatgagactttgagatatggccaagtatgtggcttttgcttcctattaatgtagacagactacatgtaagactcaaaatgaaacattaccatgctccgtcttagttttgattcttggaaatgtgtgttacacaaggttagagacagttgtagaggttgctgcgacctttgattgagaatgtgaaatgttccacatggacaactgaggagcaaacttatctcctctttatagtgacccttctgtcaggatgctctaacctctgtgaagccgttttcaagcttcatgccatgcctcagaatattttcaccaaaatcattttatttagctatgaaaactctttttctgagcctgttattctttttttttcattagacagtgtgtgaccataggtcccccatctctgttgaccaacactagagcatattgtctgtagatcatactggctcaacctctttatggctgttcattgctgctctgggtctctaagtaactcaggctaagcactaacatacagtttggtacagattgaagttaggaggaaaatattcatttaaacaaatgatttggcccctttgtggtgacgaattcaacatgcctatatgactcaggaaaactcaaatgcaaaattcataacaatagaacaaaacccaattgaagtaaaaacatcttgttttagtaagttgcagatggggtgcagcaactattattgttcataattagaccctaacaagactgactagacactaacaatactaactagaccttaacagaactgattgggccctaacaggactgactaggccctaacatgactgactaggccttaacaggactgactaggccctaacaggactaactagactctaataagactgattaggccctaacaggactaactagacactaacagaactaactagaccctaacaggactaactagaccctaacaggactaactagaccctaacaagactgcaaaattactttaaagtcgtgacaaagaagaatccatcatcgaaattactgttctgatgtgaaaaatgtaagagtgagatcatgggccaggacatggaagagtcatgtcatcacgagagcttttcggggttctttgtgagatttaagtaatctcttaaagagcccaccttcactctccctacctgactgttaccatggagtccattcaaggtggtgacaaactgatctctcacttcaagtctgtctccagcccaccgtatcagtccacttcacccagcatggccactgagaaaggaagagtcctcggagatgtaacagtgttagctaagtacaggtagcctggagcccatagtttccgaggcactaagcagggataggatgctcagtgagtgctcccgctcagctcatgctcagactgcacgtgtgctctccatgcagatatccgtatggagcactgcttcctgaagtgggatgaggatgagtgcatccaccctgtccctgggaagttccgcatggacgcctgctgctgtgcagtcggggcagcttggggcacagagtgtgaagaatgtcctaagcctggcaccaaggaatatgagaccctgtgcccgcggggcccaggctttgctaacagaggggacatcctcactgggcgtccattttacaaaggtaagtgagtacaagctggtctccgacccgctgtagtcacagggcaccctctacgctctctgagcattggttaagttttcaacatatcattggtggccaacctaaggtccaaaactataaatgacatggacaaagtggtatggatacaggctgggaaatacaatggtgatcactctgtctctctgtctgtccttggacttttcttttgacatagcttgaggagaggcaactctgcctactgcctcagcagcagagagatctctgtccccacttatctgtgtaagcaacagccagatagatgggagcaaaactcaggtgacggtggagaatctcttccatggtggacacttccctgtgccatctctgtagtcgttgccaacctggggagctgttcctgtcaatgggtgcgtggttactgtgtatggccatcaggttgtaagtcaaggtgatggaggtgtccatcccctgtcgaccatctccccagtcgtccttccctctgcttacagatatcaacgagtgcaaagcctttcctgggatgtgcacctatgggaagtgcagaaacacaattggaagcttcaagtgccgttgcaataatggcttcgccctggacatggaggaaagaaactgnnnnnnnnnnnnnnnnnnnnnnnnnnnnnnnnnnnnnnnnnnnnnnnnnnnnnnnnnnnnnnnnnnnnnnnnnnnnnnnnnnnnnnnnnnnnnnnnnnnnnnnnnnnnnnnnnnnnnnnnnnnnnnnnnnnnnnnnnnnnnnnnnnnnnnnnnnnntctccccttccccctccccctgttggactttaaagccaaataacttagagcactacaaaatagcacaaaatgcagttatttgtatgtaaaaataatgatcttcaaaatgtatgagtactaaagtagagagccactaagagcctgtgcctgttatatcatatttgaggactatgtcgggtattgttttagttagttagagacatgtttcgacttcttttcctcacctgcagacagattcttacccactttggattgaaaagagacgaatttaggaatgtttctgtttgacgacaggcagtttattgcaaatgcttgaccagtgttgccagggatttctgtgcagagttgccggcatccgtgtatggaatgtccaggggtagacgttccccttttctgacctctcacctggcccttcttcagcatgcccattaaaatgtctctcttgcctgcttcctgaggctgcacagcctgggctaggcctgggtatttcagttctgctttgtcttgctgctctgcccctaagccttcatcccccttaccatcagtacctgtcctctggaatgccaacattccagcagggccctcacagctgcttagcaaactcccactttagcttcccagagcttttgaaacatctctgtgcctctgaactattgacataccttcatagctctcctttcttcatgactgtcccaggcatcctgttctcatggaagtccctcttccaccctcgcccctcctccagtgtcagagagctacagtttctccctgtttgaagtgaactcctgtctctccagtcctctccactcctgctacaggataagtctctgtggccttgattattcaccctatcttgtcccctcttccatcttccttttgcacacattaaaggaaattcctcggcccctgctcccctgcctgcccttgcccccatctctgcctattctcctagccagctattcatttcacagttgtgacagttgacgaagcatcttgaccgcagcctaaggtaacatctcaggtgacatctgagagcattctgccagctttgtaccccaggagtacaggaagaagagagcctttcctgatagatctttgtctacatttcagtcgctgctatttggcagacataccagtgccttctcgtctattgaatttccacagccaaatccttcatttttgcaaccatgagagttttcagcctgcccctcaaaaaatgccatttttgacccagccatcctggacctgcataggcaaagcagttgaggctcttccagctctagccttagctcttgtttgtaatgtgcagttagacaagtttcttaatctcagaagcaagcaccttccacaataggagatagttattagtagcactgccttgtttaagagcagagaacaaatcccttccaatgctattggctcccattcttgttagcaggtggcattctgggtaatcaggaccatcctgcctacattgtcagcctctgcagccaactgctcagcaacctttggcttctggaaaaaaaacagtcgccactcttctgtgtgcttgtcgctgcctgtctagttattacacctcttgaaagttagagtttccatacaaccttcaggttcagttcgaaagccttgcctttcaaaacgccagcttgtagcagaggatggcttgtagcagaggatggctagtctatgtgcagcggtggtgtgtatgtgccagcagtggtgtgtatgtgccagcagtggtgtgtatgtgccactgttcttgtgcttgcttcccttcatgctagagatgagctctgctatagataagaagacaaagataaagaaaatggttgaattttccaaatccccgaaagatgaaggactgggctgtccttgggcaccttgtcatagagcctgtaattctaccatgtggtgctctcaccactttacatttaccgaaactgtcccctgcttatcacaggctttattctgttcccctgaggatgctgaacggcagtcaccagaaattgacgggccaattgtgtcagtgaggtttttgtttaagagaaagcactttggtgtcctgggtatggctgataactgggggaaatcagtaaaaatgggaagtaggaactgtggctgatcccaccaaagtaaatgtgcaagttgcccattgatagcctatacaaaaagacttccatttcaactcaccaagagacagtgagcctggtgtgccagcatgtgtctttaattcagcagttggcaggaagaggcaggtggatctcatgtatgtagttcctcatgtatgtaggacgttccaggccagtctgagacacagtaagaccccgccttaataaatcaataaatattttaaaatgaaacaagacagtggcagacacatttatttaattgttactttaaaaaaatatgactcctattttcttaaatatcttttgtgtacattcaatctctgtactgaaaatatgttacaggtgtgagaggtctctccaaactttctgagagtgcccacacactattaatgattctaacagtaatataacaaacatagccaaatatgagcacataatttttctttatttttagaaagtcggataggtaagcacttctcatccgactgtgacacagatcccatgacaggttcatcccagggccctgctgtgtctgaacgctctctgactggaggcgtgtgctatggctgccttggaggctgcctctctgtgtccctgctcagcatcagtgtccccggtccacctgctcccacccttggctggggtagcagaatgaacactctccatgccttgctatggcttcctcccacatgagcacactgcctcctcacatagaccacaagggagtggcgggatctcttctctcttactacatctaagccacaaagagaaggccacatttcagaatttaaagacccgcaggccccagctgccggttgaccatgacagttttgacagttggagaaaggaatgtgcctgctgaaggcctggtcccctccaccctgtctcttcagaacatttcttgctgctctcaaccctgatttccctaagtctcagatgtgcagtaccctcccctagaagaccccattcagcactctcttatttccctctgtatttttcttttttctttttgaaatcgggggcagacattgatgagtgcaggatctcccccgacctctgcggcagcggcatctgtgtcaacacgccaggcagctttgaatgcgagtgctttgagggctacgagagcggcttcatgatgatgaagaattgcatgggtaagcgaggccagaccctcctggctggcctggaacctgacaactgtatgctcatcttctgctgtgcctctgctgccttcagggctgtggcagcacccttgacagggtgtgtgctgagcacaaaggcctacaaaatcccttccctgggctggaagcagcacaaagactacccaggatgcatctatttaaaatggataaccttgtgctgtctgcaaatgtgtattctgccttgccagttccatgagaactgtgtcttatagttgtgatattgaaaaatgtttgggtcactatatcatgtgagtgacttatgtagttggattcaagctataaacactaaaatgaccgagaacaacatatgaacccaagtctatggtgatatataagggaaaagttatatggatcacctcttaccagccattattttatacatgaacatttttcaatagtttactatagtaacagtagaagttacttaatttttatattgaaacaagtaaagcttatcccgcttctgattgggtgtgtctttatgtttaaggcacatacctaccttctaacggcccttctcccatactagatgtgtaaatatattttcctcagggtgctttaatgaatctcacgtttttacctttcagacattgacgaatgtgaacgtaaccctctcctttgtaggggtggcacctgtgtgaacactgagggaagctttcagtgtgactgcccactgggacacgagctgtcaccgtcccgtgaggactgtgtaggtgagtttttccccctttggaaaaaaaatccagtgagcacagtgggtgaaaatcaggagttacctctagtgaaagcagcgtcctgtggctcacaacaacctggaaatctggattcccagtgtctgttttctagaatgttgggcgctgggctgctttccatggaaagacctctgtgcaaggtcatagattccatggtcccggcggggttgtgagtaagctgcccaggtcactctctggacagttgtcctgtctatatacctgttcatcccctgttctctccctgcactgtcagagtacatgtagacccagttcttcacacccatgtgtgaccatgaggacccccttggtgcttcatggctcctcaaggtctcctactagaaccaagttcaggaggtgactggagtgtgcttgggcatttcctcgttccagctgctccttgtaaatccacacagtgtttaccacgtcctagtacacttgctgttcagcaaggacgtagcctgggggcatcgtcttcaggagaactcttcctgagaactctttgagcacagcccttcagtgcacacacatttatttacaagccacatagatttctgtactggtacataaaatgaaccttaaataatacactaaacagacattttcagaaggagggatttaaagtcttaagtttttttttttaattttgataacagtacaaaagatgattttacactggtgatttgaagaattcatagctggacatgctgcagtatagagactcagaaaaccacacctgaatctacttttgttgttacttagagttcattaaccttatggctgaaaaaatttacccttcaaaagggcaatatatattataaaataaatgctttgaaatgtgtgtacttgataaaaataagcataatttatataacataatgtttaggtaactgtgtgagtctgaaataatttctttttacagccagttactgtctgtggtcactgggtctgacgtacattccttcagacgagcatctcacatatacaaatggatcagtctgacattttctgggtgttccctaggaatttactaattccacatatttttgcatgacttttttttaaaggaaggtatttgacttgtaaaggccaaattgctttaaactaagagttgtggactgaaaatccacatatgcagtcacataaacacctcagtgaaaacacacatgagggccttattgtcatgcctctgttccctggaacaggtatcttccttcgggatagtttaagttgtaagggccgcacccaaacagctattagagactatgtgggcacaacagtataaacccataaactggttataagcttcatttgtgggcctacactatgtccatgcgctctgacatagcaacaactagctgccatggctatgtaattgtaattagaatcaaataacattaaacactgcacagttgtgtcacatccatttcaagggctagtaaaacactacagatccatcccagaaactctagatggagaagggaatgcttccaacacgagagaaagatctggtgtcagtggatagagggcctaacattttcactgaatagcccaggttagccactaaatagccgaggttagcctgtttcctattcaggctgcccacctctttggtgaaacctgctcttaaaggctcttgtgattatgccctggcataaagcatggctctgtttgcctttcgcagatattaacgagtgctccttgagcgacaacctctgtagaaatggcaaatgtgtgaacatgatcggaacttaccagtgctcttgcaatcctggataccaggccacgccagaccgccagggctgtacaggtaagggctgtgggctactccagtctgcatttcccatctctctgaccaccaagtttcctcaccaaatatatcctaacacttacaggagtcccttgtactataaatgaatgtgagcagggggtccagaaggttcgttggtgttttgcagaaaactcactgaccctaccataaagaaatgctccatacaccatcgctatgctattctgagctcgttccttctcacacagtagactaaatactacttgaaaggaagtaagggggatttaaggaagaatagcggtttaatctttaagcgatacaaatagaaatggcaacaaacccaaagcaaggcaatcatcaactaaaagaagacgcactggccgttgccgtgcatccgtgtggacttagcatttgacacgcttgtgtaatgtctgcgcagatatcgacgagtgtatgataatgaatgggggctgcgacacccagtgcaccaactccgaaggaagctacgagtgcagctgcagcgaggggtacgcactgatgccagacggacggtcgtgcgcaggtatggccaagatttttttaaaaatgcatttcatggatgttctactaaaaacgtggctccagactttgtccagtcgagctgagtggagaaagtgtatctgggaccgatgaaagccattcctgctttgaccggaggctacctttgtgtcatcagatattgatgagtgtgaaaataaccccgatatctgtgacggcggccagtgtaccaacattcctggggagtatcgctgtctctgttatgatggcttcatggcttcgatggacatgaagacgtgcatcggtgggtattggaaaccaatgataatttcctttttattgttctttctccttgagaccttcacacagagtggaagttaccccatctccatctcttcccatatctcttcaaacatgtctctctcccaaccttgtctgtttgtctttggcctctgagtccagtttgtgctatccatatgtgcatgggtgtagggacatccactggagttcagaaatcctaccagtggccacaccctccaaaaaagcaatggttcttcctccctcagcaactctctactgacccgtagttcctcagtagaggctgggacctctaaatggcccatctcatctatgctgccactttagctggctcggtcttgtgcaggtcttgtgcaagtaaccacagctgctgtgaatccaccttacacgcagcacttacacacacagcactcctcccaagcaaatggtgacttgatacatacaggaacacatgtaaacatggtgagaaggctttctcagtgttactttgaaattccaagccattttgccagaactgcaaaatctgagaaggaagaattcttttggaaatccttaaagacacatagttagtttgcccttcaagacaaatctttcaagtgaattgtattttgcattttgtcggttcattgcagccctgtgctaacattcagtttaaaaggtggtttttaaattacggtgatagagacaaaggtaactggacgacacaatgcgtttttttccagatgtgaacgagtgtgacctgaatcccaacatctgcatgtttggggaatgtgagaacacgaagggctctttcatttgccactgccagctgggctactcggtgaagaaggggaccacaggatgcacaggtaggatccccatgcccgcctggcttcagcctcagggggttcacaggctagcatcattccagcattcaacatcccaggacccagtcaaccagaaaacacctgccagtgtgaggagtaactggctcttagctatgccattcactgtccctgaggtgccccccccccccccgcctgagccaccctgcagggaggaagtagtagtgaacccgccctgcttctggttgatcttgcagcatcattaagtttctcggcttgatggcagcccaagtggaggacccgtgtaaagtaggaaatgaaagcagcggtcctcagccttcctgaagctgcagccctttagtacagcgcctcatgtcgtggtgactcccgaccatacatttttttttttgttgctacctcacataactgcaatgttttgctactgttacgaattgtaatgtaaataaatatctgtgttttccagtgtcttaggtgactcctacaaaagagtcattctgacgcccaaggagtcatgaaccacaggttgagaaaaccagtggcttaaaagatccaaattttcatttgacttgtaatgttaaactgataaaacatcctagattctatttggacttttattgccttacttaaatggtttctcatcccctctcccctttctccctccctctccccccaccccccgttacctccctcttttcactgcggtggttcactccacacgatttatcttctgtctcctttttttactctttagtttcacccctcttgtacagatgggactaggagatgtcaattgaggtgtgagctacttgtccctggcatgctcactttaaggacccttatgggatttagctcaaggcatcagtaaggagctcagggtattgcaaaccttttagctgaccatccaggaaaaggtagatgatgagggaaggtctgtcctgtgatccttaccaaaaaaaaaaaaaaaaaaagaggatagaagccagtgttatctgcagtgtccattcggcagcggcagcttgtagtcagtgagctgttagaacacacaaatcacactctagaaagctttgggaggaccgaatctacatggcttgtatgagtgcgtttgctatgtgtgcatacgttcacccaactgtgtattactttgcagtagggatacattgcaagaaatgggtccttagatgagtttatcactatgttgccatcaaaacgcatacttattcaagcacggctgcatgccaaggcaatgtaagcttaggaggccattgtggtgtcccttggtcccttggtcactgatcaaagtatcaattaggttgcacatgactgtacatacctgagtagatcacacatgtgtcacatgactgtgcatacctcagtagatcacacatgtgtcacatgactgtgcatacctcagtagatcacacatgtgtatttctgcagaattattatgaacataaacacatactggaaagcagtggtcctcttccaaatcacatcaacagagaacattcttgacatattctcagataagaaagagaaaacaaacaaacaaacaaaaacgtacacatatgcgaccgtttatgaaacctctagatatatagtcttgatttgtgtgtgcggtcctggaaattaaacctagatgctcacccatgctaagcaagcactgtaccactgaaccacgttagggttgtaacttttaaaatgaagggtggcttttttctaaaatgtcatccttatcttcatgaaaaatatgtgagaaatattaatagaaaggaacagtgcagtccttctcaaaatccctcctgaaatatgtgtctccatattcttcccacagcctttgtaacatgtggggggctgacactcagatcattccaggacattccacaacagctgcactttctcattccaggaggaagtggctagcaagttcctgtgacgaagggcttgtttggtcacgatcatgaagttatagatcttgctgaaatttaaaaaaaaaaaaaaagagttaaagacaataagcagttttagagctttctctgtaccgtctcatgtttatcctaaatggttgtcttttcagaaacatgcttggaagcacagttaaccagctcatgcttcatcttctttcttttcctttttcaccctggtttctcagacgtggacgagtgtgagattggcgcccataactgcgacatgcacgcctcatgtctgaatgtccctggaagcttcaagtgcagctgcagagaaggctgggtgggaaatggcatcaaatgcattggtgagtttgcagacagaaagacccttccggaaggcccagtgtcgttactgaccgttcttcgcacatttgttaacccacacgcctcccacagggacccgctgcccgctgtccctttattcccctgtaaatcaaatctgtctttggtcgtggggatcattcctgcctgagcgtttcctcagctttaatgtaaatggtcagatcacaacagagtgcttaggcatctgcctcctcatgcatgttgctcggtaaaaattatttgatgtgcagtcagtgatctaaacagctgtaacgtggaaaaaaaacaaaaaacagcaacaaaaacggctggtgtgttttcccggcctttacacagagctgtcagtgtggagtgagagccagtgaagtaagtggagaacacagaggggttcctcacgtggccttgagatgagagcaagcaaaaggttcttagcagaaaggatcacccttacagacaacgctgaagatttttcttgaattccaagaagtcttacttgaaaagggagactagggaaatctttttctcccgggttctgtaattcttgggctgaaagcctaaaaatagtgcagagccccaaggcagaggactggattattccctgtgtggtcattcatagaactttttaatacgctcctacagtaaaggacatttccaggtggtaacaattacccaggtcaaagcaagccatcagagctgacctccccgtgactgacgacgaggcagtaaaagcttatgggcccacagtgaggattaaaacaggaacccttaatatttctcaccgataatgtgaattaacttgaataaaacctgccaatcctgccaagtgtttcatacgtgtcaaatatttaaagccaatttacagaatatgtatcatcatagtttccaaatgactttgctgtgtaacaccctgtgtctgcgtcccccagaggctaatggaagcccatttccatgcctgtcctatgtgcctgctagttgttgttgctgttgctgttgctatttgttcccatttatgttcttcctggcaatccgtcagtctggccaactgatcacatgactgcctgctgcacgacgagattacagggtccaggcacttgtgctcctatgcccattcctcctttctgtcttcatcctgtgcttagccatgtttcccctcccttgctccccctacctgctctgtcccctctcctcctccaccatcctcctgaccccttccctctagaccctcaccccatccctcttcttcttctcactcccttccctcctctgtcctcccctctccctccccccatattcactccatgatcctcctgcaacttactcttctaatatttaaggtggcagaacccttaaacctcttctcacaattcccatttaactctttaactctaggagaaaccatcccagtttccaagccaccgaagccttttctggcttcagctgccgctgccctggcccgtgtacagcgccttgcctctccagatgccagaatgccacaccctgtaccttccctctttagtggccctgtgtgctctgctctctgtgagaggcactcttctctccttctgctcactgaggtcgggcttgctcatccttggaggtgggggcatggtgcttcttccgtgggcctcactggttccctgtgatccagattcggttgttcctgtaaccctcttttccttttcttttaagatttatttatttaatgtagatgcctacactgtagccatcttcagacgcaccagaagagggcatcagatcccatcatagatggttgtgagccaccatgtggttgctgggatttgaactcaggacctctggaagagcagatagtgctcttaaccactgagccgtctctccagccctgctgtaaccttaatagtacatagaaaaacatgtaatcctttcttttttgtatttgacagccatcttttctggtagcccgttagtcccatgcgatcaagaactactacatctctcttcccttcttacaaaataaacttaaaactatatgtggattctctcctgtgaagatcattgttgtcttaagcaaatcctcttccagccatagaggaaccaacagtagaagcaacaataggtcgagtgaaatccgactccagttttccttaaatacttcccacagcactagaatcagtacccagtacccggggccacagttaggacatgaatgttttggattgtgaacctaaaatcttagtgcccttccagataaaaccaaaccaaagtccgtttggactggctcataatctccacaagccaaacccttcccctgcatcagactgtgccatcttcatctctgatcctcttggttgtgctcgcttgccacacagatctggatgagtgcgcgaatggaacccaccagtgcagcataaacgcccagtgtgtcaacaccccaggctcctaccagtgcgcctgctcggagggcttcacgggagacggctttacttgctcaggtgagtgacaggctgagctcccacgtgtccatctcagaacaccaaatgtgctctccttgtgtgaagaaaacccataaagaagaccaaagtggctgtttggagtttatgtttgacccatgaatgggcacataccctttcttatccattaaatgcagaagtctaaaaaggtgtctgtgacattggtaggtgttttaaagtaatggcatatatcacctcctgttctgttaatggctgtcattgtctattactcctttataaagtaatggtcaggaaaatgcaggctttggataacactgcctgggttcacagtatctccaggctttttccctgctatcaacctcagctcatgagcatcctgtgtggcttcagctcttcttgtgttaaaataggaatagtgaccttagcagcacttcttatcactgagtgggtggtccagggaacttctcagcccttgaagatgggatgtgtaatgtcacacatcaaaggtaagtcatccaagctgccacttctccccttggagttcgatagctgtcctcacagttgtgaaaggaataagacatgcgaaggacgtaggaaaccatactgatggagatttcactcctgcccctccccagggctcaatggtgaaatgttgtctcattacattcatatataagactaggccatcctttcaggcaagaaaattactttatgagctttatgagctgatcttcattcacgcttcaacctcacaattatgaaactaaatctgtaattatccacacagcgtgctgaactcatcagactcagcccccccccttttttttaagatttatttattattatacataagtacactgtagctgtgttctgacacaccagaagagggcgtcagatctcattacgggtggttatgagccaccatgtggttgctgggatttgaactcaggacctttggaagagcagtcagtgctcttacccgctgagccatctctccagcccctcagtgtccccttttaagaaagtgtgtttatctggtactcctcctctttaaagcactggctcttttgtatttcctggactttgtatgtgctgtagtaccaaagaaaggatggttttgatggtaaacacatctgcaagcacaatagggttcagggggacccttgcagctctgttgttggcttctgtcagcctggatgcacctggtgagctggacgaaagccacacaccaggtaacagccacttcacctggcggctcagtaaacactggtctctgtcctcctcctctttgctgcttcagagagttaagtaagtcatagggcaggtctatgaaaagtgtctgcctgcatcattttaatcagatgttaggaatagaaaagaaacgttgcttctatggtatctctgatttcctttgtgccacttcagcgaggaaagccaggaaggggcgttgctgtgctttcagatgaatgtaattccagagctcttggtcacatctactaatattgctttaatactgattcatccgtgggtatgaagaagaaccaagagaaaccccatcgatatatattctagctgagtgttctgaatgcaagttatggatctctgatctcaggccacacatcccaaatctagtgaatggggttaaccattgcttcatattaatgaacaccaactctagccactaaaaccgatttcatcaggaaaaaggaaaaatgtgtggcgaaacctggaacttaacggagacgtctttttattcggcagatgttgacgagtgtgcggaaaacacaaacctttgtgagaacggccagtgcctgaatgtcccgggagcttaccgctgcgagtgtgagatgggcttcaccccagcctcagacagcaggtcctgccaaggtgggtcaccacacttccagttcactttccagttggatcagctacagtgaaggaaaccacgaaaggggctggaacggcctccacctggaagcagactgcacggcacatgttgcacatataaaagctactcgtttaagcatggattattttgtggaatgagtaatgaggaaggctggctttcacctctgatgaattttttctggccaagagccagtagttgaaagtttggccccatcttctcctcctcctcctcccctcctcctctccttcctcctctcccccctctcctcccctccctctccccctcttcctcctcccctcatcttcctctcttttttctccccctcttcctcctcctcctcctcctcctccttcaaaataatttccttttttcgttttgtgtcactcattgaatgacatgtgacatgcctcttcagtttttaagtggtgatcaactattgcctgctttggcagtcagtgtttatcacagtcagcaaagtctaagtagcttgtttctggcatttccttttatgtttgagtctacagtgtgtgtgtgtctgagacttgaagcctcacaagtccatcaaggacttgttcacctcagctcagagataaagcaccttaaacctaagatagttgaaacaaattagtgtgactatattaaatgaccagaagacccttttaaggttgagatacaactgtttcaagatagcagtgtgaaatggcttttctgtgcaacttgaaaaatggtcagcaagtaaagtgcttgccaacaaggctgatgggatgaggtctgtccatgggacccgcatggtggaaggagagagccgacttccacaaatcatcgtctcaccacacaagccatgcatgcacatgcatgtgcatgcacacacacacatggacacacatgcacacacacgtcctgtctaaataaatgtaatatttaaaaatcatttgtaaagaatcatttccttagaaaagaatgacttttctaatctagcctaaaatgtcatgggtgggctgcattctctcagttattgagcagtttacatattaaaatctccaccctcttctgtgagtacaaacacattatttctacagctctgtttctacactgtattgtgcctttgaggcatgcatgtaagagtgataacttcgcatttattgaccttgggcttcagcctcatggaaatagctttattggctgaatttctggttttagtggaaatatacattttatatttttatctctgattacatggctctgtgtgtggtggaacagggcggtgtgtgtgcatgagagtgtgggtgtctgtggagcccagaagagggaatcaaacccctgaagctggacttgcaggtaatgagtcactcaaggtggccgctaggaattaaactcaggtcctctagaagaacagtggagtcttgactgccgagccacctctccagctctgttactagaggtattttaataaaatacgtaggtatttatgggtagtgaactgaaccgagttatttcatggtatagggaacagcattcttctctgtttataaatgatttttgtggtgataggtcagattataaaataaataaaaatttaaagtattaaagaccttttaccaatgtacttaatattaagtgttatgtaatttcatatttcaatttgccaattacaaaatgtgtactatttgctttaattatgtagaacctttcatttgtttttgcttttgaaaacttcactcatttgatgggtttgcatttaatttgtgtagtttgctaatacgtctaagctagttctttctatttgagtatattgcaatccagacagttataatattagacgtacaggtctggggtgtagctcagtgataaagcacttgcctagcatgtgagaatctctctgttaggtccttaacactgcagaagggggaaagtataagatatccactgagccaaaatagtgcttgttttatccctttcttatcctgtgcataagatatatttacagtttatactatttatctaggaaaaaaacaacagagaaaagtgttacttcttataaatatccaagaatttagaaaatgcattgttacatattaaaatctttaaatatctttgtaaacaagcggtgaccttatcttatttttcctttttcttctttttctttcttttttgtcttcagatattgatgaatgctccttccaaaatatctgtgtctttggaacctgtaacaacttgcccgggatgtttcattgtatctgtgatgatggttatgaactggacaggacaggaggaaactgtacaggtgaggacagccaggatcaactgcgtttcattgcttggcaccagtactccatgctaaacatataaactcctcagagttttccggaaatatctgtacattaggctgtgcatgtttccaaaatagaaaagtatactctggtatattcaccttctacaatgaaacgcatttgtgtttagataagcagcttcattatttaaaacaaaaacagtaattacatatgtgtgtatgtgaatttttacgtatatatcacatttcttatttttttaaataaaatttactataaacaacctgtagttaaaagccatcacatactaaaattaactaggaccatggtctgtgcctctcagtgaacttctatatgggctgaatagtgattctgaacctgtggagcacttaaatttcttcctcagaattgcaacttttagttattggttatatgttaggatattaaatgacattgttgaaaatattataattttctatgagttccaggacattctacatagtgaatttcaagtgagccaggactatatagtataatactgttgtctcctgcctccctacattctgcaaacacacacacacacatacacagagggagagagagagagacagagacagggacagagacagagagacagagacagagagacagagatgcaccaagcatccattaaatccttaccattgcagaacctattttgtgtttaggatgaatcttagtctttagttagctgagtccttcacagtgacctttagtaacctgggagagaggtccactcagtttcttggaacagcactttgtatatggaagtaaagatgttaacacgggcatctggaatgttcacagatattgatgagtgcgcagaccccataaactgtgtcaatggcctatgtgtgaacacgcctggtcgctatgagtgtaactgcccgcctgacttccagctgaaccccactggcgtgggttgcgttggtaagtgaaagctaagtgaaataaatagaatcacgtaaagttgaatatttcaactctcgacaatgaactataataggacaattttgagtacaaaaccaagaaaggaggtaataaatatttacatgagtagtgactaagtccttactaaaataatgagtttttttcagtatagatttgctcttctataaactctatttttaaaattattttaaaacattaaaaaggatctgctgaatgcagataataaagaacaatggccttaacttctgaagaacctacaaaccataaatttgtctggcttcatatgccgaagatattaacacactgattctttgacagatgtgggtaagatttgtggtgatacagattaagaaaccaatttaatcaactgtgcagatgtttttaaatgcaatccaagccatcaagaagctgaggcaggaggattgtgtattagagtctcgcctatgctgcaggatataacctcatctcaaaacaaacgagaattataagcatttggatatcatagaattcatgcacagtttgtccaaagagcaagcatgtcagatacgtgacaaaaatgtaatttactgaaatttttaatggacgcattaaaaaccgtttttatgagagcacacacagaagctattatcaggtcattggaatggtccaggaggaaaagaaaatcaggaatggagaatgaagatttgaaagggggaaagagaaaggaaggaatgtcgaatgaattcaaacctaataggggagggaccatgagttaacttgggtctctgtacccaagatttggcaaccgaaaaaaattgaagtataaccacgagaagcagccagatggctgtgctgtgttcagccagaagtgaaaggtactttgtggactcataaaaactttcaaaatactctggttgggatgagacctctttggggggagggggcgtggcctggcccagaacagttcttctgaagaattactttggctacaaagacaaaaacagattggacttgggccaaagatgaaagctgagatacatacgagttgggaaaccattgcaatcatctaggtttaaaaagaatgctgatatggggaattcaggctaaggggaaaaggcagcggtgacgtaagtcgtcagatgcatcttgaagataaagttagcaagccttattattactggtgtgaaaggagaatgagtgtaaagggttagaaatggcagcaaggctggacagctgaaaaagataagggaagttccatcgcttgaaagccgctaagacagggggagaggtagcacagagagaggagtgtccaggttggttgttgggcatgttgacttggaaacaagtagtaaagaaataagcagaaaggtttagaactcagaagaaaggtgagagaattttgaacttgaggtcatgggtgggacttgggggaggagtaccatctaaagccaggggtcaagatgatgagtgtaaatagagacaggcagtcttcagagagatgcagtttgccagactgaacaatccgcaactgttgcagtgaagattaaaataaaaccatcgggaggggtgggtgaaaggtagactgagattgttaacatgttacggacttagttacatttgtatgtctccgaggtgtgccaccacttcttcacaaactcatgaggcagattagtaaaaccccagtttctcttctgttcacactacttgaaatgtccagagggcccccaaataagaactgcctcactttcttgcttataccacaaatagacagaaatcattctgtggtttctagtgactgctgctcaccatcttttacagttgacttgatcttgtgatgtttaaaagccgaagtttatagcaaaagattgtattgtgctaagaattaggatgtaccttccctgtcaacgtacaaaatcttgaacttggtcctttaaatgccttcctgagaatttctccccacagtggggaccactttaagctcttctgttgctctgcagacaaccgcgtgggcaactgttacctgaagtttggtcctcgaggagacgggagtctgtcctgcaacacagaggtcggcgtaggtgtcagtcgctcctcctgctgctgctccctggggaaggcctggggaaacccctgtgagacatgccctcctgtaaacagcagtaagtatggaacagaaaggaaggaaaacacttctgtttctgttccaggatctagaaacaagttgctattgtatcctggactgtgggcagcgggaggggtggccttggactgttgtcagtggttatgctgaaatccgccaagagtgttttatagagaaggaatttcagttctgtccttcctatttttttcctatcgtgtttctctttaaaaaaatatcatctcaaccacaatgcagtctgaatggtcataatatggactatgcgtgggaccacagataaaggctgtccccagtccttcttggaggttgtttgttcaagttcataagtggagtgtatcctgaagtcagtcaccacggagcactttaaaagaaaacatgtgttctgatatgtacagaacccagacctttgtaccatagactcctggcatttttttttatttacttgccaaaatatttgtgatatgaattatctaaaaggaagtgttttcttaaaaaaaaaaaaactaaacaaacatggcttttgttatcctactgcaagtcattgaagtaatgatattttgggataaaatgtgatatacattattgaaaatgcgtttaaaaggacacaggaaaatgcagacacccctgaggctgtgtgatttgagcttggcactgtctcaaccgccaggatccagggatcaaaccgcttgcttgctttccattgttttgcagctgagtattataccctgtgtcctggaggcgaaggctttagacccaaccccatcacaatcatcttagaaggtaagcccatcaccagatgtcatgtaggcttaaataagctaaataaatagcctagttagagggaagctgggacctgagactaaagtcagtgtgaagccttgccagaagaattcatgggcagaactgcaggtaggcagtctgtcacacacatgctatgcaacagttttaccaagaagtagccatccattcccggcatctggtgttcagttgttgtgcagagaaacccttgttacattgtccccagcaaattaccgacagcttgcttccattactctccccagaaaacagcaggcctgcaaaaaaggcaagaaaatcacagtcagaataaacccagcacctaacggcattcattccttgagttgcacagacgtctgtggtccatacaagatgccatgtttgaaagctgcaatattgactctttggtcatgatttttatcattaatgggttgtctcctcttgtagacattgatgaatgtcaggagttaccagggctctgccagggtggaaactgtatcaacacttttgggagtttccagtgtgagtgcccacagggttactacctcagtgaggaaacccgcatctgtgaaggtgaggaagcctgggatgttccctatggtcctgcatccttcatcctgcaggaggggtcttttgagactgttaatagcttttttttttctttttttggagcaatgctgttcatttgtatagtgataaaaccaatttgcaatgatttctcaaaaaaaattttctgagtaaattgattgatgaaccataaatggaaagcagaattgcaatatgaaggtggtgaacactgatatttttaagtaggaacaggcaaacttcaatgtgactgtaagttaatattggttgatactttctgaatgtcagatataataatttctgaatgatgggtataatataaagaagttgggatgtcgtacagattctttttccccctccccccaccagctcttgtcacataccagttatagttttatttttaggtgactgctattgtttcaagttctggctggaggtgtagcatcagtgtttgtgtgggatgaggtgttgcctctagagctgcacattaagaatataccattattacttcagttacaacctttagttttgaacttgttggtgaaatgcatctgaaagaaatgtgacttaataagaaaaagacccactagttagcctgcaatgagaacctgtgagaggcttctaatttgaaaggagggtctcatagcctgcattcagttgaaagttgctgttaaaatttaattcgaatggcatgggggatggggggggggaacagacttcaaagaaattcctcttggagaatgtgaatttccgcaaatgtatacaggcataaggcaaatttggttttgcctctttagtctatttttgtaattcatagtatttttagggttaggagctttttgttttttattttttcttttccttaaagaaatgtggttttgtggcatgtaaatgtaaacacatcatttggggtttttttctttttaatttctgaatcttataaacatgaaactaggaaatcacttgggatctgcttagtaagctacgctatataaattcatagagcaatcttaactcctggacattcctgcctgttgtagatatcgacgagtgctttgcccatcccggcgtctgtggacctggcacctgctacaacaccctgggaaattacacttgcatttgcccgcctgagtacatgcaagtcaatggaggacataactgtatgggtcagtagccctcactgagattaacgacccgagtcaaggttgctgctggctttgtacccgcggcacttccgttctcagatttgctggtccggaaagtttggaaactaaatctttatgagtggggaagtatttcagagtcctatgaactgctgctctgcaaatccgaggtttaagggagaaaaaaaaatatcaagcattaaagagttacagatcttagaaaattccgattgtctatgtttgtgaaactgcatctgcatagatgagaggccatttaaatgtcaacagttacctctttttttcagttcaattaattaatgaaatttttttcaattaagtggatattgtagtagagaagggaatacatgacacaatattgtcacctgtagaaaaataaaatgccttgcctaaaagcaggacatgtcccatttgaaaacaatgagcgagatagaagcttttccacaattgtgtcactcaggaaagctggctgagaacaagccggctaaccgcggctcactgctctggccgcctcactgacggatctctctccatgtagacatgaggaaaagcttctgctaccgaagctataatgggaccacatgtgaaaacgagctgccttttaacgtgacaaagaggatgtgctgctgcacatacaatgtcggcaaagcctggaacaaaccttgtgagccgtgcccaaccccagggacaggtaagcacagctcaggctctgggagaggctttgccagtgatacattgtcacagtgggtatgtattccatgcccaatggcaaggataggtaggcacagctcaggctctgggagaggctttgccagtgatacactgtcatagtgggtatgtactccatgcccagtggcaaggacaggtaggcacagctcaggctctgggagaggctttgccagtgatacattgtcacagtgagtatgtactccatgcccaatggcaaggacaggtaggcacagctcaggctctgctgaaggctttgtccgtgatacactgtaacagtgggtgcatactgtagccagagatgctcaatctcagagagatctaaaaagcttgatttcccaaatggcatgacccactttgggaaccaagcagtaacttctgagacatgtcccataatgtccaaatcttgaaaagaggcattgttgttagagtttatagcctttctcaatttacaattattatcaaacaagactggccattccttccttcatccatccattcatcaaatgaatttattgagaaactactatttgtcactgtgttcagcatagaaagtataatattttggcaaagtaacttaaaagctactaacttcaataatagttgtttaaattaaatcttgaaacatagattaagaagtatttgttaatgaactttgcttgagaagtatataaaaaagtatttcataaataagttgcatagaacatcttgttaatgtgttccttgtgcagttttccatacaacacacaggaacctttacatgaccacaattttaaaattatttttattattgtatgtgcatgggtattttcctttatgcatttctgtgcctggtacctacagaggccagaagggggcattgaatctccaagaactgtagtatagataattgtgatctgccacaagggtgctgggaactgaaggcagaagggcagacagtgccctttgccactaaggcctgtctccagcccagcatggagggattttttactagcacaaattccattgaaataaaaggtgagccaccacgaagaccagactagcaaccacttgccttttaattactctccgtacagacctcatgtgacctagggaatggtcctttttcatagtcatagacccctgaagttgaacggagaggacagatgagaagctgactgtgcatgtgtcaccaaatactgacactgcattcattcaagcacttcagttataagaatgctaacataagctcaaggagagaggtgtggacaannnnnnnnnnnnnnnnnnnnnnnnnnnnnnnnnnnnnnnnnnnnnnnnnnnnnnnnnnnnnnnnnnnnnnnnnnnnnnnnnnnnnnnnnnnnaaaaaaaaaaacaaaaaaaacccgagggacccttcttagaaatgacagatttattttggctcatggtttctgaaagtcaccatcctgcgggcaaaagccaaacaaagcagtttactccggagtagcagaagcttaaagcaccagcttgtgtacagggtgtagaccagggggcagaggacaaaggcaggagccagaagcaggtgtgaccgtgacccctaaagacaagccctcctggatgtcttccacctaatatgcccaacatacaatttatacaatatacaatttatctatttaatatacaattatcgataaaccatgcatttaaaaaggccgtgactgcacaaggcacagatgcgtgggaaaggttttgcaatggagacacaggccagagatgacccatgaatgaggcgagagttttgtcttcttcttcctttttaaacatccctacctgctggaatatgaaatttgagaaataaaaggaacaatttgtcatgagatgaaatataagactgtaagggttattcttacctaaaattcaccaaatcaacagaaacttaaagagacagtgactcgttggagcaaaatgttttcagtggctgttatgatacacgtgtgcacaactccacagactacagtggtaaaaatggatatgacatgtgattctaagtgccatcaatatgagatttgctcaattcagtgatttctaatagactagtcacttttaggtcagtctatctgtctgtctgtctgtctgtctatctatctatctatctatctatctatctatctatctatttacctaccttccaacctacctacctagcatggcttgcccatggagtagcccctccctgctactgttgttgatctcaacttctagaggagttatcagaaagagtaaatcccctgcttggattgcccaagtttcagatcaggtctttgatgaacatagagaccagtttcccaaacctaagcccttcatttccttccactgaaaaaaaaaatgacatttattttcccaaactagtaatcttggactttagacttatggagctttataattgagaagggtaagggcgcctccacttcctctcatggaacacagatgggcaagagaaggctaaacacacccatcaaagctgcctccacgaggaggggaaatgccccttccttactcactcttcaaatgcttggactggagcttgatacccaagctgctgctttaagactggctgtgactaatatcgcactgttcttgttggcgaaaataatggcataaaggtattttaaatgtgtctgctccacagctgactttaagaccatatgtggaaatattcctggattcacctttgacattcacacaggaaaagctgttggtgagtttgtccccattgtatttgggaatgtacatatatacatatgtaaacgtattcatatgaatcatattttgtactcacatgtctcaattcaatagtactccaaatatcaaatgatctggactccaggctaatgtgcttagttaataaaccgagcaacaatgcttacattacgttgaccaagtgttaataaaattgttatattctatcagcatagcctagcaattaaattataattactttgcaatctcaagattccatgcatgccacacataaaaatgtgaatttccttgtcatgcatattgttttacatggttaaataatctacctcattttgtgtatggaggcatggatgtgccatatgtatatatgtgtggttacatacgtgcatgtgtgtcagtatttattaaaagccagagactgacatctcatgtcttccctgtctctctctacactattttctgaaacaggctctcccactgaatctaaagatcccttattcagctagggaagctggccaggaactccagggatctaccctctctgaccctccccatcacagccctgggattacagataaaagccagtgtgtccaccatttatgtggctgctagggatctgaagccaggtccctatgcttgtgtggcaagctctcacagaccgaaccacctctccagctccacacgttattttaatcactagttagtcttttcaaaagtagagcttaaggtttcagtatatttttataccatcccctttgtttgatctcatttgaatatacagaattccttttccgataaattacttccatctgaatggacttcagttgctaattctagttttttctccatggcttaagcaatatgattttaagtctctctgaaggaatatatttgagcaagtgtataacgaaatatatcaacttaaggaaacatagctttatcagaggattggcagctgtttgggtgacctgatagaacttgtggttggggctcaatgtccccaaccagggcaagaggttcacttgtcttattgcccactaaggtcacttgctgtgttttacaaaccatcttcactgttctaaagctcttttgggaaactaactgctctgtggtctctagttcttcagaaaccacaagactgtttatgccagtttgtatttgacttgaacagagagtgcatattttcacttcaggctacacatagcatcatccttacggggtaaggtgttaaggatgtgtagcagagaaccacgtgtattttacctaatccgttccatttcagacattgacgagtgtaaagagattccgggcatctgtgcaaacggtgtgtgcattaaccagatcggtagcttccgctgcgaatgccccacaggcttcagctacaacgacctgctcttggtctgtgaaggtaatctgagaaagatagggcttctaggagggcgtccagttttgtgtttatgagctgaggacatgaatgtgaccccccacccccaaccccacccaaagcgatagtgaacagctgtttacctggacctgtcactcttgcagacatcgatgagtgtagcaacggcgacaatctatgccaacgaaacgcggactgtatcaacagccccggcagctaccgctgcgagtgtgcggccggcttcaaactctcccccaacggggcctgtgtaggtaagcaagaggcaggcggtcaccaaccacagcacaccgtgaggtcccctgctcttgaagggctcccttgcttcccctccacagcatcctctcaggatgactttagaaggactgtctaattctatctctctgtcatgctgaaaggctcccaccgtaactttcagattagtttgttgaggaaagaggttgcttcggtggatttctctggtagaaaatagaatctttgaggtcccagtcaacctacaaaacttgcatgactggaggggggggcactgggttcttgaaaggcttgcttattttcagtcagctattgttctggttcattctcagcctgtctataataattaatagcaggttagagaaatgctctgtgcaaaacaaaggaatcttaataaaactcagatatatgtataacatgtgtccctttctttctttctttctttctttctttctttctttctttctttctttctttctttcgttcttttttttttcttctttttctgttttagatcgcaatgaatgcttggaaattcctaatgtttgcagtcatgggttgtgtgttgatctgcaagggagttaccagtgtatctgcaacaatggctttaaggcttctcaagaccagaccatgtgcatgggtaagaagggtgttctgtcccagggagtgacgtgaggctgggacttaagggcagatgatggcaccaccatatgacctcagcaacgatgacgtctctgccatgctaaacagtttaaggctttgatgtaaaactggcaagcagagacaataccatactaggttctcaaatgctcagcaagtctcagcattttgctccagaagttcctatgagatgatgtgcgttcaggcacacttggggctaggtggaaatcacccacacagcatattttggagtgcaaacgaggagtaagggtgaccctactaacataagcaccatgcaaatacacattcttttttattgagaatatagcttaggacgtaacagtatcagtgtcagctttaactcttaacatgattgcagaagtgaatataaccagcgtctttaaaatggattcccatcaggcaacatagcagctacataaggaaatgctcacagtcagctattggatggatcacagggcccccaatggaggagctagagaaagcacccaaggagctgggggggatctacaaccctataggtggaacaacaatatgaactaaccagtaccccagagctcgtgtctctagctgcatatgtatcagaagatggcctatccggccatcagtggaaagagaggcccattggtcgtgcaaactttacatgcctcagtacaggggaacgccagggccaaaaagtgggagtgggtgggtgggggagtgggtgtgggagcgtgtgggggacttttgggatagcattggaaatgtaaatgaaataatacctaatttaaaaaaaaatttttttaattaaaaaaaaaaaggaaatgagagtggggcttaggttgtttacaaaggcacatggtaggggggggggggtgctctgaagcggattgccagaatgtcccaactctgatgtcagtagggggctgggcctctgccagagttcctctctgtgcttcatatttgaaagaggaaaattggatttaaaatttgcttattcagatgtagcacgctctctgtgtgggaaggccaaggctgtgtacccaatctttggggattctagacgcttgctgagtgagtgtgaaagccgggtttcaatagtgtggaagcgttcccttcgtggagtatctgtgcaacgaggagcagctggggaaagcctcagtttacccactgctccctgagtgcaccttcccaccatgggctgccccagagtgatggggaaatctctaactggcgcctgtgcggaggctatcacaagtccccgtcccctgtccatgcacattgtgggaatgcttgcttttacaagagacacgggggtctccgtctatgctcttgcagagagtataatccgcccttcgtccccagatctgtgatatttatgacccagaaattcatatgggaaaaaaaaaaaaagccgccccagtgttagcagttcttccatgataaaagtcagtcagctcctcggacctccgggacacagctctccttctaaagagctgtgcctgttccttgtacggtggctctctgcaggctggcctcccagctcaaaggccttaaagggactctagccagtccaagaatgaccgaccatcacagctctggcagaccttgtccttcctgagtcactctgcctcgctaaataaatgaataaataaataagagttagattgcatttctaaagctacccaccaaggtctgttcccttatttggccacatcctccacctgagactgactaccgaggtctagctttctaagtactgaagtcaagcaatcaaacgaccactttgagctgccctaattagcattcccaatcaaaatgaatcctaacatgggtttcaccttcaacttttataaaccaccaaccaccattgggccatggctgtctcctctccatcaagaggagtccttttgtccccctcccagacaaatacccctgtcccctctccctcattttccttccccttcttctttgttctctatctcctgtctttgtcccttattccacaacctttttccctctggggcacataagtctcctttgtgctgagaacttggttttgggggtatcctgtgctgaaaccgatccttccgggccctctgtctcctgtctggaataaaactgttcatgccaggaattttggaaagcttatgattaattctaaatgaactccttggatttcactatttcatcaaaggggctaaagttttccttctgaagttaagatatataaattctttaataagtgttaagaatattttgctatttgacaagcaagcccgctctctgcaacatctctgccggtggcacgcctctccgccctctgttgctgagaattgtactgactggtagggaattaaactgttttctccttcgtaaattcataagtttgatttgcgtcccccttttcaccttcttatttttattaagtaagcttgggtccctagcactctccttagtgcgggcaagaagatgttagaggtgcatgcctggttctaggtaaaagctgagttcttcttggcagatgttgacgagtgtgagcggcacccgtgcggaaacgggacttgtaagaacactgtgggatcctacaactgtctgtgttaccctgggttcgagctcactcacaacaacgattgcctaggtaagtctttctgtcctcggacctcctttatccctgcagaatgtaccgaaataaaaaaaaaaaaatacataaataaaaccaagagcacgggtgacttttgttgctaaacttgcacgtgtgccaggaaataggcaaagccattgcgaacccccagttgccctcagtgggccgtgtactgtttccagacctttcttacaaatccagtctatcagggtgaaaggtcactgagatgcctgtcagtggatcaggactgatttagtttaggctctctgtcccctcgtggtgagacagagggaccctctcttactcccgtgttacacctcacaagttgtacgacttcattcctaatccacacttgagcctccgcagatttctacacacacaggtctgtgtcttaaaatgtccttgtccatcagcttcaaaagcctgtatgcctttccccacccccactccccaaaaatgcacagcaaacaggttttgagatgaaccctcaaactgcagtggtgcctagtacagggtttcagcttttgcctcacaatcacatacaattaggacatgggaactgatgctggagatgtccccgcaaggaggtggagcaaagataaaaaaaaagggtaacagtgatctattccctttgtcatttgtgtacgatccttatgtacaggtaaaggaattgggttatatcccatagtcctttctcctctgccaaaagaaatactctccaactggggggaaaaatggaaagattcatcttcaacctgtaagactttagtttataaatgtctaaattatagctcacgcccttgaaaaactgaggagtccctccatgttcccgatagggataatgtgtgccgttttcttttctgttattagagtgcggtgtagaccttttgtaagtgtgtgtcgacacgttccccactgaagcactgactcctctcttgctttgcagacatagacgagtgcagctcgttttttggccaggtgtgcagaaacgggcggtgcttcaatgaaatcggctccttcaagtgcctgtgcaacgagggttacgaactgactccagacggcaaaaactgtatcggtaaggaactggtggcactcgcctttaatcccagcactcgggaggcagaggcagggggatttctgagttcgaggccagcctggtctacaaagtgagttccaggacagccagggctacacagagaaaccctgtctaaaaaaaataataatgataaaattaaaaaaaaaggaagaaacgaaaagaagagaaagaaactgaagctgcgcagctaatgagacaatatgaactcccacaggcatactctgctcatccacatcacatcgcaggactgccacgacctgtgtcggggtattaactgccacctgggaagacatcatagggagagtttttattaggggtagtgcttgagagtaggtctcaataaatgtacatgaaggaatgaatcataacaattaacagccttatgaaccagctacaatatcggaggagtgacagggtgtctttgtccacagtgacccaacagatcagagggcccaagtggaatctatgtcactgtcatttagcagacagatgtctgcaatgattgtctcatgtctgggttacattttttttttttttggtcttctttctctctaaagatactaatgagtgtgtcgcacttcctggctcctgttctcctgggacctgtcagaatttggagggctccttcaggtgcatctgcccccctggatatgaagtgagaagcgaaaattgcattggtgaggatcgggttcattctgaggtcatgagtcgtgggggagaaaaaagcgtgtgggagaaaaacaaacatcaaccccagccactgtgcacatggaggcctccgggattaaacacatagctgcctgcatctgttttattgagccatcaaaaatggttgggttagcagcttagggatgtgggcttgtttccatcaacagaagtcttacttcgagtcaaggggttttccttatactctgtagccgcattctaaatgtcggggaagaccatctactaaattttaaaaatgtctacagtgtaatctttggcacgtgattttaaaatagctattaaaggtgtccaggctcatgaaaatatgaagcagaagcagaagcctcgatggttctcttgaccgtttcccctcttgggtaggtgttacttatacaaaagtagaaaatattagtccccttggatagctggtgtcttctacggaacagaacgctgttcagcctcagaatgggccctcgggatgccctgcagacccgatgagggcgacctccgcacagcccacttgatcccacgttctgtgaattgctcttgctgcatgattgacatctgaagcagccgcatccaagtgagggtttgctagcgcagagggatctcaaaggatgtctttgtctctgaggctttcattccatcacccatgtcaagatcctgaggatgaagagctctgatgttcacattcgagacagttgctagttaaaagggctacggacttcacagaattgaactgtgtttcagaccaagtgactagggagtatgagtatccaaagtcattctatatagtatatatagtttactatgagatccggtcatatcttctagccaaaataataaaagcatagtcaaatagtcaaatcaactggtaaaacgtggtaaaaagtttcttgaaagtttaagattatctctgccattttgttaaattttgtttgggggatatggaagaggaatttttatttgtgtatgtatatgcacagatgattttacagcaaagtaacaaagaaactctgtagtccatcaatccctttctttaaagctagcagtattaaccacaatagtgtggtgtgtgtgtgtgtgtgtgtgtgtgtgtgtgtgtgtgtgtagtgtataagcatgtgcatatgtggtatggtatgtgtgtggacagtattcatgtattgcaagtatatgtgtatttgtgtgtgtgtggtatgtgtgtgtatgtatatgtgtgtatagtgtgtgnnnnnnnnnnnnnnnnnnnnnnnnnnnnnnnnnnnnnnnnnnnnnnnnnnnnnnnnnnnnnnnnnnnnnnnnnnnnnnnnnnnnnnnnnnnnnnnnnnnnnnnnnnnnnnnnnnnnnnnnnnnnnnnnnnnnnnnnnnnnnnnnnnnntgtgtggtgtgtatgcatgtgtgcatggtgtggtgtataccatgcatatgtacaggtattgcccttattcccttgaaaccgtctctcactgaacctggaacaaggctcgcaggcagctagccctggtgatcctcatgtatctacatcttagagctgaggctacagtcacatgtgaccgacccccagccttgacagtaaattctggggacttaaacttgggtcttcatgtttgcacaatagccagtgagctctcaggtttggtcttcatgttcaattttggttcttcattgtatccactcccgccctcatatggagtgatcacgacagctgcatgtaagctagtggtatgggaatagaaacatgtgtgtttccgcaccgtagcatcataggtacctctgtcttgttgaaagcacccacgtctatgattcagtttacatttcattcgcattgcctttcttgacctaaaccttgctccttggacaactattatcttcctaagaaaagtttgtttttagttaaattactttaccctatactcattctataccaactaagtgtctcttgtaccagtttttctcagatgagattcctctaacatggtcatgctcagatgcaaacacacacagagttgtgtgcacacatacacagaggcatatgtgcattccacagacacggtggtgagaatgtggcagctctgatatatcacagtgggcttacagaagtgcagatttgacttttatggggtctcctacctaactggagagacatagtttgtgaatgaacctgttgaaaagcttttccttacaatagatcatggtgagccctgaacattaggtgtgtccgggatgtaacaacactttagaaaactgacgcaggtgtgaggtggcatgtcacagacaccagccacaaggctcagcagtcacccaaagtccctcctaagtactggataggaatttactaatcagagaaagataaatcataactagaagagatgctctggaagtgggcaccatagcattgggaaggctgaacttggtcctgtaagcatcacgagggagggagtttttaaaaagggatgtgatctgactcgtttattaaatctttagagagttaaattgaaagcatgtgccagacatcacagtgggggcagaaggcacaacatgagtcagatatggcacagcacagtcttggtattgcattctaactttcttgaagttgtagtattttgtctcttgaataaaataacctgctaaataagcatctctctctctctctctctctctctctctcacacacacacacacacacacacacacacacggtgagagagacagagacagacagactgaaaaccaatgggaaagattccttatattaaagtgtcagtctgggctttgggaaacgatactctcatggtctcgttccattgaccacatcattcagtaaaatcagtcgcatgtttagaaggtggcggtgtgaagagaagaacagagaaaagatgcagccactggtgaagaaatgtacagtaactgggtggtatccaaaactgtgtagagggtactgagtagtgtaacaggcagctactcacttgtgtgtaggcatcaaaaagccagagggatcccgggttgggtttccaaaggaggtgtttgggagagggtccatgggtcaaggctcaatctgtgagacatatatgtcagtcgtgtcagatagacagagaggtcccacccatagttatcaagtgtcaggacatggaggtgggcatgggaaactctggcatgtggctggctcaaattggatatgatctttcacttttaaagcaacagtttaccttaaaaggataaattcgctacctacagagtgtcatctgcagttccatttagtaaatatcctttaatgaatgaccattggagtatggacaggtagatttattttcaactgtagaaaggaatattgattaacaaactctcactgttctgtagatataaatgaatgcgatgaggaccccaacatttgcctttttggttcctgcaccaacaccccagggggcttccagtgcatctgtccccctggctttgtcttgtctgacaacgggcggagatgcttcggtaagtggtagactggcctcctctgtcgccctctctcttcattgggctagggctttattatgacaaaaatgaggtctacttataatacaccatgtgcaactgcaacccagatttctcagcagcgtctcagagactggccgtagaacactctgttagcgttattaacacatactctctgattttatgctaagagagaatttgtctcactgtaccgtttttatttcattgctggcatgagctgttatgtatcagtacatgagttgcctcgggcacagtttaatttactgaaagttaaattcgttgtttttatacagctttgatggaagagtcaacgggggagactgtgggaatatgttcccgacttaggctgattttacaaatccctaaacacatcataaaaacattttagatctaataacattttgtacgtggatcactttaaactagcaaatgaaagtgacccatggagaatgcccaggcctgtctcttaactactgatcttgtgtgtgccctgtgtcctgctcatgagaaatgttcgatcagaaccagtcacatcatattgtcccacgtgtttaaagagcggtgaggagctctgctgtttgctttcccgattagatactcgccagagcttctgcttcaccaactttgaaaacggaaagtgttctgtacccaaagccttcaacaccaccaaggcaaaatgctgttgcagcaagatgccaggcgagggctggggggacccgtgtgagctgtgccccaaagatgatgaaggtgagagcaatggcagggagacagagaaagagagggagagggggtgggggatgagagggagggagaaggagagaaggaggaagaaggagagggagggagggaattttgttgagactttgtagagggggaagttatacctttgtatagaactttgtataggttctgtgagcagccacttggcaagatccactcccgccccaacattcatgcacagcctgtgtacactgataccgagaccacccacttacctttccttctaacgtattaacactacgtgctttctgaaaacttaactgcagaggcgtggacagaagaggcaagaagaggatggaaaataaactccacacgactccacaagtcccaagctgaaagtgctaaagactagcttgccagtagagcataggactaacagcagcaaggctagagtttaatctttaccatcaaaaagaaatacatagataagaaaatcccatgtcggtgtaatttcatgggccgtggttctcagaatgttacacaagattccgagaactaaaatcaacacaatggcccaaaagcccccaagggatccatcaacaccagtgaattatagagtaacccccagcgaggacaccctggggagggtcggtcactaggttagaaatggtttctgtgtgtataaaggacagggacgtttttggacttcctggtgttaaacagagacagagtcctcaggctggtgcgatcctagtagaagctcagatagcctctctgagtctgctcagcgttgggtattaaaacaaaacaaaaacggtcatgtacagttgtgtaaacctttacacccagcactcgagaggcagaaagcaggccgatctcatgagtgtaaggccagcccggtctacagagcaagtttcagactctgttgcaaaacaacagaccagaaaaaaagatgaaagaaagaaaaggaaaagaacacactcttgtttaagatggctttgtacagcgttgactggttaaaatgaagctcttgagtgatggaagctctgtttctccacagttgccttccaggatctgtgtccatacggccatgggacagtccccagtcttcatgacacacgtgaaggtaggctctggcgcagtttatttttactgtcacattttataaaaatagataaatttctcatttattttataaatcatgctaattttagaatgccctgtagtatagtatgttatatctaaagaatgattttaatagtttatgagtcatataatatatatatatatatacacacacacacacgtgtgtgtgtgtgtgtatcatatgactatactgatacgtgaaatatctgtttttctgacaaaagaagtatgtatgttccattcatgttagttgtgtgcttagtagatgtggatatattagcatatcattctatatgagtgagctcatgggagtgtcctattttagatgtcaatgagtgtcttgagagcccaggcatttgctcaaatggtcagtgcatcaacactgatggatctttccgatgtgagtgtccaatgggctacaacctggattacactggagtccggtgtgtgggtgagtattggctctgtttcccatagctccgacgccctgttgtattcttctgtctgcccaatggcccctcaggtagctccagtggtggtgggaagatttagaaaaccaggatgagctgataacagtatcttcgtctctcctaccttttcccatgcaacttgactcgttatgaagatggagtttcctagtatctgtctgtaaccaattatacaatctctaaagccttgggatgtagttcaatgataggttatatgtgctttgcatgcataaggccttagtttggtccctagcatttaaaacaagcaaacaagcaatgaatgaatgaataaatgaatggcaaagcctgggtaggagaataactaggagaactgtctgttttgtctttgcatccttcttgaagcagatgtccacagacatcctctggcttcgggactgttgcagaaagcattaccatctgggactgagagccttgcaaagtggcccttctggtcactttatgcactgtataaaagctgaccagggccaaagggaaggtgctgggaaggggtgatgtgtcactatgccctcatcggatccttgaaatgtgtctgggcctctgcacggcttcctctgttttgcagacaccgacgagtgctccatcggcaacccctgcgggaacgggacgtgcaccaacgtgatcgggagcttcgaatgcacctgcaatgaaggctttgagccggggcccatgatgaactgcgaaggcaagtcctcctgccttgaggctcgactctctcttcctttgagaatacagaattcctttttgaaaattgcctccacctttagtcactgtgttattctcctgttcatactcatgccacgtaatttccctcacctcgttgagcagttccaagggttcttctacaccctggtctcctgacagcatcccctgagtggctcggggacggccttcatcattttccctttctttaagactatgttatgttttctatattttcgtggcttcccaatatattggttaacttttaatttatatactctggatattgggaaggatacatcgtggactcagttacattgcgttcatgccttttttttttccctatagcagagttaacttgtgtagacacagtcgcagcctgctcaggcctttgaaggctctggtttcagttctacctttggaacctacaggccagcttctctgggcttcgtcccaagcatacatagtacagtcagcagcctaggctgtgtacacagaaagaaaaaagtccacccctctctttcctggtgctcctttccagaacctcactcactctggagcaccatggtgacctcaggattgtgtcccctgcacagaatattaggaagtttagatttagctaccaggctgccacgggcaggctactggtcatccttagggcggatcgggagaaggaaagagggagggtgaggtcaacaaatcgttaatgttagtccttgtagtttcctagctctgaatttttactcatcatcagcactccaggtagcttttgtaattcttcagcatatagctgttagcttcctggaagacagttttgccaggttctgtattgtatgtaccagaagcaaaagtcctggtacctcgttgcttcctatatgatctgtgagaaagcacattagtgtctctttcaagaaataactaagaaggcgagatgtcctgagtctctcacgctgaacgcgtgcccatttctttggccagacatcaacgagtgtgcccagaacccgctgctctgcgctttccgctgcatgaacacttttggatcttacgagtgcacgtgcccagttggctacgccctcagggaagaccaaaagatgtgtaaaggtaaggaaggccacagtcagggggtgagcggcagcttgacctgcctcctcctgcaccccttgacctctctggggcacctttgtcagagtgttacaggggggaaagggggtggagggggtgtcagctttgctgtagacttcctctcctagataacaggacacttaaaagtctgtgggtaagatggctcgagcatcccgttgctgtcacgtgcccaggcccttattacagcaaaagtcaccctcccctgacctcattctaaggaccagtcctgaaagtgttatacatctgggctgggcgtctttgtccctctgtcacaccagatgacaacatgacaagagtcagaagtacgactggagaattgctaacacctagcccgagaaacagaatgtgctgtttgtaaccgtttcccccttctgatgcatctttaatcaatgctctctagatctggacgagtgtgccgaggggctgcacgactgcgagtctagaggcatgatgtgcaagaacctgatcggcaccttcatgtgcatctgccccccaggcatggcccgcaggcccgatggcgagggctgtgtaggtaagttcccaagggagggtctctgagcaaggctgtcgctccaagccagatgtaacactgatcccagaggagctaaacctgagacggctccattccccgctgtactgaggctagccttcatgatctccacgtccagggtagcactcaaggctctggatcatgtggggcggaggggggggagggttcacgctgctggaaactgtgggggtgtcgttatttgtgagcctctgtgatttgtgtaagcatcaaactcagatgtgtagaaactgtccacgaagtacctctacccgtgcagccaaatgaaagtttaaggctaacagtctcaccttggtgtcctcaccttggtgtcctcaccttggtgaggggagtagataaggagcaacccagcattactattctcttaccccatcacctaacacatctgagtttcaatgcactcattgttaaagagatgaggtaaagctattacttcatggcccgtgccagtctggcctccctcacgccagcgtgtcagggctaccgtagccattgtctgtgtccttctttcctaaaacgctgtctgttacctgagccactgcagcccactgtatgggcttcctcctccctaagaacaggggctgtttaacttagaacctgttactcccctgccaacctccaccacctagggaaactgaggtctttttgtttttttaaagaaacaacagtcattaataatttcctgtttcttccaaaatgaatgccaaaataaaaaataagatttcttaaaaatgaatctcctccacacagttgcctgctacccaaagttagaacagggaggggctgcaagtggacaccagggatgcccattagggatgggaacgctaagattacactgtagcgacagttgtgcaagcctataattgaccaaaaaccattgaattgcacacttacaaattctatggcatacaaattataccttggtaaagctcattttgcaaaaatgaagccacgacaggaaaagagatacagggcatacagcgttacgctgtttgttctaacaaaaaaataataagggaatgaaaccaaaatacccattatagacacgtagatagatgcatagtggtatgtgtatgctagaaaatatacatagctgttaaaatgagtatggcaaatgtatatgcatccggatacggaaatagccgtgaacgtggagcaaagccatgtaaaataacatgtcattttgtaagaaactgcaagtaatatcatgtttcctgtagggtacatagggaagcatgtagaagacataggaaacgctttaaaaagagaaatcatgggtcacccccagagtgaaccaccgagaaagatacctcaattagaggttattcatctagagtggtttttacctttatctgacaattttgatctttggcaggactgaatttctaaagaacatgtatagatagcatagaccttaaaaatgcagcacccgattaaattctgcctaaaattccaacatagctaccctcttcctcctaacttactgcctgagatagcatatgaagaacaaaggttgtttgggttcatggctacacactgtctagtccgtgacccatgggcccatgcttcgaaattacaaccaggcctctcactgcaagagggagaacactcatccccaaaatgaaaacgctggagagaggctggggctggggtcccaccatccccttaggggacaagtctgcagggaccctgacaccctcctactatgccccatcttgaggtttcgccacttctcggtagcgccatctggtggccagccttcagcataccagcctttaggatacgttcaatgttcacactaaggcattggagtgtattgtgacttaacaaactctgtttgataatggtcacttggttgttgttcttgtccttttttttttttttaagtgtcacgttaagagtttagttacaaagcggttgactcaaaaccactctccgtgtagtacctgtccatttttaagggctgcgcctaggctccaaaatcaaagcatacgctcccgttcctcaaatctggcacaaggcaaagttgtaacttgtgtgggaaggagggaagaaacaccctgattactgtgcctaaggcacatgtgatcccaggtgctggtgtcacaagctggagccgccgtggcaagcctcggggctcgcatcttttcttgtgtattttgatgatagaaggtacaggtctttaaaaagtttgtcaggtccccaagcctttctgttataaaatgctatgggcaaggccatggtgatctcacagttagaaattccacacaaataaacaagatcctataaaaataaagtgtgtgtaaaatttaggatggaaaataaagtcaatatgaacgatgcgcatgcagatgcctcagagtccaagaaaatctctcagagttgatattcataaaactgtaaaccatgacaagctaaggactctatgtaggacatagaagagcccccatcaagaaaacagtaaagttatccagaggagtaaacttgatcctgccctatattgtagtcaaacaatcacttcttgaacaaatcacaacaaaatctaatcattaggaaaaaaaacacatcgatttgattaaatttggtcaaaaatgcatttataggcatctgaggttgtaatttagaagaaggcggtgtttattttaaagatggcatagagagatgtcctcctcaaccttgaagattttagaaatgtcacgggaagggatgagtcctggactatcctgccttaaagacccagccacagcagacagtgatgggcgtcctctaaacggcgtgtgcggttccaaccacagcgcagcggtttggtggcctgttgtccttcagactttatctagctatttccgttttcagaagtttgctcagaagatggtagacgagagacacgggagtacttctgggcaggcccattgtccccctacagtccccagaaagggagttgtgggaggtggcttggcacggtgctgtttgaatatagacaaacaggtccagacatggacattcctagattgagaccgaaaggtcggggacgaagcggtcaccagagagcctaaggcttagtgaccatctgatttagtataatgacccagggacagaaggcatggcaggtttattgaagatgttcatatattgagtccataggttccactttacgctattgacctgctgggttcctttcccagcaagactgaacagtttacacaaatatgtgcgtaatgcaggccgaacagaggggaagacaggaaggaagataagaagtggactggagacaactggaagaaaagggtgatttagaaaagtcactttaaccatctcttgaggaagataattaaagactcctgcgtggttttaaagttaccaatgtaatgatagaagctcagaagagaaatgggcccgcaggagagtttagaaacctctttagaagtaatggagtagaaacggggaagggggaggggtgctggagaggtggcccggtcaataaaggtgacgggcatacggtgcaggcatgaggacctgagtccaacccacaacacccaaacaaaatctgggttcagcagtgagcacctggcatcctagccttggagaagtgaaaagtctgatttctgggacttgctggctagccagactagccaaatgatgaaaaccgggtctagggagagaccctgactctcaaaaaataaagcaaactgaagcacaaaagaggaagatacccatggtaacgccaacctccatgcgcacctgcacacacatgcacatacgcacatctgcatgcatgcatgcatgcatgtgcacacactcacatgatagaaatgacagaaaagatgactagaaatgtgggtatagaacggatcagtaaaatgatacaaatggaagacaggtgtccacaatgtgcttacaaatataatcccttcaggaaaagacaaaagaaagctaagcagataaaaggtagtggagtgtatgagtattttagagaagttcttagggaaaagacttaaatctccatcaaaaggaaaagagacagacggacatggtcatgccctatagtggtaactacgccttttaaggaaaataaggttttgcaattgggcaggagatacttaagagagcaccttgggatctaatgaagcgacccctggacgctacaacatagactggaaaaataaagaaatgttgttaataatgccgttcctataaggagtctgtccgttgtaaggaggaagaagcagaagaagtgaggtcatttaggtggctatttaaaatcatctagactggggccatggtgatctgtggacagatctaggaaaaaaaaaaaaaaaacaataaacgaatcaacttctgggattgctgatggctgattaacaggatagaggaagggaaaaaaagtataaaagatgagaaggattgttaattgagtgagttgattggatggtgttactgtaaatatctatggaaaagactagaaaaagcagagtaatgggcatgaaaagagcagtagttggtggtccatgtgtgcagaaattgtccaaagagagatggtagatgctgagaatcaagatgtcctggatggtgtagctccacactgaggcacaccctatgaaggctacagatgttagcagcagtggagaatctggctttttgcaaacaaaacaaacaaacaaacaacaaaaactcattgccagcggcagaagagtaaaagttggagcacgtcaagttgccattcaaaggatcagaccttatgttaggcggttcatgcagccaaagctttgttggagagttgtttccaactgctagattataaattaatataagtatattaagcagggcagtggccatgcacgcctttaatccaagcacttgggaggctgagacaggtggatttctgagttcaaggccagcctggtctacagagcaagctctgggatatatgctgtatgtatctggatggatggatgcatggatggatggatgggtgggtgggtggatggatggatggatggatggatggatgggtggatggatggatggatggatggatggatggatggatggatgggtggatggacggacggacggatgggtggagagagagggagcacaccatttgagagagactcagatctaggagtagccaaactgagccctcagattctagaaacaaccaactagaaaactcgaaattcacaatctagctcattatttttgtgagtacccttaaaatttcataataaagttttccccccacaaaccagaaaatctatggattcacatcattatgaatttcagaatactaaaagcaaaatgaaaatacttaacacttttagagggggagggaggatagattcccttcaaataaacaaaaatacagggtaaatgaaatagcagattatcttcaatatttctaagggaaacaattttgaacttaaaatttcaaacttagtagtgtgtaaggccaatcaaagtaaggcattgtcaaaagcctatttggtaatttattttatattcacatgacctctctgaactaattaacaaactatatatttgaatttgaatccaagagtcagtgattacatatgtatagccacaccttagtcccaccagcatacaagttactagctaaagacgtttaaacagatggtgtgaaataaagagatggggcaggacctgaggaggctgaggtaagaggaaggcaacctcaactgcatcctagatgacacaggactagcttcaaaatgaaaaaaagcctagagacaaaagcccagtgggtaagcacttgcctagtgtgtgtaaggtactagattcaatgcatagtctcaaaaaattataatttttgaccctggttgagaattcagtaaaagaacatttcaaaaccatttaaaggatgctaccagaagagtggagagaaagtggtagtagccaaacctgagttggagacacgaggaaaggacaggaaattagattggcttgacagatgttaagagaagggggaacatcaccctaaacgtgaaacgtatgaagtggcaggtaagcttggaatagcaatcgtgcactggatcacagatacacacactttcaaagttcttttgaggaccagctggatgcttctgtaagaaacacaccaagacaaaggggtgagaggatggtgtgaaataaagagatgaggaaagacagtccaggcatctgttagtaaaaagacaacgcaaaaggatgtcagaacactgaagactaaacaaggaaggaaggaaggaaggnnnnnnnnnnnnnnnnnnnnnnnnnnnnnnnnnnnnnnnnnnnnnnnnnnnnnnnnnnnnnnnnnnnnnnnnnnnnnnnnnnnnnnnnnnnnnnnnnnnnnnnnnnnnnnnnnnnnnnnnnnnnnnnnnnnnnnnnnnnnnnnnnnnnnnnnnnnnnnnnnnnnnnnnnnnnnnnnnnnnnnnnnnnnnnnnnnnnnnnnnnnnnnnnnnnnnnnnnnnnnnnnnnnnnnnnnnnnnnnnnnnnnnnnnnnnnnnnnnnnnnnnnnnnnnnnnnnnnnnnnnnnnnnnnnnnnnnnnnnnnnnnnnnnnnnnnnnnnnnnnnnnnnnnnnnnnnnnnnnnnnnnnnnnnnnnnnnnnnnnnnnnnnnnnnnnnnnnnnnnnnnnnnnnnnnnnnnnnnnnnnnnnnnnnnnnnnnnnnnnnnnnnnnnnnnnnnnnnnnnnnnnnnnnnnnnnnnnnnnnnnnnnnnnnnnnnnnnnnnnnnnnnttgtttgtttgtttttaacttgttacttatttgtcaccaagcaaaagagtgccactgcctaaattctcctccctgttaatcacctttagaggccacagctgcacccgggatcccacgcaaagccttcttccctggtccccaccacctcagtggaccatctctcttcccacagctgtttcctcccctttcagaagctggccccctctttcatggaatgcttcctctctgggggagtatctcgatgtccacaaggacactatccctctcctacaggggctgggtcaagaaggaaactttcagaaaggagtcatctgattggatgaggtgcactgggagcactggtcatgtgaccgatttaatcccacctcctcagtttttttgtttttgtttttttttctgagacagggtttctctgtatagccctggctgtcctggatctcactctggcctcgaactcagaaacccgcctgcctctgcctcccaagtgctgggattaaaggcataacgccaccactgccttggtatcttgtcaaaggcttttaaatacgatgagaacaccgaaagacagttaggaagctgtggttttaaagctgctcgtaatttttttttttcctatgaagatgagaacgaatgcaggactaagccaggcatctgtgaaaatggacgctgcgttaacatcattgggagctacaggtgtgagtgcaatgagggattccagtcgagttcctccggcactgaatgcctcggtaagtgaacacatgactatttccctgggtgagtatagcacgtctatgacgtcatcgcagaacagctcggcgcattcacccttgtctattgaacagaccttgtacaaggccagtactccacacgccccgcccccgcccacagatacccatctattaaaatgatgtatctctatgcctacgccttacacgcccatgtaacaacctgaaacagtctttccaaaggggagattagttaagctctgtggaaaatgtgacttcagtaaggctgacatcaggagctgatttaattccaaaaaaagaaaatattttcagtgtgaggtaagctcccccaatactaatgcaaagcaaacgccgcacgtctccaaagcgcagcaggggttaatttttacattccagtccagaaaaataatttctaattggaaatatgacctcatgggcactgtagcacgctgaaccgatgctgaaatgtatacactgtagtgggtgctgttaatgacgggcagctgtaaacgtagggtgtggtcaacttaaaaggaaccgaagaaagaggagagatcaactggtaggtggcccggtcgggccaagcatcagatgctcatcagctcatcagcctgctgctttcattcctagggatatttttatacccaacaatctattttattacctgttgtctccgatctaggtctttcccagacgtatgtctttaaagacactactttctgctcatattatggtcttactaggacagttggcttatgagaccatgctgaaggcttttctccatgattgcatcacagaaggctctgtacttatattaatctgctatctacaatgcaccaagtcctctccctgtagacagtaacagcataactaccacgctcgtaacatagtcttaaatttattcttcatttccctacctagcatcactttgtctaacaggaaaaaacttctgatgtttcttcctcttgggttttctgggactatagctcctaacttgcctatcactttcattgaattaaaaagaatataattctatttctattgaataactcattcaattttccattgaataacttttgtcaagtttaatactctattcctagtataaacaccatgggggagggggtgtattgtcaacaagcaatcgctaagcatcggccactcacgcaagaacactctgagttttgaaggttttgcctagaaggagagcatgatggtccactgaaaaccaagctgactggtacccggtcttgactctcatcttgtgttccgctccagacaaccgccagggtctgtgcttcgccgaggtactgcagacaatgtgtcagatggcctccagtagccgcaacctcgtcacaaagtcggagtgctgctgtgacggtggccgaggctggggccaccagtgtgagctgtgcccacttccaggaaccgcccagtacaaaaagatatgtcctcacggcccaggatacgccactgatggaagaggtaatgcgctgaggggacttgagacgtcatatcagaccagttgatttcgtacatccaaattaatgtaaaagaaatgtaagaggctaattctttcaaaattctgcctgaaagtctggtactctatgcacgaatcaaaagaatattcttatattcttgcctaatactgtatacaggggtgtgtgtgtgtgtgtgtgtgtgtgtgtgtgtgtgttgcacacatgtgtacgcacttgtgtacacatgtgcacgtggaggccagaggaactctccaagtaggccaggctggcccgactatgcaccttagggatttggctgttttcatctatctcaccacccctggccttttaaaatgcagggtctggggctctaactcacatcctcaagcttgcaaggcgagagctttacccagagttatctccccaggccatgttccacaaagagatctattcctatgtcaaacccaagggagactttactgctctcacttaacagaggcggaaacggaagcacaaacctatggtaacaataaataatgtcccggaaaacgtgggcaaaccctatctgaccccaaaggccttgggcactaataacctccaaactgcacttgccttgtttgaagaaacggtgcacagctgagtgtgggtaggaattcattctgttttcaagctacttccacgctagcaggtttcatgattagctagaggtttccacttttctgtgtgtatgcatccaagtgttttgtggatgttatgaaagataaactggttccctccattgctgtaaagactcccagccagtacctgactgctaactgaagccttccttcagagtctcaaggcaggtgggacctggaggcccagatttatggatagtaagttatcacatatttcaagcggcatctttctaacacgtaccaaaaatggtaactcccacttagaatacaaaatgaagagtccggcatgagccttccggcatagccctctcgtggttttcttcccgtgtctctctctccctgcctcctcagatgcctctgtttccctcccagattgcccttccctgagaagtgaaaagggactttcccagaacttccctggtcgttccacctcaccccttccgacatcctcctcccgtccagctgcctccactgcgcacacattagcttctctcctcttgctctacagatatcgatgaatgtaaggtgatgccaagcctctgcactaatggccagtgcgtcaacaccatgggctccttccggtgcttctgcaaagttggctacaccacggacatcagcggaacagcttgtgtaggtaagatgtggctgtacacccggggtttggcaactcctgctgcctacagaccgagcaccgtcaggggagcactggcctatgcctcctacagaccgagcaccttcaggggagcactgagctatgcttcctacagaccgagcactgtcaggggagcactgacctatgcttcctacagaccgagcacattcaggggagcacaggccttttcagctttcactatgctgaccggaagtctcagtaatgatcctcttaatgacagagctcttgtttggtttgtttgtttgcttgcttgattgattgcttaactgtgtgggacacggggtccaggtcatctcagattctgtgcagtgggggaaacataaaaatcaaaaaaaaaatgagttttcaatatgttcattttaatttaaaacttacaaacgcatatctatttggtaaagaaaaggaagtgggcttttcctgtggatccggtgtgtttgtgtgtgaagaagaattcatttttaataatgtctcatgaagtgcagcaactaagcatcatctaaaagctctgcttgcaaagaaatctcaccaaagcatcctctggctgtttacatgtatttctcttctttaattcataatcatctgatctgtgccattttctgacaaacagaaggctgtggtagagccttcttgtacactttcaaacagttcttatttctatttccccggctttatgagacaccctcttaaattaccaactttacaaaggttaagcaaaaccgaccaactccacaaaagcattttagtcacacagtagaaacagcagacaggggagtagccaggagtgggatccaaatcaggagtttctgcgtgcagcaggcctccgttcatcccgggagctctgtggaggaaatggagattgtctgccatcagtcacagtcctggcagtaaagagttggcatagcccagagaggacagacgaagtatagcttagcatcaagattgtgtcagtcggtggttctcaaccttcctgatgctgttgccctttaatagagcccctcatgttgtgctaaccccccgtgtcctccccccaccataaaattatttctctctatttccccataaaattattttcgttgctactccataactgtcatttttatagaggagcagcatctcagtttgtaagacagtctgaaatgttatttcccaatggtggcgaccatcgtaaggttgagacccgacccgctgctgtaagtggacagcggggtgtagagatgccacaaagcaggggttcaccagagcttatgtaactccactctggggccaaacaaaaggaacagaggggaacgtggtgagaccctgagagaacagagtgtgcagagagcatctgtgagaagctgccgcaggaagccactgtctcagcataaacccacgccagagagacaagaggaaatgggagtgttcctaaggtctagtctagcctgattaagttgaagagcttcttgagtttggatttttttttttttttgagcctagacagtcgtctagacattacaagatctagccaagatctgtgcattgatcctcgaaatacgccagtctgctactttagagaaaactgttcttgctggatgaattcactgtatgttgtagagggaaagcaagaaggacggagtgagaatgtggggaggatggagaggctggtcctttctggtaaccaggactctcatgttgctctttcctctacttagacctcgatgaatgttcgcagtctccaaagccatgcaacttcatctgcaagaacaccaagggcagttaccagtgctcctgcccacgggggtacgtcctgcaggaggacggaaagacgtgcaaaggtgaggggagtctcagcagccactgcccatctttctctctctcttcaggaacgtttgcatattagccttgttaaagtgctgctccgggaaactttaccagggctcctattctagaagaaatggggacttaaaaatctaaattaaaatatgttgctccttagaaatgaaaagaaataaagtctgcacatatgcacacacacagacacacatagacacacacagacacacacacacacatacacacagacagacacacatacaccacacacacacattcacacacacacagacttacaccacacaccacacacacacacacacnnnnnnnnnnnnnnnnnnnnnnnnnnnnnnnnnnnnnnnnnnnnnnnnnnnnnnnnnnnnnnnnnnnnnnnnnnnnnnnnnnnnnnnnnnnnnnnnnnnnnnnnnnnnnnnnnnnnnnnnnnnnnnnnnnnnnnnnnnnnnnnnnnnnnnnnnnnnnnnnnnnnnnnnacacacacacacacacacacacacacacacacacaaaggactattttttttttagccaaggacctcaaatttacttcaaaggaaagtggttggaactgcttgtcatcacattaagcaaaataagccagcctctggaatgcaagcatcctgttttctgacatatacacaatctagactttcttttaggagtattaaaatgtcataatgaaacccacgacttcgtatgctatcctaaatattttttaaaataaaatttaaaaagaagtctgccatgaaagtgcagaactcttttggggaggtggtcatgggagagagggtgaaacaagacgagataatggggtggtaaatttgagcaagtcacacatttataaaataataccataaccccccccccattcatttggtaacttttaaaaaacatggatgcaagagttggtaagaaccgtcaggacctggagttctggtagctgccaacctcaggccccacctcaggcctacgcgcatccgcgtttactgcagacaggtgaggagtcggagtgtatgcgttaatttgtgcacacacacttattaaaaacaattagcatgccaggtctgatcactaacatggcttcagtgctgtgtttgattttataggaacccaatggtccgaacagacagtttaactgtgttctctgtgaagcaacattttctttccaagctatatttaaaaatcataacaataattacacacacaaaaaaaaaagtagcaagtgctgggattttcttgaacctgttcaaggaaatggttcggcagagctgactttttctgcccagtgtctgtaaaatgcttggaactcatacttccactgtacatgggacttactttgaatgtattttcccaaattaagttttactcaaatcaaaatcagattttgaagagtccagatattcactctaagtttatagttgttctggtcttgcttgtggggggcagggggggtgtgtgtttgttgtttttaagacgggtttctctgtgtagccttgtctgtcctggaacccactctgtaaaccaggttggccttaaactcacagaaatcctcctgcctccgcctctgcctcccatgtgccactcctgcctggcaggagctgtggttttgcttcttctcttataagtaatggtgtgcctgcccatttggatctggtaaccctccctccatttccaatctctgctgtgcttttatttaatattccctttaataagaatatgtaactatctatgtaccaaaccacattaactacaagatgggacaacttttccatgttacctttgcaaagggtggacctgctgtgttttagccatccagtttcttgttttaagacaattttgccctataatcctttagccacgctgtcccaattagcagccttctatacttaggctgctaaatatgtacattcaaaccctccctcatacacatatgggaacctacagactgcagctgaagtttaaacccaatccctcccacccccggaaaaatgcatgacttctcctgggcttctctgtcatttcagacctcgacgaatgtcaaaccaaacagcacaactgccagttcctctgtgtcaacaccctggggggattcacctgtaaatgtccgcccggtttcacccagcatcacacggcttgcatcggtaaggcaaatcgcagtcaggatctttgacagacggctcaatctggcctaaggatacagatgtttgctgaccagaacagcatccaccaggaagaaggcctggacatgcgtttgcacacacagtggccacactgtacggtgtctcggcatcccatcctcagtacagttgttagatcatggaagaagtcctgccatgcagctgtacagcaggcatattttaaaccatacttcagtgtcacaagccaaacacagctatgatgctcagatacaatacgattaaaggctgtcctggaacttctcaattttattacagaaggcacatttcaagagatccttagtctgtattatctaaaatggtgcctctagtaactctaaaatacattctagttacaagtcactgaaaaacccacgctatgctgctcttgctaataaattctgatctgacttaaaatgcttgccccaccaagtgaaaacatgggcttgtgcccctcagtttatttcatggagtgagatttaattgacagaccacataaccagggagcttgactctttccctctgtctcatggctttgctagataacaatgaatgtgggtctcagccttccctctgtggtgcaaaggggatctgtcagaacactcctgggagcttcagctgcgaatgccaaagagggttctctctggatgcctctgggctgaactgtgaaggtgagtccacgtgcacagggagcctgggtgtgggggcttcagaaatggttccataaagcatgggccattcaagcctgagctcagatcccagtacccaggtaaatgccaagtggtcgtgggacctcttctgtaatccccatgccctggaggcaggattggaatctgtgcagcaggcaggatagctacactagaggaatccgcacggtctgggtttagcaaaagaccctgtcttaatatacaaggtatagcacaatacaggaacacatacacaggcacacacacacacacacacacacacccctccctgcgtatccacatttacccatgcacaaaagaacatgcatatgcatacacaccacatacatatacacagacaaaaataatatttagactctgcacccatggtgcctcccacacaataggtatttttctcttaggaaatccaaaggaacagctgatggggagaaaaataagaaaactatcacatgggggtcttcagtgtttacgtggcacgtgctgacgtcacattcaggaaggcaacgttagcgttgtatgtctcggattctgacaccagccacatcacctttatgcttttgcattgtgttatagtttatattgtcctgttatccttttttaaaagttattcctagaaatagaatggttttccattctagatacaatcaaaatgtgaaatatgctctttgtacgagttataggacttttacatgcattttcagccctttttatttaaaacttttaatttttttgtatctgaaatcaatagacatcgaagcattctgagcctacagctgcttgccatgtgtgaattcagctcgtgaccatccacataaaataccatttattaattatccatgtaaatttgttacacacacatcagacatgccaattttatttcactcttttggggtagatttcaaagccttagttgtcattccaaaagtgtatgcatatattaacaaagaaattattccatatgtcgtaccacatcttgcctaaaaataacaacgaattcaaatactttaaagggatttgcatctaattagtcttgactgacaataaaaaaatatttgcgtgcaaagccattatattttacagataactccttagtgcttatatcttctccgcaatggggattacacatgaatcacttttgaatcaactacaatcgttaatacataatttaccaaataaatcataccacatggagctagtcaattcaaatgtaccacatttgtggcgactattgttgatttgctgaaactaagctgtgactcggagccctggtgtgctgtggttgctgggacagcataagaataaggtgatttcttatctcagccattcattccttgcaccatcactgactcagaaccgtgctgaagaaaagcccagtccctccataagctgtgcgttgtttatttgttcccattaaaggttgtgtttgagatgtgttcaccaagggagtgtgcagagtgtacgggggttgtttttgcagatgtcgatgagtgtgatgggaatcacaggtgccaacacggctgccagaatatcctgggaggctatcggtgcggctgcccgcagggctacgtccagcactaccagtggaaccagtgtgttggtgagcattccttggtggcccagcccttggcttttctcaacctcagtgtctggataagctaaataatagatgttacagttgcaggacagactcctaaaacctaaaagccagtttaaccatgtaaggttattgtgtgagagggctagggttagctcaggggaagagcacttgcctggcatgtgtaaggtccagggttctatcccacctctacgcactgttaaaagggcagacaggaaaagtctgcataaaagcattgatacacaaccgggattttattgtgctcatctctgtatttgtgcatgtaacaaaatctatcataaacatgtttttggaatatttaacggcacatcaactagaggtgtcgtcattttgacttttgatgtactgtgaggttggggctggtctcaaaaccatgctctgctgcttttcaatactaatttgttagatttagttcacggaagtgttcacccattaccctggtctaactctaaagggccctttccatccttttgtgacagggcctcctgtctataacttgctatgtagccccaggctatcctagatcctgccacctctactcccccagggcaaggacttcagacatacattaccgtgcctggctaggaattctaagtccccaagaatggtccttccgtcctcacgtatcacatagacttaatgagtattgcaaagttgctttaacatagaaaaagtaactagtcggaataaatgctgctgacaactccagacaaaaatgtgtataaaagaaagcacaacaggaattctgttctgttctctgcactgatagtaatcacggaagtgctccccataagaaacccctgatcaaagagaccgttattcttcctgagtagcctgactgaggctatacccaatttcgtagctctatttgaacacactccatagctgccctgtccaacacattgtgagagtagaagcttgcattgcccaacaggagagcagcagacccccttccccaaccctacaccagagagcagcagactgcttccttgtctctgaagtgaagatactacacacgccattcaaatgtgccgtaatgatccaccaaacgaatggattctatatgatcttttatgttcctctcaaaagaattttctaatggcagcttaatgagctgagaagaaaaccaaaggttttgtaagagaaatgaggtccataaagttcttcttatctgctctgtggcctcctgccaggccaggggccgatgcttcgccacagcagatctgcacatctgtgatgggaggagaggcagacagcctgtgattcagagcaaggcctgatgactacgtgtggggacgtgtcaccaatgaaacccattgttttgcacactggctaaaaatgataaaaaaataattttaaaaacgtgcagctagcaaagaaagataaggctaaagctttaaacgattatcaaagcgttgagttaaacagccaatcaaacgattgtataaatataattcacttctttcttttttcttaatggaaaaaaaaatgttgtggaattccttaagccctgatatattcatatactgaagccatgtgctgtcaagccctttaaactatagaaagtagtgctttgactattaaagatgatgtagaattttattttattttatttatttattttgtatttatatgagtacactgcagttatcttcagacacacactagaagatcccattacagatggttgtgagccaccatgtggttgctgggaatagaactcaggacctctggaagagcagtcagtgctcttaaccgctgagccatctctccagcccaatgtagaactttattatattacggtgtttgtaaactctccaggcccatcatttaagtaaggactgcaggcttcatggttagttttgtagaacttaaggcagaatgagtctctagtagtcagtttacacagaattcttggcttcaatgagaactcaaagagaaattagaacacatagaagtcaccagttcaagtttttacacttcttaaagttttgatccgtaaacaatgcagtgcaaaaccatctgcgtgagcctttagtaactttgaggtttctgttgaggaatggcctgtgtgcagcttgaagaggtgcggtaccatcccagtttcctttccacgagttcatgagttaagtgctttatttagcctagacctccagagtccagacccaggcctgcgagtctcctaatcagagaagcaccttgagcagagccaatagtgttttcaaggatgaggcgtggtagcatttacctgccatggcagcatccacagactgaagcatgaggatccaaaggcctgtgagacccattctcaaaaaaaacaaaaaaaaaaccaaaaacccactggtcaatgaaaggaactagaagcatgtaagcaggtctgccccacttgcaagagttagcttttctttcttaaaatgctcatctttaggcagtcactccttggatagacagagacagaattgcaaagattctggatccctcagggtttctgctcactcacgtctgataaaatggacactgttcttgcttttaagccacatcccatgacaaatggaattgtagatgtggcagaaaaagagtgaactttaccccagccgggaagctaatgaatgcatcaaattagaatgataagaattaggaccaagctcaggttatctgcgtctgttcatgtaaatgccctgcgactggagggaggggagagagcgtgagggctttcatgtagtcttctcctctggtgaaccatcgaaggtgtccgtcagaacagcagactccctcaagtagacaaactccaaagttcacgccgctcttcgtggtaccacccattcaagatgagtaagcagtctctgaaagtgatcattttggagaaagctctccctacgaattcccaccttgtaagttttcagctcattaccgcagggacttgagagagcatcctaggacacagactatctggatgcaagtagggttctcgactaccagcacgtattgtgatcgtttgaaattgaaaacgggcagcagatatgaacatttgcatataaagaaaatgtttcaatatgcaaatttttttgccatttactgcagataactttcagttctttctgtattataagctttcccaatacaatcccaacatagccaaacaaggcatttcaattcacagtacatctcaaacaagcccatacttaactaaattcctacaatgttaccatgttatatatttatagcatataagtatgagaacgcttagtacttccagaaacataatcctgttttaaaatgttcttgtaaatggaatatttaaattcaatttactcaattaattggctttcttggtaatttttctgacttacacaatgcctgagtaaagtcacgttgggaacatgccattaagtttgtaatctaatttagattccatgttagaagagaaatactacatattaatgtgagaactaattatgaaagtggatgaagctttagggcagaatttcaagtctctcaaatatagaaataaaacagtgggtacattcagatcccacatagccaacctactgagaatttatgcatcttctgtgcataaaataaatgccaggagatttcgcatattaagcaaatgaccatattttatattcagtggctaagagttcttcatttacttctcatttaattctccaactgtacacattaaaatatgcctaatacctgcgctttcggtagcttctatcctgtgctttgcaaagttcagtctcccgtctagagtcctctgctgggtcccaactccatcagggaaatctccctgagcggccgcgggtccccacacccacacccaggaatcactgtgttccccgggtatgcacactcacagatgggcctgctcgcatccaggcagacacatgtccacagacattccacatgcagtcgcaggagtggaaagagttccacggaacagatgtgattcgtgcccagcatgaagtgtgggttataataaagttcagaggagtcaaacccagggctagctcatcaaccaaacagttagaagcaacctcataattcccaaagccagaagcaccttggggccttgaacctgtgataacagcagctggaagcagacctgtaattacgctcctgccaggcttctgaggacagagctaagcacttagcagtgagagctctgtgtcagtgctggcggggagggcattgtctgcaccaggcaggctctggagcagttaaaaccactcttagttcaatagagtcagttagggtcctttcctgaatttctcagggactccctcccctatctatatacatgaagagctgggggaagtgctaagggccaatgggcacaaatgctgatagagagatgggctcttttaaaaattcacatagttcatgtacagtaaaattcacccttttgcagtgccagttgaaagtgtttcggtgtgttcttctaggtgtatataagtatcaaccccaatagtcaatgcccctgtcctcctgcaatagaacccccataactgatagccactaagccactatcccctcttcctccctcccccttcccctggaaactgccaatctgttctctctctctctctctctctctctctctctctctttctcttgcctaaaatacagacttttgaaataagcttttgttaagagaataagagaatcaggcagtggtggcacacccttacctttaatcccagcacttggaaggcagaggcaggcggatttttgagtttaaggcccccttcatcccctctgcccctgcccctccccttggtaagatcttctttcttttcctttttgaacagatgagaatgaatgttccaacccaggtgcctgtggctccgcctcctgctacaacaccctggggagttacaagtgcgcctgcccctccgggttctccttcgaccagttctccagcgcctgccatgatgtgaatgagtgttcctcctccaagaacccatgcagctacggctgctccaacacagaaggcggctacctctgcggctgcccaccagggtacttcagagtgggacaggggtaagacattgtccccaaaagcatcgaggaggacgggtgactcttcctctctcctgagcggtcagggtcaggcagccttgcttcccacccctgcaagggtgaaactggaacccctgtgtgtgaagtccaagagggggatagcattgggacataggcgccatgcagggtaggagcacttcctttgtggagagcctgagaggtttgcttccatggaagcttcagtccttggtccttataatagctgaagttggttcctcttgactcaaggccagatgcagggcttaggcagctcctgtgttactgtgagtgacagatgtgtgaatgacgtcctccactgcatcactctgctgatttccacagatgctgacccagcaacccctgaggaaggactttgcctctttctctgttcatctggtcttatgttgcccagaaagggatcagtccttcccccacaaggcttgctaccccttgggtaactgcactttggcagatcttacnnnnnnnnnnnnnnnnnnnnctgctctcctcagggacacagaagtttacaagtaaataggggtgatcttcttcgaaaggattagcaagtctggcaggcactaaggggcatgaaccagtctgtccagcactgatatacagtcacacataacagaaaagattgggcttagcaaggctcgctttagagccagtgcattgctgccttctgccgactaaaacaggaatgcagaaataccaagttctagagcagagatctttgcctgtgcggtaaaactggcttcaggctcctctgggcttccatagctgcttttacctccttaagtagactgctttcaagtgcttcaatctaaataggattgagagctggggaagcccaggactcgtcctcagaagaatctcgcagtttcaaaacaagaggaaatctttcccactgtgtggcaaagaacagaaccacaaagatcaggttttgtgattaatgcagttcctcgtgttgtgctgagcccaaccataaaataatttccgttgctatctcatgactgtaattgtgctactctgggggaatcataacataaatatctgtattgtcccatggtctcaggctgacccgaggggttgcgacccacaggatgagaagagctgctagctggtttatagcttcttcctatgcgtccatgtttcctaaagacttttagactgcccgtgctaatggtaatgtctaagaatttttttgcatctcgtaaacagccactgtgtctcgggaatgggcttcaacaaaggacagtacctgtcggtggatgcggaggcagaggatgacgaaaacgctctgtccccagaagcatgctacgagtgcaaaatcaatggctacaccaagaaagatggccgacggaagaggagcgcgcaggagcctgagcccgcctcagccgtgagtagacacagagcagaagccctgctttgccaaagaaaagggaggaaagaaaaaaaggttacacacacacacacacacacacacacgtgttccttggccctgcccactgattgtctctgtctccctaggacatgtgcacctaacctctccctcagctccttcacctataaaatgaggattaaaactctcaacctctgaatgttgctgaacaggagcatgtgaagtgcttgcctcgatgcctgaagtgcacaccagtgattaataacccacatacaggcatcacataggcatataggcgtgttggtgatttcccctgagaccagggacactatgaggccaccacttacctctctttttagttactattactgagaattgctcctatcaatacacacacacacacacacacacacacacacacacacacacacaaactggctgtgcttcagtattctgggtctcaggaccctttcttatctataggaccacactaacttagccccaaaatctctgatactattttaaaattacaagtcaatgttacatgtgtttttaagtagactgaagtatccaacccgatatttaatcatgacaaatcgctcatcaagtcttcccgttgtggttcacagaacacgattctgtgtaaataatgatgggttcctcaaagcttctgtaaccataacctcacttaagcacaaacccatagcaaaacattatgggtttgtgtgtgtgtgtgtgtgtgtgtgtgtgtgtgtgtcctgtctcactaaggcagcagtcttacctcacatcccaaatgacaaattcggttcatattgtctgggccctgcttttaaccaatcctggctcactctgcagatggctccgagccttctgagtaagaaggctcctagaaaagtcacagcccagagatggtttccctgggggcaggctctgctgttgaatagcaataagacttctcgttttgaccccacaaaagagaaaattagactcgtttcttaaattgtccttttccattaaaatgtttgagaatttcatgcatgtataaaattattatcatattgatccccatttctccccctcgactccctgaagagagcccccccacaatacaacattagtcattgtcccactggatacaattagtggtacacatatacacactgtgtatgggaatatctactgaaacaaagacaaactaccagtggccacaacaccaaagagaagtgactatctctcaactttaaagttaatcttaatattgtataaatattactaaattgtataaacccatcaaaggaccctgatatgtgactattgtctgtggcctaagtcctataactttaatgatcttgtcgaggctgagtgagggtcaggaagattcacaggacatcccccgcagggtgaagcttttccccaccctgacaggaatttgtgaaagcctcttttgcagacagcaaatggccagacagggagcagcctcaacctgcctctgtgactatatcagtcaatcgcaggtggcctttgagtctgccttgtgcccgctaccaactcaagtgtgttcttgctctttccctcaggaggagcaaatcagcctggagagcgtagccatggacagcccagtcaacatgaagttcaacctctccggccttggctccaaggagcacatcctagaactggtccccgccattgagcccctcaacaaccacatccgttatgtcatctcgcaagggaacgaggatggcgtcttccgaatccaccaaaggaacgggctcagctacctgcacacggccaagaagaagctcgctcccggcacatacacactggaaatcaccagcatccccctctatgggaagaaggagctgaggaaattggaggagcacaatgaggacgactaccttctgggggtgctcggggaggctctccgaatgaggttgcagattcagttgtattagccctctgcagacttgggccttgggccccagctcagatcccagcacagccggccttcagaagtgtttggaacatcactgactgattttgaagaggaaaaaaaacaaaaacaaacaaacaaacaaacaaaaaaaaaaaaacaaagaaggccttctattcctttccttcttcctgattcagacttcggaatgttgaccctcgcagggaaggataatttagactctggtatggccaaagatttgagtgcaaaggcaaacatagttactgtattttttatataacttcatttttaaatatattaaaaaaaaaagcaaacctaaatgttcaagagatcagcgtatggcactaaatgcacaaaactaatgtgagccttcttcctgttagcagtctataacactttgggtattttgctatagttgctaattaaaaaaaatatagatgtttatttattttaatgcagtaatatatggagaaatgaacaaactatgtaaacaaaaagggaaactcgcttgtttttcttagatttataaatttgagctatttcttttagaggtgctttaaaaaaaaaatccaatacattcaagagatgttttcctttagtttttccgccagccctccaactggtgcgcacctgactatttcaaagaaagtcttgcggagctgaatgggcggtgtaatcagtaatttaaaaagatgtggaagtcgtttgatcctgtccaaaggaaatgaaagccagagcagctcctatgacaatatttcacatcagcagattcgccaggcaacaggagaggaaaccactgtagcaaaataccttgactgcttgtgagaccgttagcattgcaggccaaactgtactgtatttcttcctcgtaacctcaaggacccacacgtgcctcccacaacacctcattcttaccagggcgtgctgtgcacttgtggtcccctaggcagctgaagaacccgccgttcctttgagcaggaacacctggcgttctgtcgagtttggtgctgtcgtagattaaatggtgcatttattatgttcaagctatttcaggattgccatgtgtgcaaacaatcatgccatgcagccaaggaatatatgtcgatgtttttttttttaaacccatggtttttatttttattttattttttagaattttcattaatactgtagttatacaccatatgcctcattttatcatagcttattgtgtatgaaatatgtttgtaaaatgaattgatgtttagtttgctttagccatttgaaaagatgccacaccaggaggtaaccaataagagcacagctccacattcttctccctggagaacccgttcctggaagagtgatggaaaccggagatacaaaatggccaaagcacacaccgtcattcctctcgcacctgtgttgaccaaagagtagtaaccagttatagccaatgttttggggttttttgttttgttttgtttcgtttcgttttgtttgtttgtttttaataaccaaaaagaaaaagagaaacagtgtaaatttgtaatcaagtgtttgtgaggaaaaacgtatgggttttggttatgtttgtttttgtaggtctatgtatcaaatatgacacttttcttgcaataaagcttattttggggtagtcttacggctgcgtttcctgagactccaatggctggtccatttgtgggaggcactggagacttcgcttacagggatatttattaaagaacgagacagaaagggaggcatgaccacaggaaggtgaaaggatggtgtgccttatgcgacaaaggcagatggggcgtttgcttctagatctattcacagggggagtagaattagagcagtgggtgtttccaattctccatgaatcatgagtgtcccggggtccagttttccagaaattccactccttccaactgcacatttgcaggatgtcttattaaagcactcgaatcgtccataaggcacagaaagagcaaagtttcctgaatcgaaatcttgaagccaaagtgaactgcaggcatgtgtcaatataaatggcacatatccaaaggcaagccaaagcttgtctcctgccttgccatgcagtctactcttcgaagtaaatagatttagcagggtatttaatgtgaatcctctcttgatagattgctaaaatgggcgtgcacacacacacacacacacacacacacacacacacataggcatgcacacacacacacacactcacaccaaaaaagaaaaaaacaaacaaaactttccaagacttacaagttaattcaatccatggtaggatttatgtgtttaaaattttcatccaaggaataagagaacaagggaatattatgaccgatcttaattctgtcctttgccaaccagaaattagcttcgtggaataagaaaagtatttgccttggagtatcctttaaaacttaccatgcacatgcaacttcatctggtgtctattaatagtacagcttgagctctgcaatgtcaaatgacctggaaccggatttgactctagttctgaatatggagtgacaaggctcttactccacctttaatctcttcatgaggaagtctgaaagcctacaatgttgggagcttcgtgcagaacataaaaaaggcattgggcatgcaacaaagaagaacgctcaaagaaaatgactccaaaaagcttccacccaagtcagcactttatgagcatccacggctgctttatgacaagtgtaagttacgtcatcctatagctcaccacggaggatgttttaggcagcatgttgttattcacatttccattattttctcaaaagattcactcagcatatttttttttaatttacagaaaagtatgtcaactcaggaatctaaatcaaacccagtgactctatgtgatagtcacaatggtcttcaaatgacagcatctctctctctttctcactctcctctctttctctctctctctctctctctctctctctccctctctctctctctctctctctctctctcccctcactgtgatttagagctcttcagacctctgtcctgtttagttcttttccacgtttctgagacttacactgcatgggtgttagtcacgtttgaactctgaacatcattccgagaagcatgtaaactacaataaatccaaacatctactgctctgtgtgaacttaggactgggagccatactggtcactctgtccgttctctgaggccttacttggctttaattacctcctcggtaatttaacgtccatgatgttaaaagtgagacaacggaaaattctaaaacactggtgtgcctgagtctgtcaaaatgctagggaactataatcaatgtacggaatcgaaaggagtgaaaggcagccatgtttgacacagaaggtggcaatttagtgcgttcaacctgaccactcagcaaccttcctgtctttaagagtatgttagagataggaaagggccctgctcttcaggagactagaaaccccaccacaccgtgctacctgtggctggctcatctgcattcctgctttgcaggagcccagcagaggattacaccgcttattcaaccaaccacttccttgtctgctccagggcacacatctttgggactatgacgggttaattaggagctatttagacaagtttgttggaggaaaaaaaggaagaggacattttattaagaataaaggagtaattccagaaccttaagagaagtaatggtgaatggaaagatgggagcttactgctgcctcatgggaaataagattttcctatctggtgattgggttggttgttgggttttggctttttaagcatgctcattttctcaacatattcaaatccatgaatacttaacaagaagtatgcttttctgactatctttgaaaaccatctccttagaatcctcgcagacaatacaatgtatgactcatttcatcatccaatcactgagacagtacaatcttgcagttaaaacaacaacaacaaaaacaaacaaccctcctttgaatcgagcaaaacaactgacttccatctccttgaacaaactgtgtagcgtctcacttccctgtcttgatcttacggtgtggctccaagggttcattacagaaagcttcttatccgaggagggctcaacggggtagcaggacctccgaaaggccagcctttcctgccctttccttttgttccgtagccaccactaagaggataaaggagatcacataccaacccaagacttcttcataagtatggctctttgattactggtacaccactaaactgaagtatcatgtccagacacacagcacccagatgaacctatttcccaagtgctccacagctgtgagatctgtaaatgccccagttcccaccaatgtttccaattgccatacagctccttgcttatgggaattgtgggtgacagctcagaagtccaagccacaaacacagccagagtcctcaactacacagtccccaagaaagtgagcaaagagacggggcacaccaattgcccccattagaatgattcaccaccatgaaagctagtgacagaaacccacccatacttacaggtaaagaaactgaagcccatatttctaagagttgagtacaaagccaatttccatacaagagagaccagaaccctggttgtctggctaaagtctggtgctatgcatacttccactacatggtaagcctatttggatctcttttaagccttaaggatataggccagttcccatggttttggcttctactgaatccaaaatgttttccaagcacgatttaaacactgcttttcctttgcccatcccaccctctgtgtaactgctcccagtgtctcataaaccagagatttgtgtgtgcgctaacatgccaagatattggctgcaatatagcagaccccacccagaaccctgtacctttagatgcatattaaagtcctggcttttgaagggttaaccattttatttaaaccagaccttcgtactttaaaaaaaaacaaatacttcttttactaagaatgctcaaggaaagtacactagttgcgtgtatttcttaattgtctttgcccccttttcctggaagcctaaaaatggtaccagtagattaagctggttttctttccaaattgccagggacctacagctcacattagtcacccccgttaaggccacagattaaatgtcaggatgtactgtagacattttccaaaggaaacggaaaacacgttacatgaattttagagcaaactgtaacaaacactaaccgtaaatagccttcccagataactgcttcatatactagatccatttacgaaataacagtagaagcagtgaacaaccaagtcctaacactgtgtccaagacagcattactgccctagctgcttacatttctgccccaagggttcctcctgcctctctttttaccaggtccaacctccctgcactcaggtaacttactcttgcaagtcaagggcaggatttaagctaaggtaagggccttattttaaccctcaactgtggtccagcaatgacccccatgtcttcattattctcctaaactcacataactaaatctagaaatcttcagtgacagaaagaaggatgaggatgacgaatgtacagagtcaggctcatggagccttctcaataacaaacgaagggaaggagaaggttccgtctgcacggagtcagtttcgtggcctgcctccttgatttggattttttggagagagtaggtagctccataatagagtttactggaaatgacctgaacagatttctaaagtttatcaggtcgagacttctttatcttagaaagattgtcttgattcatgctactttctgcacctttctagggagtcctaaagactcttccaaaatatcaatggaatgacaggacatctggggcagactgaatacaagttttgttccataagagtcccctgatccactgaagctattaatgctatagtgttagtcaggggaagaggcccaatggtctttattgcaaaggaggatattgtgttacctcactacaatccagatataaaacaatgtagagaaacaagacaaccatcctgggctgcacattgttatttactcaaaggccatattgaaagtcttgcacaaagacttgcacaaaagactcccctagagtcttggggaaagggaggttggtgacatgcaatacatctaaaagaggtctcctagaagtgatgagaatgagctggacctcaaagatgcagattttgataaatgacacggaggattcctggaacacagcagtaagaacaaaagttgccctgttcatagcctacaggaacacaaagagaagagccagcctagtctgactgtccttatctgtgccataacccactcccttcagaatgtgccctgcctaccaatgacccacaggatcctcccatgcctcatacaacctttccacccgggaagatggtgcacacccaagctccagccatgtgagtctgcttgatccaccaccaatccccaccaccacagtcttccctatccctaggtccaccccaatattccaggcttggaccagaatgcacaccctgcataacagcccagttccctgtgttcacctgagttcattcaccctaagctatttccaggctcaatgtttaacccattcagacatcctcagttatgccccaacctactctttccatgtatcagtcacaaaactaataatattttttaaaatgccacatgcccagatctcattggaaaagtacaaacaatatgaaagatcggatcagaaacccctctctgaaacctacaagtcctgtagagatgcttgcccgtgattattaactggaagaaccctaggacacagaatttaaagaaaatcataagcttcatcaaatgattcaaggagtttaaagaaaacacaaagaaacatctcgatgaaatttaaagaaaagtaaccctaaagacaataaacacctgagtgatactcaagacagacaaacagaaggctgatgtaaatcatgaagaccatccaggatttgaaaacagaagtctataaacagaaacattaaagaaggctcaagctgagatgaagataagattgaaaaactcagtgacacaactagaaaacttagaagaaagggcaaaagtgaatcagaagacgatatcaggacttgaaaataaagggggatctagaggaaactagaactataaaaataaataaataaataaaatgtgaagaagagatatacaggaaatgtgggtcgctgtaaacaaacaaacaccatagaaaactttccaaaactgtaaaataatacacccatgtaagacgtcaaatagacaaggccagaaaagagcgtctccatagcatatcgtagctaaagcattaaatagacacaacaaagaaagtgttttgaaagatgcgagagggaaaagataagattcaagtaaagagagacccatcagaacaacggctgatttcctgatggaatctttgaaagcagaatggccatgaaaaacacattccaagtcctaaagacattgatagtcaacctacaataatgcacccagcaaaacaatctgacatagttgaagaaggaagaaaagttgtccatgatataaacagcctaaaaaaaaacaaaaacaaaaacaaaaacccaaaaacaaacaaacaaacaaaaaacaaaaaacatgtatatccaaaaaaacaaactcaaagagcagacaggacgcactattgtaggctgaagagaggagtaagcaaaaccaagagactgtaggaacagagaggtagccattattactaagacacaaagtacccctgagagcataaacaacacagacaaaagtcaacaatgccccaaattaacatgcacatttcagtcctaactttagatataagtggcctcagttctccattcaaaagccacagactggctgaatgggtcaagaaacaaaacacatggatctgttttctgaaagaaacacatcttggcttaaaaaaaaaaaattagggtctgccttggagtaaaaggctaggctcagtccctgcagaagaaaaccccagcctgtcttctggagaacggtggagtctgctctgcccaagagctagctgttgacatttctcacaaaacaccaagaaaaatacagagagagaaaaacctttcagtcttgaaaattatactttataatccattatggtgaaaactgtccagctaatagataagtctaacactgtagccatgtgtgtcagcccctataatcaatttagtttctttccaagcttttcctttaatattgtgttaaactattccatgagctggttgagaacataacggacatgaaggttcatgtgataagtaattccacaagtcatttttgaaagcataagtgcatttgacctaacaaggctaattcacatattaaagggccagcccttacaattgtcatgttcatcccataactatttctccaggaacctggcagtttaattcttctcctttatctttctggcctcaccgtaccaaatggttttcagaacaggaggaaaaagaaaccgttttctagcatctgttttaaatctgggttttgtctgcattgtgtgtctgactttgtccttatatttgttttacaacaaaaacaaaatagagagaagatatcaactctgtcctcaaaagtttatataagatcctcttcgctgttgataataaaagcagctctattttataacattgatctcatccatgatccacagccatccagttccctcacttccttctagttttctcttttgaacgcagatgggggattagtcaatggcatgtgcattccttcaaggtccccgaatagctgctgtgtctatagagttagtctgtccatgggtccacagataccaccgatcacccactcaccctttgaacttatatttggatcagatcagcgagaggtggtatgaagagtggtgtttaatacataatctttccataattactagccctcaagcaattcatgactcctgatgtaacataaaaccttaggtgtgagacaacccaggtctcttcctattttcctactgtgactattgagtgacagagaaaagataaatatgaggtcaaataaagctataagcttcaaagatcatataaaataatctttgttgctaattgattaattaaactgattttatttacattcatagtgtgtatctttgatctagctgagtatcgagatctgaaatcatttaacacagattccaatgccatttctattgtttgaaatatgctccttttagacttaatgaatcagaatttcaaaaaaatatgtcaagtaatatgcagactcaacagacatctattagtaaaatctacagtggaccattgctttgaactagtctactgcagcagggtacaacagaccacatagcttgttttgacgatgggaaaagcaagctatatcagtttcctaggatgctagaacaaagcattaaaaaccaagtgccttaaaaaagaaaggaatgactcaggatagggaaataccaggacagggaattgggaatgggtgggttagcaaacagcaggagggggtatatgatggggggttttcagaggggaaatgaggaaacaagataaaatatgaaatataaataaagaaaatatctaataatttaaaaaaagaaaaaaaagagaaaggaattgtcacaaatttctaaacactgacatcaaggcatgtgtggtcccatgttcattattcagcctgtagtgtagatttttagccttgactggtttgctagagcatctgttgactctcatttccagttattcagtttctgattctataggcatgtgacaagttcctctcaatgtaactttctctatatatggtctccttttataaagaccccagacatatcggggtaaagaactactgtaatccattgtgattttgttctggttaattatgagacaaggcctcatgctgtatagccttgtctggc

SEQ ID NO: 14 - DNA, 8623 bp, Mus musculus
  misc_feature (1)...(8623): n = A,T,C or G
atggggagacggcggcggttgtgtctccagccctacttcgtgtggctgggttgcgtggcgctctgggcgcagggcacagatggccagccccagcctcctccaccaaagacgctccggccccagccgcccccgcaacaggtccgacccgcagtagcgggctccgaaggtggcttcatggggcctgagtatcgggacgagggcgcggtagcagcgagccgggtccgcaggcgaggacagcaggaaatactccgagggcccaacgtgtgcggttctagattccactcctattgctgcccaggatggaagacgctccctggaggaaatcaatgcattgtccccatttgcaggaacagttgtggagatggattctgttcccgccccaacatgtgtacttgttccagtggacaaatatccccgacatgcggactgtctgtgagaatggatgccagaacggggggcgttgtatcggccctaaccgctgtgcttgcgtttatggattcaccgggccgcagtgcgaaagagattacaggacaggcccgtgtttcactcaagtcaataatcagatgtgccaggggcagctgacaggcatcgtctgcacaaagacactgtgttgtgccaccatcggacgagcctggggccatccttgtgagatgtgtccagcccagcctcagccctgccgccggggcttcattcctaacatccgcactggagcatgtcaagatgttgacgaatgccaggcgattccaggactgtgccaggggggaaactgtatcaacacagtgggctcgtttgagtgcagatgccctgctggtcacaagcagagtgaaaccacacagaaatgtgaagacattgatgagtgcagtgtgattcctggggtctgtgagactggcgactgttccaacaccgtgggaagctatttttgtctctgtccccgtggcttcgtaacctcaacagatggctcgcgttgcattgatcagagggctggaacatgcttctccggcctggtgaatggccgttgtgcccaagaactcccgggccgaatggcaaaagctcaatgttgttgtgagcccggccgttgctggagcatcgggaccattccggaggcctgtcctgtcagaggttccgaggaatatcgtagactgtgcctggatggtcttccgatgggtggcattccagggagctcggtttctaggcctgggggcacggggagcaacggcaatggctatggccccggtggaacaggcttcctccccatccctggagacaatggcttttctccgggtgttgggggagctggagtaggagctgggggacagggacccatcatcacgggactaacaattctcaaccagacaatagacatctgtaagcaccatgccaatctctgtttgaatggacggtgcatacctactgtttctagctacagatgcgagtgtaatatgggctacaagcaggatgctaatggagattgtatagatgttgatgaatgtacatccaatccctgcagtaatggagattgtgttaacacacctggatcctattactgtaaatgtcacgctggattccagaggactcctacgaaacaagcgtgcatcgatatcgatgagtgcatccagaatggagttctgtgtaagaatggccgatgtgtgaacacagatggcagtttccagtgcatttgtaatgctggctttgaattaaccacagacggaaaaaactgtgttgaccatgatgaatgtacaacgaccaacatgtgcttgaatggaatgtgtatcaacgaagatggcagcttcaagtgcgtgtgcaagccaggcttcgtcctggctccaaacggccgctactgcacagacgtggacgaatgccagaccccaggaatctgcatgaacgggcactgcatcaacaacgaaggatccttccgctgtgactgtcctcccggcctggctgtgggtgtggacggacgtgtatgtgttgacactcatatgcgtagcacctgctacggggaaatcaagaaaggagtgtgtgtgcgtccattcccgggtgcggtgaccaagtctgaatgctgctgtgctaatccagactatggttttggagaaccttgccagccttgccccgctaaaaattcagctgagttccatggcctctgtagcagtggcatcggcatcactgtggatggaagagatattaacgagtgtgccttggaccctgacatatgtgccaatgggatctgtgaaaacctgcgaggcagctaccgctgtaactgcaacagtggctatgaaccagatgcctcaggaagaaattgcattgacattgatgaatgcctggttaataggctgctttgtgacaacggcctatgcagaaatacccctggcagttacagctgcacgtgtccccctggctatgtgttccggacggagacagagacctgcgaagatgtaaatgaatgtgagagcaacccgtgtgtcaatggagcctgcaggaacaacctgggctctttccattgcgagtgctcgcccggcagcaagctcagctccaccggactcatttgcatcgacagcctgaaaggaacctgctggctcaacatccaggacaaccgctgtgaggtgaacattaatggagccaccctgaaatccgaatgctgtgccacacttggagccgcttgggggagcccctgtgagcgctgtgagctagatgcagcttgcccaagagggtttgccaggatcaaaggtgtgacttgcgaagacgttaatgaatgcgaggtgtttcctggcgtctgtccaaatggacgctgtgtcaacagcaaaggctctttccactgtgaatgccctgaaggtcttactctggatggtaccggccgggtgtgtttggatatccgtatggagcactgcttcctgaagtgggatgaggatgagtgcatccaccctgtccctgggaagttccgcatggacgcctgctgctgtgcagtcggggcagcttggggcacagagtgtgaagaatgtcctaagcctggcaccaaggaatatgagaccctgtgcccgcggggcccaggctttgctaacagaggggacatcctcactgggcgtccattttacaaagatatcaacgagtgcaaagcctttcctgggatgtgcacctatgggaagtgcagaaacacaattggaagcttcaagtgccgttgcaataatggcttcgccctggacatggaggaaagaaactgnnnnnnacattgatgagtgcaggatctcccccgacctctgcggcagcggcatctgtgtcaacacgccaggcagctttgaatgcgagtgctttgagggctacgagagcggcttcatgatgatgaagaattgcatggacattgacgaatgtgaacgtaaccctctcctttgtaggggtggcacctgtgtgaacactgagggaagctttcagtgtgactgcccactgggacacgagctgtcaccgtcccgtgaggactgtgtagatattaacgagtgctccttgagcgacaacctctgtagaaatggcaaatgtgtgaacatgatcggaacttaccagtgctcttgcaatcctggataccaggccacgccagaccgccagggctgtacagatatcgacgagtgtatgataatgaatgggggctgcgacacccagtgcaccaactccgaaggaagctacgagtgcagctgcagcgaggggtacgcactgatgccagacggacggtcgtgcgcagatattgatgagtgtgaaaataaccccgatatctgtgacggcggccagtgtaccaacattcctggggagtatcgctgtctctgttatgatggcttcatggcttcgatggacatgaagacgtgcatcgatgtgaacgagtgtgacctgaatcccaacatctgcatgtttggggaatgtgagaacacgaagggctctttcatttgccactgccagctgggctactcggtgaagaaggggaccacaggatgcacagacgtggacgagtgtgagattggcgcccataactgcgacatgcacgcctcatgtctgaatgtccctggaagcttcaagtgcagctgcagagaaggctgggtgggaaatggcatcaaatgcattgatctggatgagtgcgcgaatggaacccaccagtgcagcataaacgcccagtgtgtcaacaccccaggctcctaccagtgcgcctgctcggagggcttcacgggagacggctttacttgctcagatgttgacgagtgtgcggaaaacacaaacctttgtgagaacggccagtgcctgaatgtcccgggagcttaccgctgcgagtgtgagatgggcttcaccccagcctcagacagcaggtcctgccaagatattgatgaatgctccttccaaaatatctgtgtctttggaacctgtaacaacttgcccgggatgtttcattgtatctgtgatgatggttatgaactggacaggacaggaggaaactgtacagatattgatgagtgcgcagaccccataaactgtgtcaatggcctatgtgtgaacacgcctggtcgctatgagtgtaactgcccgcctgacttccagctgaaccccactggcgtgggttgcgttgacaaccgcgtgggcaactgttacctgaagtttggtcctcgaggagacgggagtctgtcctgcaacacagaggtcggcgtaggtgtcagtcgctcctcctgctgctgctccctggggaaggcctggggaaacccctgtgagacatgccctcctgtaaacagcactgagtattataccctgtgtcctggaggcgaaggctttagacccaaccccatcacaatcatcttagaagacattgatgaatgtcaggagttaccagggctctgccagggtggaaactgtatcaacacttttgggagtttccagtgtgagtgcccacagggttactacctcagtgaggaaacccgcatctgtgaagatatcgacgagtgctttgcccatcccggcgtctgtggacctggcacctgctacaacaccctgggaaattacacttgcatttgcccgcctgagtacatgcaagtcaatggaggacataactgtatggacatgaggaaaagcttctgctaccgaagctataatgggaccacatgtgaaaacgagctgccttttaacgtgacaaagaggatgtgctgctgcacatacaatgtcggcaaagcctggaacaaaccttgtgagccgtgcccaaccccagggacagctgactttaagaccatatgtggaaatattcctggattcacctttgacattcacacaggaaaagctgttgacattgacgagtgtaaagagattccgggcatctgtgcaaacggtgtgtgcattaaccagatcggtagcttccgctgcgaatgccccacaggcttcagctacaacgacctgctcttggtctgtgaagacatcgatgagtgtagcaacggcgacaatctatgccaacgaaacgcggactgtatcaacagccccggcagctaccgctgcgagtgtgcggccggcttcaaactctcccccaacggggcctgtgtagatcgcaatgaatgcttggaaattcctaatgtttgcagtcatgggttgtgtgttgatctgcaagggagttaccagtgtatctgcaacaatggctttaaggcttctcaagaccagaccatgtgcatggatgttgacgagtgtgagcggcacccgtgcggaaacgggacttgtaagaacactgtgggatcctacaactgtctgtgttaccctgggttcgagctcactcacaacaacgattgcctagacatagacgagtgcagctcgttttttggccaggtgtgcagaaacgggcggtgcttcaatgaaatcggctccttcaagtgcctgtgcaacgagggttacgaactgactccagacggcaaaaactgtatcgatactaatgagtgtgtcgcacttcctggctcctgttctcctgggacctgtcagaatttggagggctccttcaggtgcatctgcccccctggatatgaagtgagaagcgaaaattgcattgatataaatgaatgcgatgaggaccccaacatttgcctttttggttcctgcaccaacaccccagggggcttccagtgcatctgtccccctggctttgtcttgtctgacaacgggcggagatgcttcgatactcgccagagcttctgcttcaccaactttgaaaacggaaagtgttctgtacccaaagccttcaacaccaccaaggcaaaatgctgttgcagcaagatgccaggcgagggctggggggacccgtgtgagctgtgccccaaagatgatgaagttgccttccaggatctgtgtccatacggccatgggacagtccccagtcttcatgacacacgtgaagatgtcaatgagtgtcttgagagcccaggcatttgctcaaatggtcagtgcatcaacactgatggatctttccgatgtgagtgtccaatgggctacaacctggattacactggagtccggtgtgtggacaccgacgagtgctccatcggcaacccctgcgggaacgggacgtgcaccaacgtgatcgggagcttcgaatgcacctgcaatgaaggctttgagccggggcccatgatgaactgcgaaggcaaacatcaacgagtgtgcccagaacccgctgctctgcgctttccgctgcatgaacacttttggatcttacgagtgcacgtgcccagttggctacgccctcagggaagaccaaaagatgtgtaaagatctggacgagtgtgccgaggggctgcacgactgcgagtctagaggcatgatgtgcaagaacctgatcggcaccttcatgtgcatctgccccccaggcatggcccgcaggcccgatggcgagggctgtgtagatgagaacgaatgcaggactaagccaggcatctgtgaaaatggacgctgcgttaacatcattgggagctacaggtgtgagtgcaatgagggattccagtcgagttcctccggcactgaatgcctcgacaaccgccagggtctgtgcttcgccgaggtactgcagacaatgtgtcagatggcctccagtagccgcaacctcgtcacaaagtcggagtgctgctgtgacggtggccgaggctggggccaccagtgtgagctgtgcccacttccaggaaccgcccagtacaaaaagatatgtcctcacggcccaggatacgccactgatggaagagatatcgatgaatgtaaggtgatgccaagcctctgcactaatggccagtgcgtcaacaccatgggctccttccggtgcttctgcaaagttggctacaccacggacatcagcggaacagcttgtgtagacctcgatgaatgttcgcagtctccaaagccatgcaacttcatctgcaagaacaccaagggcagttaccagtgctcctgcccacgggggtacgtcctgcaggaggacggaaagacgtgcaaagacctcgacgaatgtcaaaccaaacagcacaactgccagttcctctgtgtcaacaccctggggggattcacctgtaaatgtccgcccggtttcacccagcatcacacggcttgcatcgataacaatgaatgtgggtctcagccttccctctgtggtgcaaaggggatctgtcagaacactcctgggagcttcagctgcgaatgccaaagagggttctctctggatgcctctgggctgaactgtgaagatgtcgatgagtgtgatgggaatcacaggtgccaacacggctgccagaatatcctgggaggctatcggtgcggctgcccgcagggctacgtccagcactaccagtggaaccagtgtgttgatgagaatgaatgttccaacccaggtgcctgtggctccgcctcctgctacaacaccctggggagttacaagtgcgcctgcccctccgggttctccttcgaccagttctccagcgcctgccatgatgtgaatgagtgttcctcctccaagaacccatgcagctacggctgctccaacacagaaggcggctacctctgcggctgcccaccagggtacttcagagtgggacagggccactgtgtctcgggaatgggcttcaacaaaggacagtacctgtcggtggatgcggaggcagaggatgacgaaaacgctctgtccccagaagcatgctacgagtgcaaaatcaatggctacaccaagaaagatggccgacggaagaggagcgcgcaggagcctgagcccgcctcagccgaggagcaaatcagcctggagagcgtagccatggacagcccagtcaacatgaagttcaacctctccggccttggctccaaggagcacatcctagaactggtccccgccattgagcccctcaacaaccacatccgttatgtcatctcgcaagggaacgaggatggcgtcttccgaatccaccaaaggaacgggctcagctacctgcacacggccaagaagaagctcgctcccggcacatacacactggaaatcaccagcatccccctctatgggaagaaggagctgaggaaattggaggagcacaatgaggacgactaccttctgggggtgctcggggaggctctccgaatgaggttgcagattcagttgtattag

SEQ ID NO: 15 - protein, 1288 aa, Mus musculus
  VARIANT (1)...(1288): Xaa = Any Amino Acid
SGMRMSASTLSLGSSAWTPAAVQSGQLGAQSVKNVLSLAPRNMRPCARGAQALLTEGTSSLGVHFTKISTSAKPFLGCAPMGSAETQLEASSAVAIMASPWTWRKETXXXIDECRISPDLCGSGICVNTPGSFECECFEGYESGFMMMKNCMDIDECERNPLLCRGGTCVNTEGSFQCDCPLGHELSPSREDCVDINECSLSDNLCRNGKCVNMIGTYQCSCNPGYQATPDRQGCTDIDECMIMNGGCDTQCTNSEGSYECSCSEGYALMPDGRSCADIDECENNPDICDGGQCTNIPGEYRCLCYDGFMASMDMKTCIDVNECDLNPNICMFGECENTKGSFICHCQLGYSVKKGTTGCTDVDECEIGAHNCDMHASCLNVPGSFKCSCREGWVGNGIKCIDLDECANGTHQCSINAQCVNTPGSYQCACSEGFTGDGFTCSDVDECAENTNLCENGQCLNVPGAYRCECEMGFTPASDSRSCQDIDECSFQNICVFGTCNNLPGMFHCICDDGYELDRTGGNCTDIDECADPINCVNGLCVNTPGRYECNCPPDFQLNPTGVGCVDNRVGNCYLKFGPRGDGSLSCNTEVGVGVSRSSCCCSLGKAWGNPCETCPPVNSTEYYTLCPGGEGFRPNPITIILEDIDECQELPGLCQGGNCINTFGSFQCECPQGYYLSEETRICEDIDECFAHPGVCGPGTCYNTLGNYTCICPPEYMQVNGGHNCMDMRKSFCYRSYNGTTCENELPFNVTKRMCCCTYNVGKAWNKPCEPCPTPGTADFKTICGNIPGFTFDIHTGKAVDIDECKEIPGICANGVCINQIGSFRCECPTGFSYNDLLLVCEDIDECSNGDNLCQRNADCINSPGSYRCECAAGFKLSPNGACVDRNECLEIPNVCSHGLCVDLQGSYQCICNNGFKASQDQTMCMDVDECERHPCGNGTCKNTVGSYNCLCYPGFELTHNNDCLDIDECSSFFGQVCRNGRCFNEIGSFKCLCNEGYELTPDGKNCIDTNECVALPGSCSPGTCQNLEGSFRCICPPGYEVRSENCIDINECDEDPNICLFGSCTNTPGGFQCICPPGFVLSDNGRRCFDTRQSFCFTNFENGKCSVPKAFNTTKAKCCCSKMPGEGWGDPCELCPKDDEVAFQDLCPYGHGTVPSLHDTREDVNECLESPGICSNGQCINTDGSFRCECPMGYNLDYTGVRCVDTDECSIGNPCGNGTCTNVIGSFECTCNEGFEPGPMMNCEGKHQRVCPEPAALRFPLHEHFWILRVHVPSWLRPQGRPKDV

SEQ ID NO: 16 - DNA, 299598 bp, Homo sapiens
  misc_feature (1)...(299598): n = A,T,C or G
acccccaactcaaaggaaatagactgcagcaccaattggctgaatttgtagtcaagaaaacttttcttttgagctatttacagcttttaggaattgagtaaaatatactcctgtaaacaaaatctggagcatatttctttctactttatttctccagaatttagaaattatttatatctttttggggtggttgcggggacagggtctggctgtcacccaggcaggagtgcagtggtgcaataacagctcactgccttctgggctcaaatgatccttccacaccaccatgcacagctaatttttgtattttttatacagacagagttttgctatgttgcccagattggtcttgaactcctgagttcaagcaatctgcctgcctcagcctcccaaagtgctgaaattacaggtgtgagccactgcacctggccttatatcaccttttgttgggattctgagttataaatggccctcaccataccgatgctttctcactgaatgcttctctatcctgaatacaagagaccctaatacttagacaggaatatcatcacccattcagcctgaagaagttacagaagatgaaccttttaggattaagggtcccttttagaagggagaggggaaatatgtcagaggtgtttgaatcagagcaactccattctgaatagggactggataaaatgaggctgagacttgctgggttgcatccccaggaggttaggcattctttgtcacaggacgagataagaggttggtggaactggtttcacaagatacaagtcacaaagacccagctggtaaaacaggatgcggtaaagaagccagccaaaacccatcaaaaccaaaaggaggagaaaagcgaactctgattgtcctcactactcattatatgccaattataatgcatttgcatgctaaaggatactcccaccagcacaatgatggtttacaaatgccatggcatttgaagttaccttatatggtctgaaaaggggaagaaccctcagttctgggaactccccatccctttctcgaacaacacatgaacaatccaccccttgtttagcaaataatcaagaaacaaccataactatactagttaagcagcccatcctgtgctgctctttctatggagcagctattcttttgtttctttatttctctaatatatttgctttcacttaaaaacaaaaacaaataaccaatattttgtctgttgatattctctattgctttcctgttttcaatttcttaatgtctgctgtaatttttatttcttttcttcaatctatcttgtattaatttgcttttctttttttgtttcctaatgtggaagcttagatcatcgatgttagatattccttctttgctaatatatgcattcagtgttataaatgctcctcaaagcactgctttctctgcatcctgaaaattttattttattttattttattttatttatttattttgagatgagtttcactctgacaccgggctggagtgcagtggcacaatcttggcccactgcaacctctgcctcctgggttcaagtgatactcctgcctcagcctcctgaatagctgggactacaggcacatgccaccacgtccacatccagctaatttatgtattttttagtagagatggggtttcaccatgttgtccaggatggtctcgatctcttgatcacagatctcttggtctgcccacctcagcctcccaaactgttgggattacaggcatgagccaccgcacctggccctgaaaattttaataagctctattttcatttttatttagtttaaaatattctttaatttctcttgagacttcttttttggcatgtttgttatttagaagtttattatttaatctccagatagttagggatttttccagctctattctgtcttttgttcctaatttaattctattgtgatctgagagcatactttgtatgatttctattctcttagatgtttgttaaggtgtgttttatgggcaaagttgtggtctatctgggtgaatattccatgagagcttgagaagaatgtgtattctgtagttattaaatgaaatatactatgaatgtcaactagatccagctgatcggtggtggtgctcagttcaactatgctctcattggttttccatctgctgcatctttaaattactgatagagggttgtatatacagttttaataattatcaacattttgccatttcatctattaacctccttttttcaatcgcatgggatgaaatatctctacattgacagaagatgggtaagaatgtgtcaagtttctttaaaaaggttttatccttaatattttaaatgttttaaaaagcatagattcacagagaattgcacagatagcacagagagatcctgtttaccctttacctagtttctcccaatggttatttcttatgtacaatataaaaaccacaaaattgacactggcacaatgtgtatgtataattctattccatttttcacatgcacagatttgggtaagcaccaccaagtggttagagaactatttcctcatcacaaaggtctccctgtgctacccctttaacttatcacagtctactagtattatcattttaccagtatagaaaccttaccaccttttatgtgtctttcccttcctctgtttacaaaataattttcttaaatatttcttatatatacctgagacaatgttataatttttgtatgaaccatatttagaaaaatcaagagataaaatttattgtaattactcatacttttccatatattccctctttttgttctttcttccttcttgtttcaagaatcctttggttaatatttcatttctgattaaataatttcctttagccattattttagggtgggtctgatggagacacattcttgttttccttcatttaaaagggtcttcatgtgtcctttatttctgaaggatatttccactgggtatagaattcttggttgacagttctttactttctttcagcactgaagaaatgggtgtcactcccttctggcttccacactttttgatgtaaaatctgctatcatttgaattgtttttttccagaaaggacaagtaaagtgtcctttctttcgctgctttcatgatttttttctttgcctttaattttcaaaacttggactatgatgagtcttgatgtgaatgcctttgggtttattctgtttaggacttattaggcttattgaatctgtatatttatgcaaagcccaaaatttgaaaatgtttcaccattatttattctccaagtaatttttcagcagctttatcctctttctcttcctttgaaattcagataatcaaatgttacatattttattatagtctcatagctccctaaggctgtttgatttttcagtgtatatactcttcattgttcagtttgagtgatttctatttttctatcttcaagttcactgattctttcctctgctctctgaattttgctgtgaaacccatctattaagttttaaaattttgttttatttttaaattctaaaattttcatttggttcttctttatgtcttctatttctgtgctgatgctttctactttctttcttttatcatctgtttcaagagttttacaatggcccactgatgcatttttattgtagttgctttaagaatattgtcagacaattctaacatctgtgtcatctcagtgttgatgtgtattgattttcttttctcatttaagttaagatcttcctggttctttcaatgataaatgattttcagttgaatcttggaattaaaaaaaattgctggtaaatagtaggtgtatatgaatcttggacattttttactttattttgtgagactttgggttatatttaaattctttgttttagcagcctcctctgatactgcaatggtgggcagacagggcaagggatgcctcattactgctagatgacggtggaagtccaagatctacatgcagcctctgttgacactcttgaggggaggagtaacttgttatttattactgggcaggggtgacagtacagggtcaccactcaagctcttctgtaccactctggctaggacagtggtgtttcattactgctcccaatgtagtttcccatgatattccatgacaccttggtggtggtgggatggcctcattactgctgggcagtgagaagattcctgagcatctactaggtatcttctgacaccatcccagcagacaggggcatctcattactgttaggtggaggtggaagtccagcttctccactgacaccatggggagaaggtggctcacgactgtgcagggggatgaaagtctgagctttccacttggctttctctgacactatccaggagaaggggagggataccttgctacaccctggtaaggatgaaagtctaggctccttacttggccattgttggtaaaggtgactacagtttttttctgtggtttggttagggcagttattgtctaaaagtgttttgtctttctaggctatccctttcttgtcttttggctagagagggcaggctttctttcgaggctttctttggtctgttgccaatggcatttccaaattgccagatttcctagcactcattctgggatacaaaaagcaaaagacaattcaggaaaaccaccatcatgtcattcctcaggttccaaggtcactagcagggtaactagtctgccttcttctccctaccatttacagtcttcttatgtgtgcatgctctctctctccacatatatttatttatgtttagttaagtatacttgccaagaggaataaagtacatctaatccactctgcctttgttcttcttgcagtattttgaatcaaacccaggcatcctatcatttcatctataaagactttagtaagtataacattagccagtatattaaaaatataacaatgattccattgtcacatctcccaaaattaaaaataaatatttaatatctagtaaccagtgttcagttcagtgttctatcactacataacaaattacccctaaagttataggtttaaaaaatttattttgccttagccttttatgggtcaggaactcagaagagtttgcctgggtagttcttacttggggtgtctcacgcagttgcagttatatattgactgtagctgcaaccatataaataagacttactagactggatgatagcatcaaaaatgttatttttcactaacattcatatcaaaatcccagataaggggcaagcattgcttttggtggttgtgccataacagttcccctccctcttctctactgatgtcatttatttgaagaacttggtcttgtggtatatcccattctagatctggttacctatattctcaaggtatcatttaatatgtttcatggtcctctattgttcttggaaactgggagttaaatgtagagatatggttacattcaggctcagtttttttgacaaagatatttcataggtggtctgtgtacctcctattgcaccataaaaataaaaacataatgtctggttgtcttacttttcataagttaataattaatcagtaggttctggtggtaacagcttgacacattcactaaaaagttcccaattgactttttgatgcacggcttcccaagtaaatttgtattttggaccagataatgctttgctatgggagactggcctgtacatcgtagaatgtttagcagcatctctgatactctcatcaccactcccacacactgtcttgttgtgacaataaaaaatgtctccaattactgccaaatataccctgaggaaaaatggccacaagttgaacacttcttacctaatggttttagcagttgttaaaaaccgttgcctaggtccattattttattagggtttacaagtagtgatttttctaattccatcattcctgcatttacaactgtggttttttttttttttcaaaagaaatactttctctgggtctttctagcaaaggaagaataactggttaataattttatttatcgatgcgtttagaatagtgagctgtgccctaacaacctccaaaagtggccaactaatttttgtttggagtatcattcggaaatcttgaatactgacacacttcatgtatttcaatcttttgctgtcattttttttttctttttgatgctcaagtttccccatccttaaccagcaagatctctttcaacttagctcaggtttccttttgacatgaccttaatagtcagataatttcttgctttcaggcatgacaagacagatagtccagattcactttatgcatttcctttcccagacttagaatctgccactcacccaaggaaccctgattcctttaatttagaaatggtatttaggaaccacaatctggtcacaatgaccttatggtttttgggttgtcactatttctaggtctttggaacatagttccaaagccagaactataaaactaagtttatttagaaaggtttagcttccaccattgtttctttcctcatagtctcccctttctctacagataaccattttttattagatttagtttatacttcttgtttgttgttaaatctataacacactcatacccctaaaaagtagcatacaatattatacagctttcatttaaaaaatattgtaaaaaatagacataacataaaatttaccattttaatcatttttaagcgtgcaattcagtagcattaagtacatgcacaatgttggaccaccgtcaccattatccatttctaactttttcatcatcctaggcagaccactttgtactcactaaacaataactcatccttcccattttcctggagctcctggtaacctttattctactttgtctcaatgaactgcctagtctatctgtaccttgctttttttttattttagtagactgtatatgctagagatcactctctaagagcatacagagtttctcttcattcatatttgacagctgcataatacttcactgaatagatgaagtcatacacaacagttgcttgttcatgggaagtttgtgtttctagtctttcactattataaacagtgctgcaaagaacagtcaaatgtatgcaccatttcatttttttttgtctatgtatcttttatataggttcctaaaagtggaattgctggatcaaagggtaaaggcataggcaattctagagcatttagatttaatgtgatggacaggaatgaaccatgaagccacgtaagtattaaacaacagcaacaacaacaaaaaaagcagatacaggatgttttaaatggtatgactaaaacactgctttaaaccaggagatagttacattagttagctcttttagtttaaataattttattatttgaagcgaagtacgtgaaaataactgtattgctctttctctggattttaacaaatcggtgtctcacatgaaattatgtaactcttatcttttcttctgctttatgagaatactgtaacaaggggtactaccttcagaccctttgactacatggagaaataaaggagggagttgtgccaattactggagaattttggctgtcaaatagcacatctgggcaatttgggccagaaatacatatatatgatatatgatatatatatgatatatgatatatatggatactatgatatatatgatatatatgatatatgatatatatgatatatatgatatatgatatatatgatatatatgatatatgatatatatgatatatatgatatatatgatatatatgatatatatgatatatatgatatatatgatatatatgatatatatgatatatgacatatataatatatgatatatatgatatatgtgatatatgatatatatgatatatgtgatatatgtgatatnnnnnnnnnnnnnnnnnnnnnnnnnnnnnnnnnnnnnnnnnnnnnnnnnnnnnnnnnnnnnnnnnnnnnnnnnnnnnnnnnnnnnnnnnnnnnnnnnnnnnnnnnnnnnnnnnnnnnnnnnnnnnnnnnnnnnnnnnnnnnnnnnnnnnnnnnnnnnnnnnnnnnnnnnnnnnnnnnnnnnnnnnnnnnnnnnnnnnnnnnnnnnnnnnnnnnnnnnnnnnnnnnnnnnnnnnnnnnnnnnnnnnnnnnnnnnnnnnnnnnnnnnnnnnnnnnnnnnnnnnnnnnnnnnnnnnnnnnnnnnnnnnnnnnnnnnnnnnnnnnnnnnnnnnnnnnnnnnnnnnnnnnnnnnnnnnnnnnnnnnnnnnnnnnnnnnnnnnnnnnnnnnnnnnnnnnnnnnnnnnnnnnnnnnnnnnnnnnnnnnnnnnnnnnnnnnnnnnnnnnnnnnnnnnnnnnnnnnnnnnnnnnnnnnnnnnnnnnnnnnnnnnnnnnnnnnnnnnnnnnnnnnnnnnnnnnnnnnnnnnnnnnnnnnnnnnnnnnnnnnnnnnnnnnnnnnnnnnnnnnnnnnnnnnnnnnnnnnnnnnnnnnnnnnnnnnnnnnnnnnnnnnnnnnnnnnnnnnnnnnnnnnnnnnnnnnnnnnnnnnnnnnnnnnnnnnnnnnnnnnnnnnnnnnnnnnnnnnnnnnnnnnnnnnnnnnnnnnnnnnnnnnnnnnnnnnnnnnnnnnnnnnnnnnnnnnnnnnnnnnnnnnnnnnnnnnnnnnnnnnnnnnnnnnnnnnnnnnnnnnnnnnnnnnnnnnnnnnnnnnnnnnnnnnnnnnnnnnnnnnnnnnnnnnnnnnnnnnnnnnnnnnnnnnnnnnnnnnnnnnnnnnnnnnnnnnnnnnnnnnnnnnnnnnnnnnnnnnnnnnnnnnnnnnnnnnnnnnnnnnnnnnnnnnnnnnnnnnnnnnnnnnnnnnnnnnnnnnnnnnnnnnnnnnnnnnnnnnnnnnnnnnnnnnnnnnnnnnnnnnnnnnnnnnnnnnnnnnnnnnnnnnnnnnnnnnnnnnnnnnnnnnnnnnnnnnnnnnnnnnnnnnnnnnnnnnnnnnnnnnnnnnnnnnnnnnnnnnnnnnnnnnnnnnnnnnnnnnnnnnnnnnnnnnnnnnnnnnnnnnnnnnnnnnnnnnnnnnnnnnnnnnnnnnnnnnnnnnnnnnnnnnnnnnnnnnnnnnnnnnnnnnnnnnnnnnnnnnnnnnnnnnnnnnnnnnnnnnnctcttcccctcacccaaccctggttcccctcgttcctcagtcccgatctctcccttactctgtccccgcccactctgcgccggcctctcagtccgggttgagccccacgtgtggacggccgcgcccccactgacagccgccgcccgccggcccgccccgcgccccgccgggcctctaaaacccccgcgccgcgccctccaccgccgcatcttctccagcgcccagcctcccgccctctctcttgctggccgcacgccccggccccgcgcacctccgcccggctccgcagccgctacccgcgcttcgttgccctgtgggactccgagcgagcccagagggaaccctcctcttcttctgggggcgacttttgtttgcttgcctgtttctttctggtgacttttgcagctttccaatatccgtcttcggagcgcacgggaatccgccgagctctgcgtgcaggcccttttttcttttgaggttcacattttttgaaattttacgccagggcttttgtaatttcctcccccgcccgctggcggtcctggagtcgctcggggctttaggccggttatgcaacgtgtaccgctcggggctgccggctgcacctccgccgcgcctcgccgctcactgcgctagacccggcgccccgcgtctcgcttcgcgggcagtcagggggccggcgctctgtcgaggtctccagctagagcagggagcccgagcccgagggagtccccggagccgacgaagggcttattagaccctgactcttttctgaggcgcgcagattttgtctttgatcactccctctccgcgggtctacggccgcgcgctttcggcgccggcgatggggagaagacggaggctgtgtctccagctctacttcctgtggctgggctgtgtggtgctctgggcgcagggcacggccggccagcctcagcctcctccgcccaagccgccccggccccagccgccgccgcaacaggttcggtccgctacagcaggctctgaaggcgggtttctagcgcccgagtatcgcgaggagggtgccgcagtggccagccgcgtccgccggcgaggacagcaggacgtgctccgagggtaagtgggcaagcggctccgcacctagggctccggcttgggggaggggggaatcctcagtttggcggctttctggcccactccgtcccagaccctttagctggagcctagagctgcagccccctttgccagaatatccaaagacccccaggagcgcgtcccccttttccttcccaaccccgcagctcagcgggcggaaagccctctctccgggggttgggcggcgggtggttagggggtccaggggtgccgatcgcagagcgtgtgcagagctcgcgctgcgggaacaggttctgaatgtccggcggcaggcgggcctgggtccgcctgctgcaggggccagagaagcctgcttgctccccacgtcggggccgccgctcgtgagccttttgtttgaggacgtgtgcagggttcacagctcaccttctcatcgtcaacccgagcgctccaccttgcgacgcgctttccttgacacgtcggggccaaagtaacagttgaccaaggaggaatggatttgggaaggagggcaaggattctttggaacggaatggtccctttgttctctgcatctggaagctagaatagtagcaaattatatgtttccatgcctcttttcgccctttaaaaaggcaggcaagggacgacagatgaaaggcagtgtttagacatttctgaccctcctgcattccagcatctagctcttttgcttccacgtctgcctcccgatctccaataatttgaagtgtaattttgatttgtttgttgtcctgaaatctactcgctcggggcattgcttacgaagaccgtttatatgttgctgcatccctctacctatctgttacgtgaccgcgcttgtccatcacaggcccaacgtgtgcggctccagattccactcctactgctgccctggatggaagacgctccctggaggaaaccagtgcattgtccgtgagtgcttggcagggatcgcagcttggggcagcgcactcggccctatctccggccgacctcttgcactcagccatttggacgcatagttgcgtttaaaatcaagtgatcacattgcactgataatcgggacgcggccccatttgaatagtggggaagactcaaccggtttgagtcagttcagacttcacttctagactctgttaaagggcaataatgataaagatttcaaagataattgaaagttttatctttctatgtctattaatacaaattggaagaggggaggagtagagcaattatctagataactcaaaaccactttttctgtaaaaaatccagatgagaccacatgttattatgcaaattatcaggcttttaactctgcttgaggtttgggccttatgaagatcaagatttcttaggcatttatataaaaccactttcttatttctggttttatatcaacaaccacataacctagatacgaaaggagcattctcgcggatttagtgttgacctaagttaacaaacttttaaaagacagaactcttacaaaggggcttgagtttttttttttttttttgctttttggaagacgtttaaatttagggtttccagaccctgaacctcaatagtgtgcagtagatttccaaagtatgaatcttagaccttgaaaaattctgtatctctgaccttaaaagttttgattattttattctgtttccaaagtgtataaccagttctccaagttctaattggagagctcattagttatcagcctcacagtcacggactctgggatgtcttatttcatatgcctgtaaatttgtgacttgcagtgtgactggccttctcctgtgtgtttatgtagcacaaccacatttgtcttgttggaaggagagccaggtatcatagacagcacattcatttagagccagtcttgactttagattgacctccatgttctccagggagaaaataattatgcaactgtgaacagagaaaaagggcaaggcacactaaccaagggataataaggatgtagtggcatttctaactctgtatttattggttttgtggttttgagatagatgcttaatgttatttctgggcagtttttaaaaaagagatgaaatctccagtgtcataaagactaatttcttcttattttttctaccttaacatcccactatttccaatggcaaaaataggaaacaactgtgttatttaaagtgacttataaatattttgaacaaatcctctgattataataagcctttgctttattttttaaaagaacatgttctgcattcttttctctccaacacagaagtcatatgtgaggcattaatggagggtgggtttactctttcaggccagtagggcattaccatggctgctttaaacttacacggatttttagactcctgaaannnnnnnnnnnnnnnnnnnnnnnnnnnnnnnnnnnnnnnnnnnnnnnnnnnnnnnnnnnnnnnnnnnnnnnnnnnnnnnnnnnnnnnnnnnnnnnnnnnnnnnnnnnnnnnnnnnnnnnnnnnnnnnnnnnnnnnnnnnnnnnnnnnnnnnnnnnnnnnnnnnnnnnnnnnnnnnnnnnnnnnnnnnnnnnnnttcatggtacgtgttgaaaatctgtaaagtcagattttattggatcagtgtggaatgggaattccagagagcagagccttccagaatatttgcagtagaaatatatgtatggccccactgatcactggtagaaaatcagctttgaaaatctcagggtaacagtgactattgtaatctgcatttctgagacttgaaatatttggatggttatgagctacattggaatttacacgtatcagaaatctatgagagtaaactttgaaatgatctttatatctgtaagaaacatttataacacttgtgtcaagacgtatctacaaaaatatttattagaaacacatctaaaaattctaagtacctaagattattaaacagtgcacaaaatagggacagtgtaatacctttatattctattgcatgagtctcatttaatgctaacagcctgcattcaattcagtagttcaattagtctgacatttaaaatgatcatatgtagaggtaataagtgaaatgaaaccgttataaactcaaaatcaagaattttaattccaggccttcctgatgataatgaattaagtaaattattatatttattggatttatctgtatcacaccatttagcaaaagaaagtatctgagaccatttacaaaaaagaaaataaataaaatacaaataaataaaaaccaaatattaattttctcatacatttgtacctcagcattcttttaatatagaaaaataaaaaatggtcaacagaattttagtgtttgacaggctttataaggagaagatattaaaaagaaactgtaattctccaagttctggaaacctaatgcattttgatttgagtctctatgttttgttggtattgtgcttagttgtagcctagaaaaattactgaagtacttccaaacttccaaatattcatttccaaaagtacgaaattgactttctcacctttttttttttaatcttcttagaacatgaagcaatgaaacaatttgcttattaatttatttattgtgaaattatgctatgaacagtattttgatcaatataataagagtgggatgaggttggctggactaaataacatttgagacctgaggaaacatcagagcattccggtataattcctttatgttatgctaccaaatgaaaacactgaacccagaaaggctgtgggtttttctggagctcatagcagatcaatggcagagtgacaactaaacttcagaccttttgggtactatgtattctttacctggccatgtgacttctcacagcatcactgaagtctcagcccctaggtcctgtctccctctccctctggtatttctaggtctcatagttttagtaattgtgggagggacgtattcagtaagtgtaccatagtctgaggctgttgtggggcaaaagggcctcagcattcttgcttctcattggctcacagatacagagtatatacctgtatccacgacaggtaaatgcctgagaatgctcagtctccagcccatcaaaccttcatttggtttggaacccgggtggaggtactttgggtctcctctcttaagcctagactaaatattggccttctggggaggaggaaactttgaaataaaacaatgttttaatgcacatttgtcattggagagttactggtgatcagaaactgtagtacattttaagaagtaagagtcaactccatggcaggaaacatattcttgcctaaaatatttttatcttaacatcacagtatttgacactattcactttttctttttttattaatttgagacaggatctggctgtcatccagactggaatgcagtggcatgatcacagctcactgcagccttgacctctcgggctcaagctgcattctgacctcagcctcctgagtagctgggactatgggcacatgccaatgtgcaaggctaatttttaaaaaaattttcgtagcgttggggtctgcccaggctgatctccaacttctaggctcaagtgatccatttgcctaaggctcccaaggtgctgggattacagacatgagccaccatacccagcccactgttttcatttataagaagtactaatgctagtagtaatatatggatatcagaaggcatcttggagaagaaaaacaattagtgagttagtttacttctgcaggaaatgcttttttcattgttgagggtcccaaatctctttgaaagttgtgggacctttccctaactacagccagtttcagagcatttccagactttcttcttgtctttatatatccagtcatggcatgagcattaaagtacacagcccttgtgccgaaagagagaactcaattatggttatagagagaaatctctcagctcctaaatgaactgtctctaaacatgggagagacttcccattcgaaggtacttggctacaagtgtggagtatctgtggaatgtattgtgtcagtgagcctaacattctttgctgtgatgaccctcatacctttctgttcattggaggtcacagctgcaggaggctttgactctccccaccatcaaaatgccacagtagcttttctgagcagtaggaatacgctaggttgtggagataatatggaaggagaaaggctgtaggaaggagagggaattattgaggggaccaaagattgatcacagggtaggtcagataccagcctggaaggaatgtgtgtggaacccttgaggcttggccaagtcattagaactggagcctctggttcagccaatttcatgttgtctgtctcctgtgaaggcttttgcatagtgggctgtattttctctattcctgcaaccctcccaactacttagaatcaaggctgtcttctctgggtgaattctgcattttaaactctcagtctttaatgaaagagacaacctgtattgataagacaattaaagatttaggattatgcaatttttttttccttattgcaaagctttaactgtttattaaaaaagtaataatccatacataagcccatcatgcagtgagatccattgtactgtttggtgaaagttcttttagaccttttaaagccagtaaatatgtgtgtgtatatatatatatatatatacacacatacatatatatacacttatatatacatacatatatatacacacacacgcacacatatatatgtattttaaacttaaaaagcctgtgctttattttattctaccatgttttcattctgtaacgtttacttacatatgactttatttttgtttctatttttccataagttattggggtacaggtagtatttagttgcacgaatatgtcctttagtggtgatttgtgagattttggtgcatccatcacctgagcagtgtccactgcaccatatttgtagtcctttatccctcacctcctcccactctttcctccaagtccccaaagtccattatatcattcttatgcctttgtgtcctcatagcttagctcccacatatcagtgagaacatacagtgtttgcttttccattcctgaattacatcacttagaataataagtctccagtcacatccaggtcactacaaatgctgttaattcattcatttttatggccgcatagtattccattatatatatggtgatatatatattatatgtatcacagttatatatatatatcaccatatatatataacagtttctttatccacttgttgattgaagggcatttgggttggttccacgatttttcagttgtgaattgtgctgctattaacatgcatgtacaagtatctttttcgaataatgacttcctttcctctgggtagatacccagtagtggtattgctggatcaaatggtagttctacttttacagccactatggaaaacagtgtggagattccttaaaggattatgcaatttgaaacagcttcatttgtttacacgttttcataaggatacctgtgagacttattcccaagtctgcaatgggtaattttattgcatatctgaagttagacatttatatcatatattttatcttagtttttcaggctttttatttttaaatacagctttcttgttttgtaaactatggtttattatatagttattcattcattttcctattgtgctttctacagcgatttgtagaaatagttgtggagatggattttgttcccgtcctaacatgtgtacttgttccagtgggcaaatatcatcaacctgtggatcaaaatcaagtatgtttcttacttgtggccttttcactgcatttttcttaagctttggagcaaatgctaaaggtccttctatgtgccagggagttttaactgttattactttagttaatccttacatcaacattatgagatactgttaataccccattttacagaatagcaaagtaaagcacacataatttaattaactggcccaaggaaacacagacttgaatccaggtattctgatgcctaagtgtatagtctcaaacactagactgtatttgttgcctttgcttaacatgtgttttgtgggttatctaagggggaaggagaggagaactccaaaggcagcatgtgtttattgagtactgaccacatactttacacataatggacctattttgcttcacatgtattaactgccaacaacttcataagataattataactgtggactatgattgtgtgattcatgacccaattagaaattgttgggtccttaaggtcgaagattaatctttgaggctagtatttaagataacattataacaaggcagaagcaagattgtttatttaattgctcaataattaaataaatgctttcttaagtcttgcctcaaactagtgtgaagtcattatatttttaatacatctttcttcaaattttccctaaaagaaggtaatatagtatgtctgactcaggaataagattcaggattcatacatcaaatgccattgtcttctgatgaaactcctgatgaaaactctcttaatttcacttcctttgaatctgccatttcctcagcttttaaaacctaccattcaaattcatcaagatttcttgaccactttaaccagaacatttcatccccaacttaacctgaacctctctttcttgcctgattacctacaagatactgttgccagtatgttcattatcctgttcctagttttctcatatttgcctttggcaaaaaacacaatgctggaggaattttaagattcagtttcttaattcctctacctgggagctgggacattctctggtccactctttgcttgtggtatataatttagcagggaatctgtgcattcatttggccttgggcaatccttccatttcatcaggaacttttctaaccctcccaatcatcatcctgtttgaccttgctaaagcttttggcactattaatcattatcttcttgaaatgttgtttttcattttctttgaaacacccttgacttttaaaatgccagtggccttcagtgctccttttcttgatcattcctttttagtctcttttctatgtcttcatcagtctttcattcaaggtttggtattcctgagttctgccctccctgggtgaactcatgttttcaatgactaccaatctgttgataactcataatatttatctacactggagatcccaccactgacctccacactcatatattccctttcccatttgacatctccactcaagaaatagcaagcaattgaaacttagtagcatgtctaaaaggaaactgaatttattgctgaccacaggctacttgaaccacacagttcctcctgccttggcaaatggctctgccatccacccagtgcttaagtaactgctgcttctctttctctatgtcggctctttaaacaagtcctgtaggctttactggaaaataattatctcagatttatcttttcctttccatctccactgctaccatgtggtgtaagctatcctcatccttctcccagactctcgccctcttcaaatccgttctctgcagagcagctagagtaatctttttaaaatatagattacatcacttcactttctcatttaaatcctttcaatgactccctgttgcatttgggatataatgaaaacccttcggtggccgaggaggccctgtgttagctggctggtctctgcctgggtttccaaggtctcttccctgtctgcctctttttaaccacaggaatctctccattcttcagaagaaaccttttaccatcctaaggtcttttgatttgctggttcttctctctctgaagtttctccgtggtacttttaatatctggcttattcagtgtaaatgtcacctcagagtggtcttgtctagtgccagtatctaagctccttcttggctccagactagtctccttcacaacagtttacttcaaacagtttatcacagtctataattacttagtggtatttgtttacctgtgttttccgtagctccccatcggaattcaagctctgtgaggatagctttcaagtccattatgacagtactgcactgagctggaatggtgggcactcacctcctgcattctgaatggagacaaaagtgcctcctgctttccagaaactatgctgctagtcaccttctgtttatttttttttaacattggaagtgttttcaatgcatcctgaaaaacatgttatcacagatatgcccatgtgtgcacttataaagaaatgatgaataaaaatatgtttgggtcatagtatttccttctgtaagatataattgtcattgaattggataattgagtttatagttttataacctctcacatatactataattttgatgactgatgtttttatactttttgttattgctctttgcagttcagcagtgcagtgtgagatgcatgaatggtgggacctgtgcagatgaccactgccagtgccagaaaggatatattggaacttattgtggacaacgtaagggacattgatttattagaaatcatttgatttggtggatatttcatattaagttataatttaaggctcataaatcctgtgatcttttgaaaaaacaattttatgtagtaaaccataccttaaaactgaatttctaatttttatcctgtaagaatttttctaattcttttagaattttgtgctttagagcagtgatgttcttgaatagtaactagtcaacaactggtaactagtgctttagcaaatgtgacacatctcacagattttctgtgatttatttttcctttatctggctccataaaacatgtatactttcctgaaaaaaaaagagcaagttttctgtgatctttctttcttttttacttcttccttccctctccagttccctctttgtatctatgattttttagaacttctcaaaattaaccccaggagagccaatctgataaattatcctttgcttaaatatatttaatactaagatacagggtgatgaaatgatttttaaaaagcagatgttattgtgaaacagggagctgtaacccagcaaaactggtaccttcactggagaataccctgtatgaatcaagaaataaccttttagcaagagtgtaaggattgtagtttctggattgtgacacatcactgtggaacatttgggtaatcttctctaaattgtgggacatttttgggaattcacatattttgaagtaatgtcaccttatatgacattaaagaagtgttatttctgaaattgaatcacaaatataagtccctttttactttatttgcatttttacctgatgtagactatacgttcctgctaatcttcaaggcttccttaaggattgctggtctcttttttaaacatagaaaaaccaagtcttaggtgtaaaagaatatctagcttgttttcagttaacattattttatttttcttgcaatgaaaaatttttttaaattgttgtaaaatatacataacaaaatttaccattttagccacttttaagtgtatagttcagtggcattaagtccattcacactgttgtgtaaccatcaccaccatccatctccagaattcttttcatcttggaaaactgaaactctgtacccattgaacagtaacccccatttccctctcccctgccccgggcaaccatcatttacttctgtctctatgaatttgactactttaggtatttcatggaagtgtaagcatgaagtatttgtccttgggtgactggtttgttatacttagcatagtgccctcaaggttcatccgtgttttagcatgtgtcagaattttcttcattttaaaggcaaaataatatttcattatatgaatataccacattttgtttatccagtcatctgttgatggacatttgagttgctttcaccttttggctcttgtgcataatgctgaaatagctgtttgggcccttgctttaagttcttttgggtgtatacccagaagtggaattgttggattacatgataattgtattattaattttttgaaatgctgccatactgttttccacagaagctgcactgtcttccattcctactagcagtgcacaagggctccactctatatacttgccaaaccttgttattttctgtttttttttcttaaataataataatcatgctaatgaatgtgaagttgtacttattgtggttgttacagtaatttccaagtttgtcttgtagttaaggtgattatggtaattataactttctatttataagtgctataaagttttctttagaataattttatgtaaaataggagtatccatttaaagaaagatattctgttaaggtcaggggtaggtcaactttttttgtaaaggccagagagtatatattttagaccttgctttctccattgcaaatactcaactctgccattgtagtgcagaagtgaccatagataatatgtgaatgaaagagctaggatgtgtttcagcaaaattgtatactttatagacactggaatttgaatttcacacaattttcacttgtgactgagtattatttctttgatttttcaactacttaaaagtgtcaaaattcctcttagctcatgggaagtacaaaaataagcagtggcctagatctggcctttgggccatagtttgcagattccttgtgtgggtgtgggtggttctcaggtatgacaagaggagactgactgaagtttgagaaatggagggtgaaggtttttaagagaatacaatacgttgaggccagttttctagcaagaataggaggggccaatgtgttaaattctctaggctagggttggccaggggaggctaagaaagaactggataacagtggaacagataaatgcagcagagtttctcattccatggatgatactttttctatattttctttgtacattcaggtatttcccacattttctacaacagacttctgtttataaccagaaaagaaagacagaagtctatcacaaacacagtattcataaaaagatagattgatatatatttttaggccttagaaaagtgttaggatatctgattgccaactctgttttgcaaagtttcataaccaatgaagagacacatctatccttgttgaaacacatccttttgctctgtagagggaaaaatgaaaattagaatcactgaagaaagcgccttgccttgcctcaactgatctttcagagtatttgctcaaatctgtcctgaaattagctgtcttcagtctgaattaagctgctcttcatgccttgggcatatgtgtgtatgtatgtatgagggttgtacagaacacactctagtgggtgtgtctcttgttcttcacacaggaatgagaaggcaggggatggaaaggactttccgcttctaaaatgctttgatgttcttccgcccctgtgtcaaaccatattgatgttaccacattttccagtcagaggaaaggcaacatcactgggtcagaaaatcagcatatactgaacatttgttctctaggtttctcatgggatgacatctttcttaatgtttacctcagggataatagaacatataggggaagcaaaatgtgtagcaaacacaatttatttgtcagcaagtaagaaggtaaaggtatgataactaatagattaccagctcaaggaatggtgtaaggaagatgttttccaagtcgtcttatatagaaagagtgttacaatactgagagcaaagaagcagatggaacatttttcaatttatgaatccagaaaagtcttggaaataggatgcttgctaaaatgaacattataaaacatttagactgcttagctgctttcctggaaacagacagcacttcttagaaagcattcttctatttcatccatttcattcagcaatgttgattgagtaactactgtgaataggtaagataataccctggccacatattctggtagaaatgacagttaatactaaaaaggtaaatacctaatacacatttaggtagcgagaagttttaggagaagaataaagcagggtaagagggagagagtctgggtcaggattagcagttgtctgctattttacatcaggggtctctgagaaggtgacattgaaacacagatccgagtctgtgcctttaaatctatggaaaaattgttctggacaagtgaaaagcaaatttaaaggacctgtagtgggaacagactccatgtattttggaaaccgtaagatccatgtccctggagtaaagtggggaaagggaaaatggtaagaattgagtttggagagggaggtatagggccttgtagtaggccaaggaacaaaatttggactacagcctaaatattatgagaagtcactggagcattttgagcagtggtgttctgtgacctggttaacattaaaaaaaaatcacctgtctgctgtgttgagcctggattataacagagaaaaggaaagggccatgtaggaggctaccacagtggtgctagtgaacaatgctgcagctgtagtcgctgaagatgtggtaagtggttgtattgagcttgtattttggaggtatactctgatggaccaggcgtggtggataaaaaaaaatagaaaaagtaaaaatcaaaagtgacaaggagagggttttggtggagctgctggattaatagcgatgtcatttccagatacgggaaatactgtatagggagtgggttgggtaaggagtggtggggctgaggataagagttttgttttggattcattagattgagaaatctgtcagacttataagtgcaaagatctatgaactctgatcttaggagagaggttggacatagagatataaatttgggaccgtatagaccgaattattatatagataatattttaatcataggcttagataaagatcattaggaagttgttgtagctaaagaagagagttgaaaacagagacccaattcagcccaacattgtgagatggggaagaggaaaagaagcctgcaaagaagagtgagaaagaatggacatgaggatggaatgaaaactgagagagtgtggtatcctagaaaacgaaggaagaaggcagcaccaatagcaaagatttataccttcctatgtcagacagtaggcttttgtttctttcctcttgttaacattttaacttggtttagaatgctatttttctaacacatttgtgtagaaattacaatcatgatttcagacttgacttatgcccaagtgtctgcgcctctgctgagttgtaagggagtctgtctaataaaaatatatacctgacctgttacctggcacaaagtaagtgctcagtaaatatctgttgaataaaaatgtcctctaaatatctgagcttttacagtatgcaaccaacccacacaggaaaaacagtgtgttttctccttctaggattttggtgggcagctaagaaaccagctcatacttctatctgtagtacatcttttgctctcttgcctttcatgccactgtcatgctaggtgtaagcacagttttcttcctgagtggtcagcgttccttctgtggtggaaatttaggcattttccaatttttttctgactccagttgaaatataagttgctgtttccattcttttttgttacaaaaaaatatgttcttttgtaaaatacctttcatcataattcatttgagaaaaggaaattcaccatttttggtttttgcttctacttttatctgtatttcctgcttctcttcttttgctattgctctttaatgtaaacttcggctgctgcagacgtcttgtcttacagaacattttcgtacaaatgttctatagttaaaagaggaaggaaattaagaatgtagaataccttcagcgtgcagccactgtgcactttgtcttatatgctattttatttagtcctcaaacgtctgtaggggaggaactgttaagtctctttttgcaggccaggaagctaagaatcagagaggtggtgtggtgagtgggtgctggggacagcagagctcattatttgttcactgcaccattctgccttgcgaagtacttgaaaaaatgccgtgaaattttgatgtgcgggagtttgttgagttcttgcagtctgtcagataccacagtaggtgacagggattcaaaggcaaacagatctggcccttgtcctgggggaacccactctcacatgagagacagaaatacaagcaaatggttgtatcagtggcccttgatctttttgttcataggatccctttacattttaaaaaattattgaggtcctcaaatgtcttttgtttatatgagttccttcaatatttatagtattagaaattaaaattgagaaatttaaaatatttattgattcattaaaaataacaagaaacccatattataagctaagataaatattttttataaacaataactataatttgcaaacctccaaaaatctttagtgagaagggaggcattgatagtctaacctagacagattagattaggtttaatttgtaatgggccagctctttctaggagaaactcaaggttcatccagccttgttctacctgcgaattggaaactttgttttggaaaaccgtgggagaagcccttcctccatttaccggaggttgtgttctgagtgttacagtcagtgtggacagcttttccccaaaggctggcattgtgataagagaacacatgggaaagtgactgtaatttaaatttcctacagctcaatagcatttaaagaaaattccacacattttaattgatcacattactttggacttagtattttgcagtgcatctttttaacaattgattttttaaatctttcttttttaaaaatttaattgtattttaatttctgggatacatgcacaggacatgcaggtttgttacataggtaaatgtgtgccatggtggtttgttgcacctatcaacctatcacctaggtattaagccccgcatgcattagctatttatcctgaagctctccctccccctgccctccccagacaggccccagtgtgtgttgttcctctcccagtgtccatgtgttctcatcgttcagttcccacttataagtgagaacatgtggtgtttcgctttctgttcctgtgttagtttgctgaggataatggcttccaccttcatccatgtcgctgcaaaggacattatgttgttcctttttatggctggatagtattccatggtgtgtatgtgccacattttctttatccagtctatcattgatgggcatttgggttgattccatgtctttgctattgtgaatagtgctgcaatgaacatacgcatacatgtaggaatcttcaaatcctggcagttgtttctatggaattactgcacagaatgctctcataggttttgttttttcccaccttcccatccatctttatttttttcatgttccccgtggccttttttccttttcctttctgcttcgtatttacttatatttcaagtctgcccatatttcaaggcaatgatgagtgggaagtgctatgtaggactcagctggagataggtaaagaagcagaagggtatggttcctagggagctgtacttgtgcagagacacacagaatcatgcctttaattgaagtgtaacttatcaacaaatgcctctgaggccattggcacagtgacgctttaaggtcaagatcatcttttatttccaagtgcgttttagtcttctgaccatcatcagcagaacagaaatcactctgtgcattctggagatgataggcaatctatccggttcaacatacctgataaggaaatagcagcattactgtgctactagatatcagtatacttattgagtttcccattttatgatatgtacctcacttgaagtgtttggccccccacttccctttaatttgagtaattagtgtccttcaactccatttgtggacacaggtcatagaatataatcctctaattcatttgtgaggacaaatgtttcaacagggtgggtagatagggagacacactttcagtatcagtattttctcctggagaagatatgattcttgaattcagctgtcttcattatggatcatgggaatacttaggttccaaggattctagagagtgtgatcttttaggctgaaccgagttgcagtgcacggcagttcagtggggagaggggagtggttcaagtttactggctccctcttgggctcatggaaccctaactcctggtctcccaggtcacaaggctaaaggagcaaaagagagtgtgtgctgtgtgtttgtcagcatgactttggaaacatttggattgtgagttaattttatatgaaaaaacatattatgcttacacagctttttttccctttttttcttctatgacctgcaaatagtctctacacattggttacttcttttggcattttatagctaacgttgatggtattttccccccttttctttgttttgcccttccagctttaccttttccccccttggcttccttttcttctctgatttttcctttttccctttattgccatatcattttcattttttcttattacatttttctcctcctactccttccctgtgctaccgggatcggcctcttttttccttcatttcccatattttattcattccttaccagtgaaaatatagattatagggttagtagtacagaaattgagggttgagtagttacattctaaatgagcatgagagccagcgaatatgattctgattaaaaaaaaaacaaaaaaccttttaccaaacacttgcttaacagtgtgatttacatgaagtatgtaagtttttgtctgaatatacttaaatatatttacttaaatttaagatgtgaactttaacctgtgtaatttatacaagttgcagtttaattaacataatgtactataatttaacataagatcctttattggcagcatcactgcactactatattgtgcttggagactggctatataatgagcttcttgctatttttgtatgcagctgtctgtgaaaatggatgtcagaatggtggacgttgcatcggacccaaccgctgtgcttgtgtttatgggttcactggtccacagtgtgaaagaggtaagaagagaaatgagactttactttctgaagaagtctattttattgtaaaaatgtataattttttgctattcaatgaagattctgctaatgaaattatatttttactcttctttgattatgtctctaagttgaatggtaagattttgagacatagctaatagtggcagaagtgtctcaactttttccaccagtgaactcagtttgggcggccaactctggggctatggctctagggtaattttgagtgagtgactgatggcaaattctaataatgtgcttaattcaaattaggaggcattgttgaaagtactgcttctgttaaaaatgaaatagtgtcaagttatctttggctgcaaaccccacaaaatctgacataaattgtcctaagcaataaggaaatgtataacatttcacaacaaaaagtctcgagctagtgggcctcaggtaggatgtgatcaaggcttttaccctgttactctgtttctcttgaccctgccctcctttatgtttcactttttgtcctagcctgaacttctttgtgtttgtaaaatggctgtcagcagtcactaaggaaacatgtttcttcttcacctcttgagacagaaaacatctcctccaactgtgggccagcaatagcctccagagacactttgtacgctgcctggtttaagcttgagtttttaaaatagttcatggcaaagtggggggtggtggtggtaatatgtttgatgtagacttaccaggacctgtcgttgcagcaggagatgatttaagcttccccagagtcacatggaagggatgattgggtatctgaagccagtagagcttccttttggtaagagaaaaggggtggagggatggatgctgggtaggcatcccgcattgtccaacttattcatataaatggttagtcaagccaatgtgaaaccaatttactatgatttgaatagcagttaaactcatgacctatatagactgctgaaaaatctctggcattgatccctcattatggatcatgggaatatttatgtttcaaggattctagagagtgtgatcttttaggttgagctgagttgcggtgcagggcagtgcagtggggagaggggagtggctcaagtttgctggctccctctaggccagcggaagcctgactcctggtctcccaggtcacaagtacaaaggagcaaaagagtgtgtgtgctgtgtgtaagctatctaaaataatgtcctgatggtaaacagtttcatgacatatcaagaagttaaacttcgtaaaatgtgataaataactagcatcgagccataacagtaaaaacaaacttgagctaaaattaatattacataatcattcattgttatttacatcctcagtgcatttttccagagcttgttgtggcatcaagttatacagcactttctttattgtgaaactagaatatatgaaattatgtcaatgaaatattacagataagtaggggtcaaggtttatatacatatagaggctttgagtcgtgaaaaagccttatattttaaaaattatactcattaccctgacaaaacttcatcttgcttttcaagtttaacctggagaagaaactgagaaattacaattatatggtgaagtttgaaaagtaaaatctttttcacatacatttggatgtatatatacatcaagatatttttattatttttaatgtaattgagatttcttgggactgaagtacattccacaaatgataagagtttaatgttacacttaggatgaatttaaatgtctttaccagatgcttttatttgggaaagaaaaattaattatgaaacgttagcataaaaagataaattattcagaatggaataacacacatttcttagataacgctaagtttatttgaacatcatagaatgtagaataaatttaaaatttcaaacataatcataattggtagagatgatcttcatttttctgggagtcaggtaaactttgtagctctttcatcctgaagcagatttcaaagtcaatttgtaattggcaaagaaattgggtgagtagtttcaactcagaggcttccaggaattacgtcattattcttcaacagttattcattcattagatttgttagtccttactaaatttctgagaattcaataaagatttacatatattttacatgtacagtagcatgttttccaaaaaaaattgtaagattaattagttaatggattacccttgggatattttttaaatgttggtttgtttcttaaaagtcttattacttactactcttcagatggaagttctaaagcttcatttctttcaaagaaggagttaacaagttgcactcttacatagcaaccatgaactttaatattttaaagagatgttttaaattgaatttatacatgtataataacccattctactaaaaatgaagttcataatttttttcaagaaacattgtgtctgtgtggatgcaaaaagagtaactcacttatgttgaggttggtgagtaagctcatgtgccctgttagcgtttaatgtttatatatatatttttaaattactgaatttcaaaatatatgttctttgttatcttaataaaaagacctttgtaaaatcagagatatttgttcctcctaatgtagaacacataatttctctttaaattggccttttgggatcagtcatatgataaaacatggctgcttttctagctgtctgggcttttggcagactggtttccagacccagagactgagtagtaaccaatggctggcatgattatggtatttaacttgagtctgagtgtgggtaacctgaacttctttggagttctcttttcacacttgctgatatgtacaatgaccttttatacttagcatcaaaaaaaaaaaaaaagagttcttgtggttacaggctaattgtaaaatgcagacagctcatttgtggccatagcatatgaaggtactcaattgtttatgtatctctttccaaacaaatgtaatttgagaaaaaataaatatctcacttaatatacacttgagattaaacagaaatggagtcagcattcaatggtaagacctgatgggttttttccctaacacttaaaatgtaccttatgttttatcagtagaaacttggagagggtgggtagacaagacatagatttacctgaggaatttctgaaccaaataggtgattacttgatcgcaaatgtggcctgtctagagtccttctttcaacttttttgacttaaaggattgttgaaatcttttgtaatggaattttctttgaagtttatataaggctcatctgttagaaatatatcccagacccttttaagtaatacataaattactactacaaatggtttttatcatgtaaacatgacttccttaaaatagtatgcaaattgtgtaaaatttcaaataatctggtgcttagtaacatttcctttaaaatgtacatttttttagtacaacttaaaggaaaaagggactagaaaattatttgttaattattgacattttaaagaaaaatgacttttgttaatctgcatcttcagtggaattaaaggtgagatcaagttgcaaatgttagagttcaaaaaatctaaactttcaagcctttatgtaaaatgaaaatagattgatttccatttaggttaccttttatgaaatcatccagttatagacctaatgcgtgaacccaggtctaaaagcgtgctgagaaggagtcactccatctctgcctggatatctctagtcaggggctctcactcactcaccccatcatgaaacagtcctgctcatcatcagagtcctgcttgctggaactctgcattattctgctgctgtccaaccaggacatttagcagatgtgtaagatcccatatagtctaattcagtgggaagatgatgatgacaacttctctgaaaggagtcaaccacaacctgccactcaggtgtgcatgctggcaacttggcttctaattataaactctttaattattgtatacatttttatttattcacccatacttcaggaagtaaagtaactgtagtagccattaaatctacttagaccttacccaaatcctccaagagcaggtgtaaagatggacaaatttggattttcctgaattctgagaataatgtagacccagactcaagttcgtttagaaataactgatatacttgttaatccaatggacttggaatgtattataaagtattcagggtgactgtacagcttatgaacattcaagtaacatagcaaattagtagtatgaccaggaatatagggaatatggtgacgagaacaagctggtattacatagaattctatacccagtgaatttgatactttcaagaaatgtataaacaatgtttttaagaaaataagttccattgtaattttctgttttaaaatgtcatgcatgtttattataaagtaatttagaaataaaacaagatgaaagacgagaatctaattactcataattcctacacttaggattaattaccgttaatgtcttggagactataacgtacactgcacgttgtaataacacaaaaggacaagcaagatataagagtaagttatacgtgctttggggtgtttacttcaatttacctttttaactacaaattagaatatacaagagtgtaactaaactaatttttaaatttaaatatttaatatttattcatccaatatttgttgagtactcttacagtattaggctaagtacttggaacttgagttataagaaaaaccaatatatacttcttattaatgagaagcaaattattgaaaaactagtcatctactttacacatgaggatgcaataagacacagtaaataccgtaataggagtaggaacaaaaagtaagagagctcagaaatgctcactaatgcaggacaaattacaaaagtctttctttcagtcaaatgaatgtagaatgaaaaaacatagcttactacagtgggaaaaacagtatcagactaattcctgagatatatcatgattaaatcttatactaatgttatttaaactccataattcatgaccaattaccctaattactaagctgatatttattttgcagaaataaaatgtctccctttttcttgcactctgaagatttagtagaatgaaaattacaataagcagagagagaatgttaccaactgcagatgtcagactcacatgtaccctcaggcacacacacacacacacacacatttctgcacttgtgaggccgttaagaagagcattttataaccttgcactctctaagctaaacttagccttaaatgggcatcagagaaataccaaaagatctgtgggaacttaactttttggcactagctcagttgatacccttatcttgaatgccattaagaacagagggaaagaaaattagagaaggaaaagcagacagtgggaagtggaagaaaaagaggggaaggagaaaatgaagactgataagaaaagagagatgtaatgctagaagagaagtggagacgcttggtgttgtataaaggaaggacttaaatcagggagaaaaatcaattcactgattgatctacctgggagaggccaggctttcacttcttaatccttaatttaagagtctgctgtttagatctgtaaaataagactgaacttttggcagcccagtagatcctgatattttattctcttttgaacaaaagcagtgtgtatctcatttattccagctctttctttgattttggtttatctacctacaggcagggaaacctgcaatataaaatacaaaggctagaatattttatatttttaactccataaatattttttcttgttttcctgtttcaacatcggattaaaagacattagaggttaattggtgtagaaactgggaaaaactaccagacacacacaaattaaatgtaatcagttgttattatatagaatttactcaaaagtaattaaatcagatgtgcatgtatatgggggaagttatgtaacaaataccgtatatttcaaaagttacaaattcttaaataacacctgtctccaggggtttcagataaacagttgtggacccataatcacctcacagattcgttggaaagattaaaagcaataatgtgttaagcacctgacacacaataggcagtgtgcctgacacatggtaagcttccactaagtgttacttgttgtatttttagaacacaggctgtagtcaaaatcaaagcttaatattaaaacctatgtaactttagaaatgtgattgccctatctgatgcctgtttgtacatatataatatatatctattatgttaactttgaatcatttttgtgaagattgaatgatataatgcctggcatccaataaatgaaataaataatggtcattaatgctaatatcgttttaagaggactccccagttatcaaaatgatagatgtggtggctggttattagaaatagaatattcgaaaatggactctcaaatgggagaaaaaagaatgttgcgacctatttaagtcatacaaataaggcttgatgatgtttttattgacagtggaaagacttagaataaagtggatactttaagagaagttcacaatcctgagatgagatttaaacaagaaatgaagtgccgtggcctgtgtctagcacagagttaactgctcaataaatgatcagctataatttaaaaattaagccaagatctgatatgcttttttttttttttttttttttgagacgggttcctgctctgttgcccagggtggagtgcagtggcgtgatcttggctcactgcaatctccgcctccccggttcaagctattctcctgcctcagcctcctgagtagctgggattacaggcatgcgccaccacccctgctaatatttttgtacttttaatagagatggggttttgccacgttggccaggctggtctcaaactcctgacctcaggtgatccacccgcctcggcctccgaaagtgctgggattacaggcttaagccactgcgcctggcctgatatgctgtcttagataaaattgtcctaatgggtgagagagagactgtttcaggatctctgggacatcagttgtgaacagcgtaagtttcactattttaccttttgtgggatttttggtaacggtacagattgactggaaaatattgtatatcattattatgaccttgtttttatgcagttgaattagaccctacttatcttgttttgacatgtttttattgtaaatgtcagtgttcctattagtactcattacttaactggtcttttgaaaatgtcttagtttgcccttttcctatacacaagttattattctaaacagtttatagtataactcatatataggtagagtttacttaagccaagtacttgtaatctatagatttgcatattgctaaatctgaatgaagaagtaggtcagagagtttttcaaacagtacagagaggagtccatctgtgatactttctttgaccaccctaccttcctacccccatcttatttattgggcaaaactaaggcagtctgtcctgtccttttacctgccatatatccattcctctagaatagctcttttcattgtgttgtgactgtgtatttgcttggctgtaggcctcttaagagcagagatacttttctaaaattgcctttgtgtttcttatactccacacagtgcagcataatggaagacgcatcatacatgtgactgcataaacatgggggattccaagtagaagaaataggatgaaaataagtatagagataataaaggtccttgaatgttcacagagattaatcatttcgtgtggttgtaatacacagttagtgaaaggaaagagtagatgatgaggctggaaaaatagacacagaccttaatttacaaagtctgaaatgctggagtcaagaggctgccctctataccctcaagtaggcactgagtagaggagctatgaatgacttgtatgcttgaaagcagttctccacaaacgtcattctggagtggcaaacaaaatagaatgaagggtggaatctcttagaactcactgcatgtctgctagattaaagttgtataatatttcactaggattatgatttatgtgtacaaaacttagatttttaatataaattggaaattatataatttggagggaagataacatttactgaacttttactatgataaatactttagaggaattaatatttttaacaacccaaaatattttttaacataacaccatgaataaaaaaatggaggtataaagaagtgaagcaattttctcatgttaactcagctaataagaaagtaggattggaacactggtggtataacctcagaacccatatacttagcctcaactttgattctagtgaaacacgacattgcaaaaataatgtatttccactctttagaactatattgtgtcagttcaatatgagtactgataacaaggcacatgataccattgaattaaagggatggcttgtcgtttggggattattttcttatctagcctagggaatacacacacatatatatgtatttcagattatgactctgaattcataggctcagaatttctttatgtatataatctaaaatattcaaaactcatagagcttaaaacaaaattcagacttctgtgtttagccaagatagactaacaggaataaattagccttcctgcctgaaaagaataaaacacagaacagaatatatgaaaatgtggttttcatgatattggacactaagcaacaaaaaacagtgacccgtgagagaagggaaacaacagtgtgaaccttttgacttccgcagcttgctgcctgaaagggtttttccaggttgtgctacaacatggaagtttgccccacctgtggctcacaggcttcatgcagcccaggagagctttgaatgcagcccaacacaaattcgtaaactttcttaaaccattatcagggttttttttcttttttctttttttggtcatcagctatcgtcagtgtattttatgtgtggcccaagacaattcttcttccagtgtggcccagggaaatcaaaagattgaacactcctgtgctacggggtgagaaaatccaggcacggcctagcagactccctaagttctggggagatcaagatggctagagttctcagggcagaatcctggtgaggaaacagatatatagagagaacttgtgacatctacagaggctgtctctcaagttttcagcagaatactgacaatcacattcatgtgaggaatctttctgagactggagaaggaactgcttgaaaggagtgaaaggaacaatactcagagttgcacataagcctggaaatactgccttcctctctaaccagattagagggtcacataattggtggggtattggttagagtactcagaatagtgttgcctcaatagtggagaacaattaactatagactaaatgctgctctggctgtggagaataaattttaaaagtaacagctaaaaggatcaaacatctatctagaaagtttaagaatatttataagaatacaaaaatattaagcactaaataaagtaaaaaaaatcccaatacatggtatctaatcaaatatctgcaatcaaaaattttgtgtaaagaagcaggagagcatgatcaaaatggaaaaaaaatcaactaaaattcaccccaaactgacaaagatgttagaattaacagactggaagatgaaagtagttattataaggtattccttatgtccctaaagttggaggaaagattaaaaatgttaagtagagatgtggaatccaaattgaacttctacagatgaaaactacaatgtctgaggtgaacatttttctggatgggattaatgggagatgagacattataggcgaaaagacgagtgagcctgaaaacatagcaacagaaattatttgaaataaagcacaaagaaaaaaaggcttaagaatgtaggagagcataagtgagctctgtgacaactttcagcaaactaaatacatatatttagagttagcaaaataatagatggcagaaaaaatatatttgaagaaataatggtcaaaatttttccaaatttgataaatgctataaactgacagacccaagatcaatgaatccccaagcaaaagaaacttgaagaaaattatattaagatacatcataatcaatttctcaaaaccagggatacagggaaatcttaaagtagccagagaaaagagatacattttgtatagaggaaaagaagataaaaataacaacaaattatttgtccaaaacagtacaagtaaaaaggaaagtggaacagcacatttagagcactaaagttgaaaaagacaattctctgtctaggcttttatatttaataaaatgtctttcaaaatcagaagtaaaataaataaagctttttcccaatatataaaagggaagaattcattttccagtcacctgcacagtaagaaatattaaggcagttctttaggctgaagaaaaatattgccaaatatttttgaatattctttgaaaaatattgaaaggaatgaaaagtatcaaaaaacgtaactatgtgggtaaatatataatacttttccttagtattttaaatctttttaggaaacaattgactgaacaaaaattaattacaatgtcctatggggtgtagagtagatgtggtggtaaaataataaaacaatacacagaggctgggatgtgcctatactatatgtcaagaattatgttacttgaagatagacattgataagttaaagatgtgtggtgtaaaccttagagtaagcactaaaaatacagagtaatgattaaaaagccaacaaaaggtgataaaatggaataataaagaagaaagcaacaaaagaaggtaagaagaacaaatgattaatggatagttagaaaacaaatagaaagtggtagattgaaacctagccatgtcaatcatcacaataaatgtaaatggtctcaacactccaattgaaagataaagattgttatgtaggattttaaaaatccaattatatgctgcctataagaaatctattttaaatagaagacactaatggattaagacctaaaagatgtaaaaagaaataattggctaatagtaatcaaattaaagctggagtagctaagttaatatcagacaaagaagatttcagagcaagtaatagtatcaggcataaagaaggccatttcataataataaagcggtcagttaatcaagaagatgtgatggttctaagtgttctctcacttaatagcatagcttcaaaatacatgaaataaaaacagaactgcaaggaggtgtagacaaatccataattaatggagatttcagtaccccctctcaataattgagagtaggtaagaagtcaatacgggcatagaaaactttagcactgctgtcaatctacttgacctatttaatatttatagaacactttgccacacagcagcagataatatacattcctttttattgcacatggaacatgtagcaagaaagatcatattaaatggatattaagtagataatgaacaactcaaaagcaaaaataaggtaaataatttcttgaaagacatatatcgccaaagctcaattaagaatacaggtggccttttgaatccatgagttccatgcatgtggattcagccatggatcaaaaatatttgaaaataacaataaaaataacagtacaacaaaaaataatatgaacttaaaaagtttagcagtaagacaaccatttatatagcatttaccttgtattatgtactattggtaatctagagcttatttaaagtgtatgggtgaatgtgtgtatgttatatgcaaatactacataatttttttatcagggacttgagcctctatggatttcggtatctctgggcatcctggaaccagttccctgcagatactaagggactgctgtaaataacatgaatatccctgtatcaattaaataaattgaatgtgtaacttaaaaccttctcatgaagaaaactactggcccaaaaagctttactggtgaattctaccaaacatttaagaaagcaaaaataccaattctatgtagatttctctagaaagttgaacaggagttaaaacttcccaactgcttctgtgaggccaaattaccttgataccaaaaccagaaaaagacatatcaagaagaaaacaacatataaatatcaattatgatatacaatttctcaacaaaattttagcaaatgtatcaataatatggtaaaaggataatagatcatagccaattgagatttatcctatgatattaaaaaacatcgtgtttcactatatgaacaaattctaaaaaatcagagtgttcatctaaatatagctgacaaagcatttgacaaattctgatgccaaaatctgttcccaaaacagtcagcaagataaagaatagaagagaatttcctcaacatgaaagaagggcatttccaaaaaaactgtaatatggtgacaaagcaaggatagtcactctcgtcacttctgttgaacattgcactgtttggtcctagcaatggcaataggcaatacaaagaaatgaaagtcatgtatttggaaaggaggaagtaaaattgttttacttgtagatgatgttattgtctatgtagaaaatccgatggactttacaaaaatctactggagctcataagtaagttcagcaaggctgcaggatacaaactaatggcagttgcatttccatatctaacaatgatcagttgaaaatctaagttgaaaacaataccatttacatcatcttatttattatgtaatactcatggataattctgcaaaagatgcagaagcccatgtgctgaaaactgcaaaacattgctgaacaaaattaatgaagacctaataaatgaagaaatacatatgttcattagttggaagactcaatattgtggggtatctcttctcccaaaattgttgtatgaattcagcataggactgatcaaaatcacagcaaaagtcttaccaggaatgtatgaagtccagtagagcagtatctcattgtgattttcaatgtcattcatcattagggaaatgcaaactaaaatcacaatgagatgtcattctactgtatgcattgcttgtaagaaagtacatggtacaaccatttttgaaaactgtcaagtttcttaaaaagttaagtatatgcatatcatatgattaggctatttcacgctttatttgccccagctaaatgaaagcttatattcatacaaaaacttgtactcaaaggctttgtagcagccttatttgtaatagtgccaaactgcaaacaacccaaatgcccatcagcagataaatcaagaaacaagttgtatattcatacagtgcatacaacggaatatttattgtttgttaaaaaagtaatgaattatttatatgtacattattgatgaaccttaaattatttaggctgagcaaaagaagacagttgaaaaagagtaaatacattatgattttatttttatataattctagataattaaaactactatgacgacttgcagagtagtggttgcctagggatgcaaaggtatggataggcaggatagaacaatgacacaggaacaggtggtaacttgtaagagtgaaggatatgttgttatataggttgtaatgatgatggggttatacatgtataaaaccatacatgtacactttaaatatatgatgctgattgtatgtttattatacctcgggaaagctgttaaaaaattgaacaatgaaagtaattgtttctccttttgtataagttggtttaggttttgggattaatgcttctggccacatacactttttttctacttgtggttagggaaacacagtgagggatgcttccagaatcattgtgcacatcttttttgggacttctatttggggatattgagaaagtaatgttactaattattgtctgcataatcagtatgagtttttcaaggagcagatggccattgtagtagtctgttctgccactgctaataaagacataaccaagaatgggtaatttataaaggaaagaggtttaattgacacacagttccacatggctgggaggcctcacaatcacggcagaaggcaaatgaggagcagaatcacatcttaaatggcggcaggaaagagagcttgtgtaggagaaaacccctttgtaaaaccatcagatcttgtgagacttattcactaccatgagaacagtatggggaaaactgctcccataattcagctatcttcacctagccccgctgttgactcatggggattattacaattctaagtgagatttgggtggggacacagccaaaccatatcattctgccccgggctcctcccaaatctcatgtcctcacatttcaaaacacaatcatgccttcccaacaactctccaaagtcttagctcattctagcattaacctaaaagtccaattccaaagtctaatctgagacaaggcaagtcccttctgcctaggagcctgtaaaattgaaagcaagttagttacttcctagatacaatggttgtgcaggcattgggtaaatacacctgttccaaatgggacaaattggtcaaaacaaaggggctacaagcctcatgcaagtctgaaatccagtggggcagtcaaatcttaaagctccataatgatcccttttgactccatgtctcacatccaggtcatgctgaagcaagaggtgggtccccatggtcttgggcagctccgcccctgtagctttgcaggttacagcccctctcacgctgctttcatgggctggtgttgagtgcctgtggcttttctaggcacacagtacaagttgttgttggtgaatctaccattctggggtctggaggatggtggccctcttctcacagctccactagacagtgtcccagtggggactctgtgtgggggctgcgaccccacatttcccttccacactgccctagcagaggttctccattagggctccacccgtgcagcacacctctgcctggacatccaggcatttgcatacatcctctaaaatctaggtggagttcccaaacctcaattcttgacttctgtgcactcacaggcccaacaccatgtggaagccaccaaggtttagggcttacaacctctgaagcaacagcctgagctgtacattggccccttttagccacagctggagctggagcagctgagatgcagggcactatgtcccaaggctgcatagagcggggtttgagtgtggggggcctggggaccaggcccaggaaaccattttttcctcccagacctccaggcctgtgatggaaggggctgccatgaaggtctctgacatgccctggagacatttttcccattgtcttggggattaacatttggttcctcattacttgggcaaatttctacagctggcttgaatttctccccagaaaatggtgttttcttttctatcacattgtcaggctgcaatttttttcaaacttttatgacctgcttcctcttgaatgctttgccacttagaaagttcttccaccagatatcctaaatcatctctctcaagctcgaagttccacagacctctaggacaggggcaaaatgctgccagtatctgtgcatatcaagagtggcatttactccagttcccaacaagttcctcatctccatctgagaccacctcagcctggactttttgatcaaatccattcaacaagtctccaggaagttccaaactttcccacatcttcctgtcttctgagccctccaaactgttccagcctctgcctgttacccagttccatagtctcttccacattttcaggtgtctttacagcaccaccccactatctgataacaatttactgtattagtagtctgttctcatgccactaataaagacatacctgagactgggtgatttataaaggaaaaaggtttagttgactcacatttccacatgtctgggaggcctcataatcatggcagaaggtgaatgaggatcaaagtcatgtcttacagacagcaggcaagagagcttgtgcaggagaactcccctttgtaaaaccatcagatctcctgagatttattcactaccatgagaacagtatggggaaactgtccctgtgattcagttatctccacctggccccacccttgttattacaattcaaggtgagatttgggtggggaatggccaaaccacatcagctgggaagtcaggaaatgtaactagaaaaatagtcagggtatgtttttataatttattgtcctatcacttcttctcaaagagttaaaagctaaatttatgttgaacaaagaaagtgtcatagcacataaagaagaggaattttctgcctgcttatttttgttccttgaaagcttttcttcttacaaaaattagtgcaaaattttttaaaaattattattttagatttactttcaacattatataaaccacttcctaatctcatttgttttgtaaaattttaaaatctgattaaaatacttaggccacaatttcttgatttaccaacattatacaatctcttttatctctccaccataaggggagtaagtatgatatcttttattgttgctttttttcacctcacctatagattgattcaatttttgtcaagtgatttttctaggctctgcttgagtgccttcttattgtgtataatgttgatttgttgctttatacttaaattccaacttggataagtttaacttgggtgtttgtacctttttcccttcatatttctgtatatatgatccaattatcttctgacattgaatgtgttgtggagaagtctgactctagcctgatttttcttctcctaagtcacttgctgttttttcctggatgctcaaagagtttttactttataattattttttttttttgttctgtataagttttagtgaaaagcatgtgatcatttgattggaatgatagacttcttccttaattttggagaaacgttctattgtttctttgagctgtttgtacctttttccttccatatttctgtagataggatccaattgttttctggcattgtgtgtgctatgaagaagtctgactctagcctgatctttcttctcctaagtcacttgctgttttttcctggatacccaaagggtttttactttataatcatgtatatatttttttctgtactagttttagtgaaaagcatgtgatcatttgatttggaatgatagtcttcttccttaattttggagaaatgttctgttgtgtcttcgagtcatttttctccatttttaggttctctacttcaagtatattgatttctttttttagacttttgatcttttatccactctttacttcttttgatctttatcagtaattctttttagcagtgtctgttctgttgtttttgccaattagtgtaatggttttataatcatataagatatcttactttgtttttagtttatttagaagtttctcttttatttcactgttttgtttgatcatttagactttatttagcccttttgttactgaattcatttccttatatatttattaacaaatagctttgtaatacaaagaaatcatgcataattttcttttgttttctcattattttttcctacaatgcagtattcttttcttaatctgctttgtgtattaggaaaaaattatagtatggtacatagttcccgacccatttctttctgtcttctgcttccttgaaatgggcttttgcattaatttggtatagatgaatttttcttttctccctttcagaattacctagggattgttttccttccctagctcctgtttgagagccaggtatttcaagtgcattatgttctgagcccctatgaggaaaggaagagcacagctgggatttgggcagcagtgatgaaaggatctgagctctgtactttctcaggttattcttcacatattttgtgtcaggatcactccctcttgtcatggaagtattctttttcaaagaggatatccctgaaatttgaatgattgctcccatttcagctacaggacctgatgcaccattgctatcagaaaatcttgcttggtgttagttttctgtatttgtctcatcattcctcagcattagtctgtcttccttattgtgattgtaaggggcttcaccccagcctgctgctccctgagaatcctttgttcttatgttctttgtgcttaatgctgaggataactaaccctgtgtgatgatataattctgtcttcactgtccagttttctcccatctggtagagatcacaatgactgggcctttctgtttttttatttttgtttttgtttttgttttttcttcgaatgcgatgttatgtgggtaggtagggattttagtcctataatttttaactaatttatccataagctaaagacgaactcagctcttcagaaggaatagtcagatttcggccgggcgcgatggctcacgcctgtaatcccagcactttaggaggccgaggcaggcggatcacgaggtcaggagatcgagaccatcctggctaacatggtgaaactccgtctttactaaaaatacaaaaaattagccgggtgcggtggcaggcgcctgtagtcccagctactcgagagaggctgaggcgggagaatggcgtgaacccgggaggcggagcttgcagtgggccgagatcgcgccacagcagtccggcctgggtggaagagcgagaccctgtctgaaaaaaaaaaaaaaaaaaaaaaaaaaaaaagaattgtcagagtctcatcattttcattccctatatcatttgagggaagaggggttatgacactcttccgtttcattccttgtctgttgtttttcaaacatgtcaggaatttgggcatatttcttctttagctgctgacagtaaaagtgttgttagtttcatttgacctttgttgttgttgttgttgttgttgttgttgttgatattagctgtgggaaagggagactctgtgatatggttttactctactgtattttccaggaattttttttatcacatttaaaaagtttttgacctgaaatctatctaaagtcacacagaaagccaggaggaggggcttccaatcgaagatgatatagtttgtgatactgcagctgacatttaagactaatattgttgcactttattaagtgcatattactcaatcaagaaacgttaattctgtgggtgcctcatcttctgcgaattaaagactgtgtttcccatgaccatacttaatgtcgtggtttaatgcatgcaaactttttgcatatgggcaaagccttatgtttgtgaatgtcttcatctgatttagaaatagcacacaaagtacattccaaatcttgaacaagatggttttcatcttaaaaaaaaaaagaattaagttctgaatgtcacagtagagagtttagttagaatttaacagattactgtgttcttgagcgtgtcaatttacaagtaatttcttgtttgaaaaatgaggacattgggctagatcagtgtttactcatcttgcttggtcataagaatcaccagagtatttttgtcaacagtattgattcccacatctgttccttggagattcaaattcagtactctgaatacagtgatttgcaaccattgttgcttattatcatcaccagggagtttttaaaaatctcggcactcaggcttcatcccctatcaattacataagaatctctggagccataggacccatggccaaacattagcattttttaaagcccgcgaagtaattgtgctataaggtgaagtttgtgaaacattggtatagcatgaggcccttacaaagtaccccagggcatttttataattagctaggcttaagaaatcatttattaaaatatctctaatattttatccaataattcaattttcacattgaatagtgcctaaaatgaagccactctgggtataatttactactagattattttgaaagatttataatgtcttaaaattctgttaccagaatagattttgcctctctctgatgaggcaacgctggatttggaatagtcaactttatgttaaggttttctccatctctcatacttttaaatcccaatgtaagaagtacatactccctgcagggggcaaaattgagccaagaatgtttataatagcttcgaatcttggcttggttactatgtggtaaactaagaaataacccaaataaactttaaaaataatatgtagaatgacttgtaaatgaatgggaagctttatctagttttttaaaaaggaaaatcctactcgtttgaaggaaattaatgacaaatcttgctaaaactaaatctgtatcttaatcagttattacattatagatttgtagattatagtaagattgtagagatcatagtgaaatatataaaggaatgtaaccctgcacactttttaagtactacttatataatacttctctttttagaataattactgacattcataagtattcatttcttatttcacagttatgtattttctattgtttatgactctacaaagctataaataagtatagtttatttccctgcatttgagtgaagccagaggaacttgagctctctcttgtaaaaatataaataatttgtgaaggaggtggtgtctgaagagtcgtttgataaaaagacagtttgagggcttggttggtgctagggaataccaaggtccattttttcaggcacagagcacttgaggataaaaacctagagctgaactagacaagatcaaagaacagctgagcagataatggagaaggagttggaggagtgaggaaggtactttgggaaatcccagtggaaagtgctatattcattaattatcccgtgactggtgagatgttggagatttttgcttccattggctgttatgtatgaacaagaaaatatatgagattttgcataagccctagccagactcttcagtaacttccaggtccctgtggggccatgcaagaatcactttgatggtgtcaaccttcagaatggtttgggtttgaatggtcatctctttctggagtccccaaaggaagcaaatgtgctctgccctctgcattcccagtaatgtgtctgacacactggtccaactctgggctctgccatgcctctctcctgcctccctctgatgtctcacagtcctcctcaggacagaggggttgggcttccttttgcttttgcttttccttttcctagtttcaggtgggtgtcagaaagggataaattggttgaggcatgaggggttctaaattgggagttatttcactaagtatgttctggcatatataaagaatttggtacattgcatgatacaaatggctaataatttttttctgttacttaactagaattatgaaacaaactctcctaatcattcagttaaaactgtttggagattttgtgttaattattttaactatcacgttaccaggaatattgaaatatggctccacctcttccactagctcagagacatcactgtgaactagaaaaaacacccccttttaaaaacactttattgccagaaatttgtcatgataaaacatagaagtctagatcgactatactttgaattacctgtgcctggagactgcagtatgcctttccttttacgtgctggttctggatggttcaggccactttcttgagtgttacgatgacaacaaagcaaatccctaaaattacttaaccactttgtacaagtttgaagtggacttgttgcccccactattttgttcctcatccatttgggattagatttgtgatgattatcaaaccagatcctagaaattcagctcatagttcaaagtggcccaagaaagtgtaatccacaaatctctgaggatctaggatttctggtgtgtactcatccatggtacatccacatgtgtcattgttaagttttcctaagtctggtgtttggtattccaggtgttgacatgtcatcaggctgcccttcattataactcaaaacaaggaacctatttctgtacctcactcccatctgttgaagacacttaggaaaggatatccttcagtcttaaatcattgttcaatttgttctttttctatttctttctttcatggaatatcttttcatttatatttttaaacatttatttcaacaatgttttatacatttcagagtatagtttcgtacttcttttgtcaaatttatttctattttattctttttagtgctattgtaatagagttgtttcagttttatttttgaaacatttatttccagtgtacagtaatgcagttgagttttgtgtattgatgttgtatcttgcaaccttgcagaacttgttaattctaatagtcttcaatggataatttaggattttacatgtattatatattaaatatattttttcataatgtatattttataatatacatgaaatgcgtgagtgttgccatctacaaatagagatggttttacttctctcattccaacatggatgctttttcttttcttttcttgtctgattctggctggaacctctggtacaaatgttgaatagaagtggcaagatcagatttccttgtcctagtctgatcttacgcggaacgtaacaagtatttcaccattaaatatgatattatctatgagttttttgtagaggccctttattatgctgaggaagttcccttctactcctagttttttagtgtttttattatgaaacttgttcttttctgtgtatattgagatgctcatatggtttttgtcctttattctgttgatatggtgtattacaatgattgatttacatatcctcaaattccttggattaatcccactgggtcgtggtatataatcttttttatatattgttggatttggtttgctagtattttgttgaagatttttgcttttatatttacatagaatattgtctgtagttttcttttcttttgatatctttgtatgattttggtatcagtgtaattgtgacctcatagagtgactggagaagtgttctttcctcttattattttggaaaagtttgtgaaaaattggtattgttatttaaatgtttggtagaatttaccagtaaagccatctgggcctgggcctttctttgtggatagtttctctatccctaagtgaatccctttacctactataaattagtaattagaaaataattactcattaattggaaaatccaattttctaattactctagagtcactgttggtaatttctatctttctagaaacttgtccatttcatatgtctgatttgttggtaaacttgttcacttcatgttcagagtattacttcattatcctctttatttctgtaaagtcagtaataatgctccctctttcattgttgatgttagtataaataatttgagtcttctcttttttatagaggtggggtcagtctagctaaaggtttgccaactttatctgccagagaaccaccttttgattttgttgatttttctcttacttttctattttctattttattagtaccttctctgatcattattatttgcttctttctgattgcattaggtcaagttagcactttttccagagtcttaaggctttttatccttaattgttatgataaaaagtcagctgttgacagttgtctttttgtctttaatgtttttactgtgatatgtctacatttggatatctttgcatttttactacttaaactttgttaaacttcttggaggtataaattaatagtgtttcatcaagtttggaagttttctgctgtttctctgaatatcttttactgttcttttcctcctcttcctctggtatttcctttattgcgtatttttggtgtgcttaatggtgtcccacatttccctgaagctttgttcacatttcttcattcttttttatttttttcctctgcttttcaaattgtatactctctatagatctatcaccagaaattcactgatcctttcttttgcgagttccaatctactcttgattatctccagggaattttttatttcaattattgtactttctatctccagaatttctacttggttctttttatagtttgtcttctcattgatgatattctcactttgacgagacattgtcagtaaaccttgttttttcagcatggcttcctttaggttttgggacatactcataatgactgctttgaggtatttgtctgttaaggctggtcctgagttctctctaaggacatttctgttgcttgctttttttcctgtgtactatggacacactttctgtttcttcacatatcatagtttttttgttgaaaactctacattaaaataagatactgcagcaccttttgatactgcccacaccccagggtcttgatactattgtttaattattttgtttagtgccttggctggacgatcttagtgaagtctgtttcttctgcagtggaaagcctttcatgctgccccccagaggcacagtcttgaacatgtgcccagttaacctgggatgacagtggttttaacagtgctctcttttactgttcttgtccctgatctgttaagctgttggcttctgttagtatcacacccatctgttaggcctcactaatttctgactgatttcttaattgtttttttacaatgccctggggtataaattgctccatagtctgatccagttaaatccaggaccctttgcaggataaatttttggggccagcctttgagcctctgactccaaaaagacttcttagctgtctctttctctaaactaactggccatggcttagctgaatgccctcataaagctaccagcctccttttaattgcctaccatcaaaatctccatttccaaagcactttcagatttgaacttccctactttatctattttaaataaagtcagttcctttggaaagagtttcagaggtctttcttcttatgggcctgcctttctctttgggtaaaatctctgagccactcctctggactgaaggcggagacaatggtctatcttggagtgacactgctgctttataaataggatgcagggtagggctgatcacctctagtcttcttggcttgcctctcctctgaaatatctgtgtctccagcttaaactgagtcacagacccatatttgctattgcttgcgtaaacaaagctctctgtctcgcagaaaccttgcatatgacatgtcttacattgaacctgctgtcatcccctggttttctctctgtattccttatgtcagatagggtcattagcatttacccagttatccaagctaaaaacctcacagtaattcctgacacttctcactcctccaccataacagatctgtcaccaaatcttgttattcgacctctgaaatgtcacactaatgcataccctcctcttcagtatgatgctaatttagccctagttgaggtctttttttctttcttagaccatgtagcagtcatccttccagtatcacacagccttcagagtttattttttcctacattcttctcagttaaagaatttttgaaagtgctaacataaaatattttcatggatttcctgttagtatataataaagcccacatttcttaacttgatatagaaggccctttatgaaggattataccccattaatatttctgaaccctagattgtaagtgaggataatatgcattatgggagttgtgaggttttgatggcatgatatatgtcaagtgcttacccagtgtctgaaacactgagtgctcgataactgttagctgttatcatcattattattatcttttctctctcataactgaaaatgtcttcagcctccccatccctaacacatacacaactccagccacagtaaactgattttttgttttttcccaaatacaccttcgcttttcaccccatagctttgtacttggtgccatcgctgcctggatttcccactggagtgcatcatggttgtaactgaggattgagagtgagtccccctctcagaatccctcattacacttactgtgtacatctagcattcagtatttctgtatttgtcactgttcttgccttaacagactgtgagttcattaaggccagtggtcatgttttatttgcctttgtatccctagatctctactaattaagatggataaagcctcgtagcacttgcccaggaaatttttgtttaatgtacatttatttttattgctagtctttgtattctttttcattatatggttttgcactgagcattgattttttttttacgctttacactttaattttaattcaaaataaagttttatctaatctgccagtttcccccatatgccaataggtatttctttcttcccttttttttttttttttttttttttttgagatggagtttcgctcttgttgctcaggctggagtgcagtggcacgatcttgactcaccacagcctctgcctcccaggttcaagtgaatctcctgcctcagcctcccgagtagctgggattacaggtgcctgccaccacacccagctaatttttgtatttttagtagagacagggtctagccatgttggcaaggctggtcttgaactcctgaccttgggtgatccacccgcctcagcctcccaaagtgctgggattacaggcatgagctaccgcgcccagccagtatttctatattttaacaaaagtttgaccctgtttattaaatgttgtaaaaggtctctgatgtcatggaaatagttccatgatagttatgtagctgcctctttgtgcagaataggtgtgctctaattcagaggtctccttaatcatatttattacctacatggctcatttccttctgacttttagaaatagtaggctattggacagtgaaaaagaaaatgattcttgggactgggtgtttaccctcttttaatgaggattatcttgggttatagtgagtaataaaactatattcaaggaagagcaagaagagttctgagagaagaaaatagattgaacatatattaatactattttcactgaataattgcagaataatctgcaaattatgaagacacacaagcaccctcagaaaggcactggaatgcctttctaactttgacaaagtgagagggagggaaaacttaaccctcatttaggtatgaatctcaatatctttaactgattttacaaaaggagaaactatattcaaattatagcataataattaaagagaatttatagatcatagatcaaaatcacaaaatggtcaagctgtttattagaaggagtttgaaaaagagagaatagctcaaaaaagtacctcttttaaaggtctttcattaattgccccaaacgaatataaatatttgaataattgtggttctggttgaagaaaaatgcccatgatccaaagattggccattcaattttaatatggtgatatatttcctttattcatcaaggtagactttttgttgacttgtttttgttgttgcatttttcctctttatgcttaacatgagaaaattaccctcttcagattttggagcagctatggaagaaataaagttaattctattaaagagtaaggagaagcttttctatcaactaagtggcagcattgtgtcaaagccgtaagcttacagtgggttgtggtagtgtgaatgacaagctagccctggcagtcttctgttgctccacttcctgtgtagacaaaacgtgattacttcctaagctcagttaccatctgaccctgcaaggaaggatgccagcactgtttttgtcagtaacctgcctttgttctccatcagttacagaatcacaaggtctatcactgcctggagaaaagtttacaatgttctaaaaagctcttattgcgttacagaaaagttgtctgatgaagaaaatcctaattatacttttgaaagtaaatggcttgctgtccttttcaaaagtttttcaagcttttaaaagccagttttaaagctagtacagactgtgtgtgttctttcttaattgtaacttgaaaaagaagtcctttccttttttagaaaattaattttctcgtctccttacctgaaaatctgtaacattaggttttctctgttcacatcatattatgtttctctgaacttaagatgctatcctcacaagttaaacatttggaaaaattacatatgatgaaggcttttctgagtattgggtcaaataacaattatggaaatagatcagagcaaactcaagagcactctgtacttggaaggaaaaaatgcattccaaaaattctgcattactggttaagaaattgatgagtaacctctttgtttctcatacaagccactgatcagtaaagtagaaattttactatttattgttcatgtatttgttactgctaatattaggaacaaaaaagagatgaatttattttttagatttcagcatttatcattaagaatttattgaacatgtgccatgtgccaaacactttgctagatgctcagtgttttccttgttctaaaattaaattttaaaaaatcgtattaactggaggtaaatggatagaattcgaaataaaatatgtgtcccttggggacataaacctgtgtaatcacttatgcattactatatatacttgatattacaatgtgagcattagagttgatgttttcacttcccagtacataaaactttttcgattatagaggtgtaaactcttgttttacagttttcatttaagagaataagctgtggaattttgaggaacaggttggctatttttatgattcaattatctttgttcgctttgcacttgctgtggcttccatgatttatgccaacagtcttggttttgtcttcagcagaaacaccaggggaagttctcatgacatctctcaccatcagtatggctaacatctgttaaaacagagttgatatgaaattggatagtttttctttttaatacttgatctgggtatggctctgatctcaaattgttaaaacaataaaactacattttatatgatttatgttttttctgattataagaataatacatgcttgttgtataatgtgtggaaagtgctgatcattagtgggaaattgttgaattcatatctaagtaatatgatagctttcctttaatgagcacctactatgttaaggctctttccatgaaatgatttcactgaattagtgtcaagcagctagtaaatgattgcactgagatttaaacccaggtctgcctcattcctacatatgtggtctttgtactgtagtctatagtacatccgtagatgtatgctcctacatctgtagtcttcatctgtagtctatacaatattggcttcctggttataaattataacaagtgaataatcacaaacacacatcctttttctttatgttgctgtgttgctttggatatagcatctaacctctgaggtcttctatttccttaggggtcaattgagtataataattacacctacttcactgtacagagttaatgaatcatttttcacagagtggttagaacagggcctgatgcatgtatcttttaattgtttcctaatgtttttattattacaaataatcataattcctttcatttaaaaaatcattttatcatttctcattcatgaattcgtgacatacttacaaacacatttaccagaaagcctgaatacattaaaaattcttaagtagactagaaggaaaaatgtttaagtgaaaagatatgagaaaaacagcctaaaagcatgtaaaagagaaaaacaaattcaaataagaagaaacagctaaataatttctataaagacaaaaattccaaataaaatttgatcaaaagtattttgtgggctgtcagatacttcttaatggttaggaatccaaactaaatttgtaacaagtttaattgccattattgacttcgatctagcatgactgcatagaaatattcatttctaacaaacttgtcttaatttgcttcttagaactggccagttagaatggcaatcattaaaaagtcaggaaacaacaggtgctggagaggatgtggagaataggaacacttttacactgttggtgggactgtaaactagttcaaccattgtggaagtcagtgcggcgattcctcagggatctagaactagaaataccatttgacccagccatcccattactgggtatatacccaaaggactataaatcatgctgctataaagacacacgtgcacgtttgtttattgtggcactattcacaatagcaaagacttggaaccaacccaaatgtccaacaatgatagattggattaagaaaatgtggcacatatacaccatggaataccatgcagccataaaaaatgatgagttcatgtcctttgtagggacatggatgaaattggaaatcatcattctcagtaaactatcgcaaggacaaaaaatcaaacaccacatgttctcactcatagatgggaattaacaatgagaacacactgacacagggaaggggaacatcacactctggggactgttgtggggtggggggaagggggagggatagcattaggagatatacctaatgctaaatgacgagttaatgggcacagcacaccagcatggcacatgtatgcatatgtaactaagctgcacattgtgcacatgtaccctaaaacttaaagtacaataataataaaaaaattaaaaaaaagaaataaaatcaaagaagcacagaaaaaaaagaactggcattttgccttatctaaaaggtagaacttgaaattttattaagctgagacctccagtcatgctaaactctaccataagatacacgatagattgaaacttacggacaattcatggttgatatatagtcactggcaaaagggtggcagctgacaaaaactgctagcacagcaagccttagtcccttacaccctggcagttggaccagaagatttagtgtttcagtgaatgccagcttaaaattcatttttgtaatagattcttgagtctgggttcattgaagcgtgaactcccaaggttttatcctggcaacaaaagatacgtggaaaatgaaatagtcataaatatgactgaaacatttattaaattgccagtaggaaagtaaggaccctagcttagtatatgtgttctttatgacttcaataaaatatcatttttataactcctatgactttttatgtgttggctaaatttaagtctacattctgtttacatgaactgtgtatctgagtttatctgaaattggtttttgtgataaatcaagaaatctcctttaatgatctctaaatttagggacataaggggttatgatgtaatgtgaaatatatagtttatatgtcatatggatgctcaaatttggaaattttacatttgttataagaagttattgtgctggataattttttcttatcattgggttttctttgcataggcatgtttgtgtattaaaatttataaagtacttaatgtattattttaaattaaataaagtgaaacattcattgattcttcaaatttactaagaagctctcatctgctagtcactgtgctaggtaatagagaaaccaccataaccacatttaaaatcctttctatatgtacttacggtctttttgggaaaatttaaaacaaatatattttaaaaatgtgtattgtgataagtgcccaaagaaaacagagaggtttttgagatactgatttaaaggtatttccagtgattgtgtaagaaatttcactctaaagagagaccctttaatctgagaccttgtattagtcagtatggcctaggttatgctatcataacaaccaaccgtaaaaatctctgtggcttgttttacttaataaacaaaggttaatttcagttcatcttacataactaagtgtccagtgtaagttggcaggggaactttggtcatcatagttactaagggacttggaatgaaggaggctctatctcaacacatgcctccatggctaccaaagcaaagagccggatggtgacttgcacattggtccttaaacactttggcctggaagtgacacttctgtgttttcatatcattggccataaaaagtcacatgttgtggccatacctaattttaaagggggcagatacgtacatttttctatgtgcctgaaaagagaggaaaattggatattgggaacagcactaatgacttgtacaggcctgaggaatgagaagaaactagccattctaagagttgcatgagttcatgtcctttgtagggacatggatgaagttggaaaccatcattctgagcaaactatcacaaggacagaaaaccaaacactgcagttctctctcataggtgggaattaaacaatgagaacacttggacacaggaaggggaacatcacacacctgtcatgaggtggggggatgggggagggatggcattagtagaaatacctaatgtaaacggcgagttaatgggtgcagcaaaccaacatggcacatgtatacatatgtaacaaacctgcacactgtgcacatgtaccctagaactgaaagtataatttaaaaaaaaagagttgcaggaatagagttcttgtaagaagtctactcggtaaggggccctgcataggaaaaggttctgaggtaggaaagaagtgagtgtgttttgaagacatacaagaacaacagtggaactagagtgttgtgaacaataattttgtatacagctaaatattgattaggtgagacattattttgaatatttttctgtcttccatttaaatattaatatggtaatggtgactaatatgctggaaatattttgattagttgtcaatggggttatctttatagattgtggaagtttgtcatattgtgttccatttatgatatgggggtacagtggcatgggatgtcattatatacttattctttaaagggctctcatttaatgttaaggcgtctgcatttataagaagaactgtgttttgtttcttctaagatttgacgggtttatgatagtactaagaagaaaaagaggtctaaggagtaaaaattgcagggtaaaaaactatagggcagataacaacattctgaacatacttttatatatgggcattaatgagatatgtctgatttttttgcagttaaactctgagaaatgcctccaaataaatcctgtacttaaatgataagtttgatttagtcctggaaaataggacagaattccctgtgatcactcagttgtttagaagcactgtgttcttaattaagaaagggatcttttaaagtgtaatattttggatagctttaaaagtctggaatataataaaggccacttcaagaagtcctttatgtgcctaccactcaaattgaataaaaactttgaaaactattgcttcagatcacttcttgcccttcctcccttcctcttttaaaaagagtaaagctttagagataaaacagaaatccctatattcttttcaattcctccttttccagagtgtaaccgccctcatgaactcataatgtatttagtacatgcttatacatttactgtatccggtatttccataaatattatatatcattgttttatatttttaaggaacataaatgctatcagtctccatgtattatgcaacttgctgttttcattcaacattgagtttgagatcttcccttgttcaaacatattaggactaatttattcatttttaactactgtcaaaattctattgcataattgattctattgcataaatgtacagcaatttgcatattcattctttcactaatagacatttagattatttttcatttttcacaataaaaaaatactactatgaatatctttttaaatgtttccttctgcaggccaggcatggtggctcatgcctgtaatctcagcactttagtaggccaaaataggaggattgcttgagcccaggagttggagaccaacctgggcaacatggcaagaccctgtctctacaaaaaataaaaaattagctgtgcatggtgtcttgcacctgtagtcccagctacttgggaggctgaggtaggaggatcacttgagcccaggaagttgaggctgcagtgatccctgttcgttgcattgcactcaggcctaggcaacagagccaaaccctgtctcaaaaaaaaaaaagtttccttgtgcatttatgcaagagtttcttttaactaaacatctagaattgaatgtgccaggttatatgcgtatgtatcttcaacttactaggtattgtctgattgctctcccagtcacatgcccgtgggtgtgatcgtattgtcactgaaactcagtgttgttgggttgagtagttgggctacggagtgcacaagagcctggactctgagtctcagccctgttgccaccgaatagtgcattgaccttgggctttaccatacctttcatacctctctctgtgtctcactttcctccactgtgaacagagggtaaaaatagtcatgtcttataaggttttcttgagaactacatgacataaaatatataaagagcctagactagtgcttgccacattttttggcctgtcaggtaggtatccaatgaaacctcattgttgttttaattttgtttctctgaagatgagtttgcacatcttttcacatacttaccaaccatttgtattctcttctgtgtctgtaaatatatttttctgtttttctaaaggtgtttgtctttcttgttgatttgcatgcttccttgtgtatgattggcattaattatttatggcaaatatatatatttctttctatgattcagctatctgctcttagactgttgctggcctttgcagttttagttaaggtgattttcttatacaaaacattttagctttaactaattccctttttactaatctcttctattatgacttttgctcagaagcaaatatttaatttctaagtacgtgaaaataatatccttcatctaatgcataagtaataacttagaaggacttggttatcaatattactgagagagatatgaatgagaataaatgtactcaagtatggataatttgtgaaaaatagctataattctatgaaaatctgttagaaaatggaagggaattctgcattaaataattggtttttctctcatttctgtctcttgcccattccatatgtaattcgctttctggaagtatattaggcagcccaatccatcatagacttccatcacatatgtggtggaaaatgttacaacacagcactgaagtcagacaccagagtgggattgatatgcggttaagtagtctctactggcaaccagatttgtctactctataaagaggattatgcttttgaagagaattgctatatactttaacattttttccagctattatcgcttaaaatgttttaagaaccattgatttatatgaaatatgaaaattccttgacatgccaccccccacccctgattgccaaccagacaactcattttcaatacttgaaatacttttatgggttcaaagtcattacattttacgtgtcctgaatatttcattaaggctttaacatagaattagtgaaaattcagaacttgaaaatgggcagactttaagctttcctgagtctgctgccccaaatctaacagtttgctttgggactgtcagcctcttgcaagatttaaaaaaaaaaaactcagccaacctcaggtagttttccaaaaggctgtctgtgattttcagctggtatggtttctctccgtaacttgttggatgtcacttctcataaagtgctttttattcatatcaaccctaaatcagtgtggcccatctaattccttgttcatatattttattgagctgttatttatttttataatttcaacttttattttagattcagggggtacatgtgcaggtttgttaccagggtatattgcaagatgctgaggtttgggatatgattgatcctgtcatccaggtactgagcgtggtacccaatagttagtttttcaacccttcttcccttcctccctcatctattagtccctggtgtctattgttcccatctttatatccatgtgtagccaatgtttagctcccacttgtaaatgagaacatgtggtatttggctttctgtttcttcattaattcacttaggataatggcctccagcttcctttttatggctgtgtagtatttcatgatgtatatgtaccatattttctttatccaattcagcattgatggccacctaggttgattccatgtctgttattgtgagtagcactgtcatgaccttgttcgtatattttaaaaaccttgtggctggtctcacatcttggtaagttagtatgaatgagaccagaacaatttttcacattataatgatgataaaaaaatctttactagaataagtagttatacctttgtaagggttaagcctcatttaaacatattaacttaatatttgcaggtgacatggaaaagattaaaaaatgggactctagtggagaatattaatatagcaattctaaattgatattaatatatcaattttaaaactctaatctaaatgcagacacacatgcaaaaaatgatagctccccataaactccacctcctacccacaagtgaacaaactgaaagaattaaattcgtattgcgaataatgtgtcacctgtatcagttaagggtcttggttgcaaaaaagacaaaacccaaatctgcctcattgaactaaaaataataaaagaatgcattgggtagatcattgaatcttcaggcagtctggagaaacaagcttagagaataggtgagagtgaggggaagttgccagcagtaaacaacagctagctagtccctgcttggccctttactgccttcatcgtcctcttgctgggcgggggaaatttccaaatgtgtgtctttgcatcagtttctcccaccaagactcagacaaagtaaacatcctcccaataggaagaaggcttgaatgcagaacagaaccggtaatatccacattttctctccatagctcatcatatattttgactatggtttttatgagctctatatatccatttttgttgagagttcagctttagaaaaggaagcaatattgaaaacaatgttagaacaatcctatggatctcagctatttagacttcccagaaattgaagtagagcctttctagtaagtaacagtttagtttgcccccaaaatgtataattacatatggaacccacagtataagatttgctattttctgtctctatatgaaggcgtgcattctgtaattacctaagaatgggaagaatctgcttaccgagcagaaacacgataggtacaactattctatatcaaaaatgataaatgtgaaatgtgtgagatttatagaaactcaagtaaagtgttttttttccactaaaaattttctagtatttttttgtaaataattagggacagaagatataaatagataatacaaataataagaatcatatttctctaatttttggaggctgtttaaacagagacacatactcaacctagcaaacatctggttggaaatttaaaattttagttgagcatcagaatgtttttctgtatctggaatgttagcggagtttggaaacatgtggacactcaactggggtttctttggatgtttatcattaggcattcagagcctctcccataagttcacatactgacaaacttgtactctgtgccataatcccttcctacctgggcctcctctcagtggcatgacgcatagtctcctggcaaaaagttagaggctgcaggtagataatctgaaaaacagataatatcacggctgatcagaaattgatgacagcacttttgttgccaggtcggaacagtactgctggaataaaggctaacagtcatgaatcaaaaggggtcttttacagaccacagaactggataaatgctatgcttttgtatttgtccattgtacttcctggtgaggtaaaaagggatttttttttttccctgagtaaaaattatgtgggtctggtatttctctttgctgaataatttatttctggctgcacagtattaattttcaggctgtgaaacctggctttgattccaaacagatctttgggaaatagggagcttgaataatagagaaaataactccgtgaggaagtatattacttcttggaaggatcctgctatccatttaagtggtttcttgcagctttcatatccaagaaagttttatccatatgtaattaggaggatcaaagccacagtgaggtttatgtagacttttctgcctctctcatctttagtcttgcgatatcactgtcatgacataatgaaataacgcataggaaagtgttttggaaaaccagagagttcttcaaaatgttagtttattaatggccacaataatcacagctaaccggtgctgaggatttatttctttatttatttatttgagaaggagtctcgctctgtcgcccaggctggcgacaatcttggctcactgcaatggcgcaatcttggctcactgcaacctctgcctcccgggttcaagccattctcccacctcagcctcccgagtagctggaattacacacacccgccctcatgcccagctaatttttgtatttttgtaaaagccagtcattgtgctcattacttgagagttttatctcatgatattcacacatctacatcatacactataagtaaagctcccctgttatatccatactacaaatgaggaaactgacttagcctattcaagaccataggcgtgtagctggtgaagctagaattctggctgtgaatccagagctgtctgactgcagccctgtgcttttagtcagtatgctaagtgcatatgtctataatggcagagacacaaaatatgacaccttacctgttgagattcctagatagaagataaactgcttgaaagttttaataccatgtggagtaaacatagatgcttcacctcattattatatatataaaatatataatatatatattctctctgtgaatactatgtataatatatatgtatatagagaggatatatatattatatatatggagagaatatatatattatatatagagaatatatatattatatatacatagaatatgtgtgtgtgtgtgtgtatatacatatatatatatatatatatatatatatatatatatatatatatatagagagagagagagagagagagagagagagagagagagagagagacacagagacacacggtcttgttctgttgcccacgctagaatgcagtggcatgaacatatctcactgcagccttgaacttctcgcctcaagcaatcctctcacttcagcttcctaagtaattggcatgacaggcacattctaccatgcccagttaattttttaatattttgtacagatggagtcttgccgtgttgcccaggttgactttgaactccttgcctgaggctatcctcctgttgcagcatcccaaagcactgggatttcagacatgagccaccaggtctagaccattagtagcttttaagaagaaatttatgtgaatctttatcatgtcttttcacctggttcagccatttattagatttgtagtcttaggcaagttaccttatctcactgtgcttgagtttcctcatctctaaagtgggcataaggatagtacttatttcatagtgtcatgatgattaaaaaagtaaaaatatgtaatgtatttagagtagtgatataatattactatatacgtacatatatgtgtgtatatacatatgtatatgcatacacacgtgtcactatttcctctaccctgcattgctgataaaggcctacacaggaatataagaccacgtgctttttatcaccacttataagacgtgagattttaggttctatgtgacctttggtataaagaagaacaatgcaaaaaaacaaaggaactttgggactgtaattgcgtacaaatagtttcaatactattatccatttaagcaatagtttggcaactgctaagaaagtttgagtgttacggtcatgtcacaagattctaaagttctccaaggtacttatggtagtagtgatgtcatctggaggaaagccagttacacaaaatatattgttttattaaatctatttcaggcagccatgtttgaggataatgacaagggatcccatatactgataaagttagataagtgtttgccaaagtgtgttgcatcccacacttgtcttcaggaatgctatcgaataaaactattttatgagcaaataaattttgaaggctgcctactatagcctcctcttggcagttaagaatgcacaagagtacattaagggcccctgaaagtcatgtagtttcacccaattctgtcttttttcaacttgtaatatatttgaccacagaatcctgttttggcatagttctcctagtgttctgtagaactgatagtccattgaccacattttgggaaatactgagttagaccatatttctggatctaaactcagcaggtgcattttgtcctgaaaagaccttgacatatcagattcatcagttgtaggcatttaattaccattttatgttgtgtgctacaggagaattagtcaagagccctaagcagttatgtcaactcgttttgacttggggccagttgctgaaactttctggattttatttcctcatctgttaatcacataatcagatcaaacagtttctaagatggttcatgtttaaaggttaccaaaagaaaaaaataacaatacatttctgaaaatgcttttatacatgcctcatctagggtgagctggatgacttttaaaaagctgacagcaaagcccaatgcctacccagcactgcagattatattggaacttttttgaacaattagagtttaccttccataggtagtgtgtgtctggcttcttagacacttggccagtattgtctgaagtccaacagcaccactgcaacctccctcagcgttgcaaaaatacttactcatagttcatccactcagagaagagaagctaaatgccgataagatttgaagtggcttgggctgtaatgccgtggagtacctactgaaagagaatttccatagctgagaagtacttgcacacaagaagtgaaaagtctgaatcgaggaaaacattcagcaatctcagatgtcgtggttctatttagaggttatatcaaagtggccagtgaagcattgaataaaccaggctaatttatcaactgaataaaacggttacagtcttaaaacaagggaagggataaattagtacagaaaaaggcatttcattcagtgcaagcactattgatcaaacatggataaactccccccagccccctcgcaccatgatgatcagtgccactgagagatggcagagtgagatggttaagagcatggattttggtgtcagatacacttgtacttcagactcggggtctgttgtgcatcatcagtgtgactttgaacaattttatttaacctgtctaagcctactgtcatcatttgtggaggaaagctattcatgctgaccaaatacggttattgtacagattaagtaaaatgatggctataaagtactacgcaaacttcatggttgtgtagttgtgttttatatatatataacataataataataaaagaagtcattatagcagattcttgtctctaaaacttttatctttaagtgttttatggtgctagccaactcgtaattccaggatgcctttgaattttattgcagtttatatcagaatctacccagtttcaaacataactccttaaagaatcattacctctacaccaaatgctgtgatattccccatttctctgtggtactgggagacaactactccaatatgcattgaaagaactttctgggatgatggaaatgctctttgtgccgtccaggacagtagccactaagcacatgtggcccttgagcacttgacatgtggctagtgtgactgggaaactgaatgtttactttatggaatttaaattttaagtttaaatttagaaaaccacatgtggctagtggctactgttttggatcacacagctatacatgatttaaaaaaacccacattggtgtaagattttaaaactgctaaaattgtcaatttcatgccacagattctgcagttaaaaagctgttattgatgctttttgaaaagagaccacagggtgttcttttctggtggtaagtcatcaatcacattagttaaaagctttctatgcatagactgtggaaagtttcccactttcacactgtggaagacaaaatcttctgtagaaacctcacggagctattgaatctcattgtaataatggtgtgctgtgactaaggacttgatcccctgcgaagctgaaggttccatgaaaacagaagtagaatatacattctctgtttatatggtacaaagctgtaaacctgtctattaagacacgctttttgattatgttcttatttattttttttttgtctacttgctctgtcaaatttgacttgtatttctaaaagtttttgctctttttatttcactatattttttagttagataaatcttatatcctcttaatggattttagttttaatccttataatactctttttttgactcagtttaatacttttggaattaccttttggaattccattctgatattgattattactacttctactttcttttgtattttctttggtttttctttgccgttctgtttattttctactcattttattttgatggttttaatatagacaggatagggctgagttttgttattttagtcagatctattgatgacttcattgtttgattaaaatctaagcttattcatatttattgtgatttcagtatattttattcccatcattttaagtatataaagcattatattttgtggttttccttttgtcatttttattatcattttggtttaatcaattatacttcagttatctattttcaccacctttctttaattaagaaattctgtgtccttcattgaactaatggtcacctttttatctttcaccattattttgaaacacctgtacctctgtcacaacttttgcgtaatgtctaaattgtacaaaatgtcaccccaagacattttacttattcactcatcctggtcccaaattgagattgtaggaataatttactagcgagtcttcatatggcagatacttttgctatctctcagttcctgttgttatcatttcaggctattattaagttttatcttatcacatggctcttttgtttcaagaatcctttctcagaagtgtagcctgtgaatgctatttcactgtactttaactctcaggaaacacaggagaaaacgaatgctagcctatttaatctcctttgtaggtagactgttctttctggaaatggaaggatttttctctttttcttttattttcagagttcagaaattcagagatctcatgaagctttttcgttgagtatatcttttttattatcattatttctgtctaggatgccatgagccattctaacctgaaagtgtgaagttatttttcatttaaacttaggatattttttccaattacatctttattacttctgtacttgttttttaaatcttagtttggaattcatattacttacattccagtttctaggctctatgttgtgacctgtttattctcactgacttccagacaactaatttagcttgaagcagtgaccatccctttttttgcacttctgttgagtctaaatattgaaaggattcactctcctgaactaaagagagactttagtcttttaatttttgtctgtgacatgaattttctcactaccaatactagtaagttatatgggtttccctgacaataacacattttcaggctgtataaaataaggtcatttttattttgcaaagcaggtaacacagtactaggacccttctgttgagatgagaccgggggatgtctttgctcttgcgcctctcctggtgctaatgtataaaagacaggcatggtataaggttctaattccaggagccaggaatggttcacctccttacagaccactaccaccaccaccactgggccatcagtgccagcagggtcacttgattatcactgttcttcatgcagcaaataactgggaaagagcttcccctgtgcatttcaaatggatttattgatagatgctacctgtgtcctcttagaatgtcctacggtctaatggttttctaacttttcagcatttccctagaattctcaagtaacgacaaccccagtaatgaatcacatggcatttgctggcttggagaatctcagcacagttgcttagatgttgtattggaagttacatgccaggacagaatcatagagagaggtttttgttttcccattacacattagtttcctcggaaaggtgttatttactaagtttgattgactcagtagcatgtatttggctgcttacatcactcaggaggcattgatttgggcagaaatttcagtaggaaaatactacatggaatccatgggctctgtcagcaaagtgtgtgtaacattttcatggcagccaccataatccagtcttgtgaccatattatttttggaccaaagatgcattagatctgttcaagcaccttgtttctattggttctatttctgactttattgataatggataaatgttttctgagtacgtgtcacttttccctgaaatatattcaggcctacttaacgatagtacagattttcctaagatactataaaatgtggtacttttaaatttgacttgcttatgatccatcttttgtgttaatcatttatatctctggcccccttattaactcatgtcaaaatattttcatctctttaactttcttcttcaaaagtgacgatatccttctgcttaactaatcttactagtttttaatcttcagcaatttttgttgtccttaaagtaagttaattggttttgctcttgggagagtgcacttttagggttataggctgtgaatttgaggaccacatctttgatggccttcacccgtatgaaacgtgacatcaaagatagcaattttgtttgcatcactggccagcacctaattatcgttacggcctcttcattcttaaaatgccctttgatgtcagcagtagccttgtgctttgaaagactgcagagaaaggtgaaagcagtcctttggccaagcccacattccactgaaatattacatgatggtattaggttgaaataaaatgcaaggcaactgtggtaattaaagtaattactcatttatttgcagaaacgaaagtctttaatgtttctctcaatgcacagagataatttctccctggtgtaacacggctagatggagactcatctttgggagaaaccagaagaaaagcaaacctgggcatggtaattgggagttaggaaattatacataggaggcaggaggaggcatctgtggggttgtgacagtactcattagcacggtgaaggcaaagttaccaaaagctgagaatgtagaaaacccatgtgttggggtgaaggaacatagtgtaggggtaaaagcacacaagcacttggagtgaaatggatctcaaaggtgaatctcactttcacttgtctttagctctgtgattcaccatgtattacttaatctgtgacttttaatttatttgtaaaaatggcaaaaatatttttagtacttaagataaaaagatatattaaaagggccactacaaagtaatatgtaccacattgttaatttttctagttttcaagaatggggacaatgagttgctgtcaaaattcaacaagaagatattgtttttacccattaaatgaataaaaaataaactctttgcctctactctgcattggagagagtgtgagggtacagacttccttgggcactactgatgacagtgtaaattggtgccacctatttagagagcagttctgcagtatttttcaagctggacacttgacccagcagttccagtgccaggaattagattacagaaaaacttgccaaagtatagtcagtaagtatgttgaagagtgcctatgtagcactgtgtgcacttgaaatcagttgaaaacaatataaatatccatcacgaggggcgtggtcaatgtcgcacgtgaatatttccatgccctccatggtgactctgcatccaaaaaatactcagtttatttttgtgttaaatattcaggcttgctttatttaaatatgatttcaaaagtctacttactcccggagctttttaaatatttatttttaagattgtcgtaaaacacacattgcataaaatttgctgtgttaatcattttttttttttttctgagacggagttttgctcttgttgcccaggctggagtgcaatggcgcgatctcagctcactgcaacctccccctcccgggttctagcgattctcctgcctcagcctcccgagtagctgggattatgggcatgtgccaccatgcctagctaatttcgtatttttagtagagatggggtttctccatgttggtcaggctggtctcaaactcccaacctcaggtgatctgcctgcctcgacctcccaaagtgctgagattacaagtgtgagccactgtgcccagcctgtcgtaatcatttttaagttcaggggcttgaagtacattcacattcttgtgcacccattgccctcatccatccacagaagtctttttatcttgtaaaacagaaatctccttacccctcaaacaaacagtaagccttcattttcctcccaccccaaacccctgccaaccaccattctactttctgtctttatgaatttgactactctggataccttgtgtaagtgaaatcatgcagtatttccccttttgtgactggcttatttcactcagcacaatatgcacaaagttcatccatgttgcaacatgtgtcagaattttcttcctttctaaggctgaataatagtttttggtatgtatataccgtattttgttatctattcatctgtcagtggacgcttaagttgattccatcttttgttattgcaaatagtgctgctgtgaacatgggtagataaatatctcttcaagtgcctatagtcttaacagattttagtagtcgctttaagagattttaaataatatttgtttctattttcatacctagtttatgaaataactccatgccttttgaactgttttgtttattaaatacatcagatatctttttaaagtgctttcttaggtacttcagtcgtgcaccttaaaaagtactcaactcctaaaagctaataaattaaaaactacatgtataaatactcaaacttataattttataagacctgaagcttaaatgatccaattctatatataagcctaatgacaatcatcataactctaaataagttactcaataatttatttaaaattgtggttaaaaggcagtctctcatgcattaaaaagagttttttttgtttttgtttttgtttttaaggccagtttcatggaataggccaaatgttttcaggcattacaggtacataatatttgcacagatctcttaaaataaaaatattaatttaatggctttgattctcttaaacatttttgtacttaattctaaaatttctgagattgaaagatgcttaacctcaaggaaggcaattatatcagttatttgagtttatttgatctaaagatttagacccagcatgaagtctggagctgcagacatccaaggcaaatcttactgaaatgaaggaaatgtttttattatcccatataattttgggtactgccttctttgcttgctgtgtttatatctgtgattagagattttagattctcaattataacctcatcattgaaatacatggaacctcatttataataaggacagaattgttggtcaaaaactccattactcgaaggaattagtcacctagccaggatccttagattaagttacacatattgcagaattctttattttacatgtttatgtctgtaactcccatacaagatgatcactttattagttactgagaacataaataccttcttgcctaagttgaaagaccatgcaagttgataggaaatcctacatttttaaatgtactttccaagatcaggtaattcttttctgtaccaaagtgataatgataccttatggcgttatctgacttgcagttacagcatagaaggtctctaacattgtcattccattgcacaactccagggaatgacatttacattaaagtatgtgggaagcttctaagttatgcagggcacaatctatgcagttgtacactgtaactgcattccactgacagtcacataaatgatattatagccacatgggcagctgatgtattgttgtccctctggctgtttcccttctcaagtagggcctcatggggacatctagtccattgatctcactgctttctttcatttcttaatctagcagtccttttcttacttcccgtcttgtccagcatagattccatggtctgtaatttcaaaatatgctaacattctaccctgagcttccttgccattctgtttttttcccccacatctgacagacaaaagcaaaaccctggatgaaccctaatctctgaatgagctcagctgcctagagttgctggaaaaagtcacaataaaaaccttctttcttaaccccaaaccccctaccagactcttttgtctttaccttgaggaaacttctccaaaggttgtctggttgtactcattgtcttattttctcatctccagccagttccttaactctctccaacgtggctgcaacttccatcacttcaccagaagatctcttgctaagatcaccaatcacctgcagatgcatggaaccagcctcctgcaatttggctgctcagcagcattcagtactgttgagcctcctttctacagcatgtgcttcctatgtcctgtgggagtacaatctcctgttgctctcccatctctctggctatccatttcctgtttcctcagcagactcattcccttccagcccactatcaagtgctgaaattcctcaggactgtatcctagactcgtttctcttttaactatattctctcactccaaggaattttatccacacccattgctttgaaaactacccaactcacatgactcattagtgtgcatcttcaatccatatattctaaattctgtaacacactggacgtctcctgttgggtatctaaaggcacctcagtgtaacatgttgaaaaatgaacctaaaatcctgattgtcttctattaccagtatatcaggaaatgacaccatcagccatcctcataagtgaactaaaatcctgatcctacttttggtatctcttgcttactcatcttccacattaacacattcacccgttcattttttgaattcaggaacttttattccaagctctgttcacctgtacaatttctggttccactgtatcttgtgtcttgatcatgagatttctaaaagatttcctagcatctactcttaacactttagaatacaaatataagcttgtcattccatgccagaaagaagtctctccactgacttttttttttttttttttgagacggagtcttgctgtcttgcccaggctggagcgcagtggtgcgatcttggctcactgcaagctccgcctcctgggttcacaccattctcctgcctcagcctcccaagtagctgggacaacaggcacccaccaccacacccagctaatttttttgtatttttaatagagacagggtttcacctgttagccaggatggtcttgatctcctctccagcctcatccttcaccaatctcctctcttacatgagccacacactaccctaggtgcaccttgcttccaccccttcatagggcctttggactttatgccccgttggccttttctgtttcccccaacaaactgtaaattaactctaaaaggtcaaagacattggtgctctcttctctcactttcttctgtatgtctccttcctcctctctttcttattcacttttttcccctcactgttacatctccagagcccagaacaatatctagtatatactagtcactcagtaaactcagttgtagacttaatttccaagttatacaattaagagaacactccaggttcagaacactgtatataaataattcaaaaaggtaagtgtaagagatgattaattgtgtttttatttagaaaaaagtatcacaaatctcaacatgttatgaaaagggcattttattttttccgtatggtttggattttagcaagtgtattatattttattttaagaatgtttaattttctcaacttgtattttctataaacaataatgctcaactttggttttctagcatgatttatcatctctaattgtgtaaaaaggacttgtgaaattacagcaaaattcccaagcaaatgtgtttatttaatgtaaaatgtgaacccaggttataataaaaattgtagaaaacagcaaatattaacaaagatgtggaagaactagaaccctcatacattgctgaggagaatataaaatggtgaacctattctggaaaataatttggcagtttcgtagaaagttaaatgtatatttgtcaaataacagtttcttagaaagttaaatgtatatttgtcaaataagtagttccactcttaaataactaccaagagaaatgaaaacatatatccacacaaagactttcatgcagatgttcattgcagcattatttataatatcccaaaagtaaaaacaacccagatggccacagactggttaacagatgtagtacagccatacaatggaaatttattcagcaattagaagaaatgaagtattgatccatgctactgtatggtcttgatgaacattatgctaggtgaaagaagcaagacaaaaaaagaccacgtgttatatgatttcacttatattaattgtccagagaaatcaaatttatagtcacagaaactagattagtggttgactgaggctgggacagggaatggacacaagttctttttgggtgatgaaaatgttctaaaactggattgtggtgatggttgcataattcaataaatttactaaaaaccattgaattttacacttaaaacaggcgaattatggtacgtaaattacaccttcctatagttatttgaaacaacaaaacaattagcagccaaagtttttgatgagcttgctaactgcactaattttttaatgtgaataaaaatggaaattgcataagcaaattaacacgccatgttgcacttagatattagaaaatcaaactagcaatatttgtgtttcacagcctaatttttaacaaaattttcttggtcatgtcataacgtgtaacataactgtttataggtcattagttccaacatactaagtgataagcaattttccccttttacacttagttaacacactgcaagtatccttgtgactatgaatggttagcatggtatacatcagtatttttcccacagtgcaacttttaggaagagaatgcatggccaatcacaattaattaaggtattttaaggactcttttgtccataattaaactgcaggtagagtctgggacaggatgttttaaccctatcaggaaatttaaattcttttacaatatctagtatttgttcttattttacatggtagtaattcttgaattagtagataagattgtaagtttaaattttaaagtatttagttaccaaccagaaagcaaattgtcatcatatacaaacataggttcagcatattttgtaaggagtaaaatgtaagcaaaacaaataagaaatggtcaactctattcctgccaagtggaaggttgccttaattagtgacttcaacaagaaaggtcatttgcagaggacaaacagctgtccttgtccagatattccccttctccacagagacggtactaagaggacataagtttaaggtgtagttagaagaaggaatgaatctactgtcaagttggtttatttatgaatttggttatgagggagactgtgcagatttcattctgggaatcctaaaagtgcatagaatgtgaacatgggtattcacacattgacctaaaaacaatatgtgtttttatattttttttgcaaaaaaacagacttttccccacgtattcagaacttgatataacttataattaggaatttaatgtttatttaaaatgacaaaatatttatatctgaaggacaataggatagattttaaaagtttgcaacctgacaatttgcagtataggaagtgtgtttgtttataaggttgccatatcttcacgtatactccaaagatctttttcaaaaacgagacttgcagccagcacatctgttgttcttatgcaagggattaaaatgagctatttttgttgaagttcagctgcagagtaacaatgttaaaatggcttgccaagaaattacctattctcgattttgtttcttaatattgaacttctaaactgttctttgcttctgtcggagacagcctcattcttctttaaagcaaatcgaagttttatgtggttttaaggtttttgttgttgtactgcagcacgtatatgatatctaaggcttcctagcttagcattttgaatgttaaattatatccaagtttgattttcctagaaacagtttttcataaaaattataccaacattattgactcttcctcctttaaatgttaggtagttttgttctcataaaactatgaattaaatctgtgtagctttccccttggagtagaataatatcatttatgttagaccttatcaagaaacctgagtggtattttgtattcccaagaattaataaactgtattgacataatccctgtgtgtaaggaaaaacacacaactttttcatgtatttctgttgtattttatagcaaatgagaataattgaattggtgaatcctcagaaaactgacctttctctgatttcttgtatctctcaaaacagcaacaacaacaaagctgaaattaaaatttatttagttcatgattcagttctgtttcaccgatcatcgaaaagtttcactgaaagtaaatcacagaagaaagcaggatagagcagaaatacccagggctaactttccaactgcctgcagtctatatcagcccttctgaaactccaaggtgcatattaatgcccggtcttgttaaaaaatgcagaacctgggttagtgggtcagggtagggcttgagtctgcatttctacccggccccaaagtgatgctgttgctgctggtccatagaaaccttgagaggcggggatctaaatggactgtacttaatattcatagaagaatttgcctatgtatcacacatgccatacatttactaaggcttttgttatcaccataacagagctggacaatgtacagtcacttgctagagaggagcgatcatataatactaacttacgtgtaaggaattcatgactatgtgccttattaatgagatcttcctaactaggctacccatagaactaaactgactgacacagaaacagaaatcagattcttagaactgaatatttacaggcagtttagattgcccaaatatatgtgtgatatggaaggagcatatctttattgatttgttttaattttctaaactcttgttcacctagtcagaaaagaaaatctctgctaagtaaagaggagtcattaatgctgatgccttcagggcccaggaaggaaacatcagtgaatgtactgagctgggatttagtggtgtcctggagaaaacacacttcatcccaccagtgctgtgtgacatggcaggtctagcatgaccagaacttccaatttttcaagagaagccagaaatacaaatttcatgtggaatttcccaagtttacaatgttggctactaatttaaattctgtaaaagcattattcaggccaagaaggcacatctgtatcccagacacagccctgagccacccatttacagtgtctagtgtggaatacattgaagtctcttaaggtacttctcatgaatggaaaattatgaatttttaacatgaaactctctagccttctgtctttggacactttggtcagaagaaatagtctctgttttatgcatttggaggcactggtataagattagtatatgatcataaaacctgtctttctttcttctcccacattccagattacaggacaggcccgtgtttcactcaggtcaacaaccagatgtgccaagggcagctgacaggcattgtctgcacgaagactctgtgctgtgccaccattggacgggcgtggggccatccctgtgagatgtgtccagcccagcctcagccctgccgacggggtttcatccccaacatccgcactggagcttgccaaggtgagtcagctgtctgcctgtgcacaccatcgcagacctgccacttctctttttgttggagttggagaatctggcactggatggtagcttttaacagaatactgatttccaagagtggcctcgttaacaaccctgaccagagaaggtttatcttttagccacctaatgaataattgtttcaactgttgacattaatggagaagagaaagagatgaagaattgggggaaatgtaaaaatacagtgtaaaatatttaatacaatcaaaggatgaaccactctatttttatctagatggcatgactcctcccttaactatactcatgcaaatacccaggaaaaacctattttttctctttatctcattcaagttatgagaatctgaacccaagtaacaaggagaagaaagccacctaatattggccctctatcattattaatagtgtcttcaaagacaaaatgtgaactctgtctatgattgcagttattacagactttgtaacctgggttggtcatgatctctgggttttgacactccctaactgcattcatgacactgatttctatattagggccagatcagggccctgaggatgctaccttagtagactgcaatccaagtagccaaaaattgttacctatttactgattaattattttaattaattttcagctgccgcaattcttacctttttctagcaacttctctgatatcaaatgtcttaaatccatttttagagctcggaaatggtctctctaatgacttcttaaatggcagttgccttcatattgcatagcagtaagatcacaggaaaacagaaatgatttttgtattattcacataaataatattattcatatttgagactttgagagttagggttattttctataattaaaacatgcacaaagttagatccaaagtctttcaaattgatgttagtaagctgtgtcacaagtgaagatgttatctattgggcctgtgtaaatcttacattgtagcaagcctggtcagtgtcctaaatctcaaatgagaattacagtttggggagcacatacgtaactttagttcattgaataataaaatgtgagtgttctgcataattttgtaaatgtgtccctgacagcagcatccacagatttttgttagtgttgtagttttataaaaggtatatttttaaaatggtctatttctaaaatcattttgaatccgaactacggagataccaaggggatgactatataactaaaacatttaccgactttatatttaatcacatatgaaagctcacatatgtgagctgtggacttagaatagttctttttagtgatgaacacagctcaggccttaatgatgaagactgagtcaaatgccatttttaatctattgtttactatggatagtaaaattctgtatgttttggtatgaatattagtctgaatatatagagttcctggtagtgcaacagtttcttctataggaagatattctatattatattgtatctgtctttactgtgctccatatggtctttactacatcttagtatacagattaccatgtaatttatatagtggatatagattattattaaaaataaaatactctactatattgatttactagtttaataatgactggatttactatagtactactttttgtttattcggtaccctttattaccttctaacatactaacttcatttctttgttgtttttaattctcttttgactagaatgtaagctctatgactgcagaaatctttttcacttattcactgatgtctcagacatctagaacagtgcctaatatacagtagaagctcagcaaataccttttgaattaataaatgacattaagattgaaatacttccaaaacccactatttcagagaaagaaacagttcaggttaagaaaagcctttaacttcaaccaaaacattccaaattattgacttttctcatgttctgtatttatacttatgcttttttactttcatactttgtcagaggcctagtttttttcccaaacacaattataaaaaatgtgtcatctgatctcaaactttctgaatgtcctttagggtttagtaatgtctgaaggattacttatttgatttggtttatgcatcaaagataagtttcaggctccatttgcctaaaaatctgagggattaacacagtaacaggaacaaaatgaaatttgccacatgattaaaatgtctggaaaagcacgttgaaaagttctgctttatttcaaaatcatggcatagtcagaaagttctcaattaaatactaatccgtagttcaggctattttaagacatcttactgtgatttcatttttttcctttaaattcctagactgtttcctgaatacttatgccaaattagtttggaagagatggggcatgaaaaaataatacattaaaacatggtgcatatatgtcattaaaaaaacagtgatcttttttatacgatgattgagaagtgttacagagttaaaaataaatttcaactatgtggatgataactgtaaatagcttaacactagctctaaatcatggttcttttgaagtttggaagataatgatatcctgtagctgatgaaattagttgtgaatgaaacatgcccttgtaataaacagagtagctgtggaaaatgagggacaacaggaaattaagataatacttaaagaattaagctgtgagaaaatcagtaactttattttatttatttattttgctttatttcttattaaaaaaacgaatacatgtgcagaatatgtaggtttgttacaggagtatatgtgtaccatggtggtttgccgcacctattgacctgtcctctaagttccctcccccgaccccccaacaggccctggtgtgtgttattcccctatctgtgtccacgtgttttcaatgttcaactctcacttatgagtgagaacatgtggtgtttggttttctgttcctgtgttagtttgcagaggatgatggcttccagcttcatacatgtcccagcaaaggacatgatctcattcccttttatggttgcatagtattccatggtgtatatgtaccacattttctttatccagtcttatcattgatggccatttgggttggttccatgtctttgctattgtaaatactgctgcaataaacatatgtgtgcatgtgtcttatagtacagtgatttataattcattgggtatacacccactaatgggattgctgggtcaaatggtatttctggttctagacccttgaggaatcgccatactgtcttccacaatggttgaactaatttatatttccaccaacagtgtaaaagcattcttatttctccacagcctcgccagcatctcgtttcctgactttttaataatcaccattctgaatggtgtgagatggtatctcattgtggttttgatttgcatttatctgatgatcagtgatgatgagctttttttatatgtttgttggccacataaatgccttcttttgagaagtgtctgttcatatcctttgcccactttttgatggggttgtttgtctttttcttataaatatgtttaagttccttataaattctggatattagacctttgttagatgggtagattgcaaaaattttctcccattctgtaggtttcctgttcactctaatgatagttacttttgctgtgcagaagctctttagtttaattcaatcacatttgtcaattttggcttttgttgcaattgcttttggcatttttgtcatgaagtctccccccatgcctatgtcctgaatggtattacttaggttttcttctagggttattttggttttggattttacatttaagtctttaatccatcttgatttttgtataaggtgtaaggaaggggtccagtttcaattttctgcatatggctagccagttttcccagcaccatttactaattaggagatcctttccccattgcttgtttttgtcaggtttgttgaagatcagatggttctagatgtgtggtgttatttctgaggtctctgttctgctccattggtctgtatgtttgttttggttccagtaccatgctgttttggttaccgtagccttgtagtatagtttgaagtcaggtagcgtgatgcatccagctttgttctttttgcttaggattgtcttggttatacagggccttctttgattccatatgaaatttaaaatgtttttttttctaattctgtgaagaatgtcaatggcagttcaatgggaatagcattgaatctataaattactttggatagtatggccattttcatgatattgattcttcctatgcatgaggactgaatgtttttccattgtttgtgtcctctcttatttccttgagcagtgttttgtagttcttctttaagaggcctttcacatccctcgtaagttgtattcctaggtattttattctctttgtagcaattgtgaatgggagttctctcacgatttgactctctgtttgtctattattgatgggagttcactcatgatttgactctctgtttgtctattattggtgcataggaatgcttatgatttttgcacaccgattttgtatcctgagactgctgaaattgcttatcagcttcaggagattttgggctgagatgatgcggttttctaaatatacaatcatgtcatctgcaaacagatacaatttgacttcatctcttcctatttaaataccctttatttctttctcttgcctgattgccctggtcagaacttccaatactatgttgaataggagtggtgagagaggggatccttgtcttgtgccggttttcaaagggaatgcttccagcttttgcccattcactatgatattgcctgtgggtttgccataaatagctcttattattttgagatatgttccatcaatacctggtttactgagaatttttaacatgaacggatgttgacttttatagaaagtattttctgcatctattgagataatcatgtggtttttgtctttggttctgtttatgtgatggattacgtttattgatttgtgtatgttgaacaattgaaccagccttgcatcctggggacgaagctgacttgatggtggtggataagttttttgatgtgcttctggattcagtttgccagtattttattgaagattttcacaatttgttgttgttgttgttttagcaagttttttgttgttgttgttgttgtgtctctgccaggttttgatatcaggatgattctggcttcataaaatgagttagggaggagtcccttcttttcaattgtttgaaatagtttccagaaggaatggaaccagctcctctttgtgtttcttgtagaattcagctgtgaatccgtctggtcctgaggtttttttggttggtaggctattaattactgcctcaatttcagagcttgttagtggtctatttaggggttcaacttgttcctggtttagtcttggtagggtgtatgtgtccaggaatttatccatttctactagatttctagtttatttatgtggggtgtttatagtattctctgatggtagtttgtatttctgtggggtcagtggtgatgtcccctttatcattttttattgtgtctatttgattcttctcttcattcttctttattagtctagctagcagtctatcagtttcattaatttttttcaaaacaccagctcttggattcatttatttttttttggagagtttttcttgtctctaactccttcaattcttctctgatcttaggtatttcttgtcttctgctagcttttggattagtttgctcttgcctctctaactcttttaattgtgatgttagggtgtcgatttgagatctttatagctttctgatgtgggcatttagtgctataaatttccttcttaacactgctttagctgtgtcccagagattctggtacgttgtctctttgatcttattagtttcaaagaacttcttgatttccgccttactttcagtatttacccaggagtcattcaggagcaggttgttcagtttccacaaaattgtctggttttgactgagtttcttaatcctgagttctaatttgattgcattgtggtctgagagactgttatgatttcagttcttttgcatttgctgaggagtgttttacttccagttatgtggtcaattttagaataagtggcactgagaagaatgtatattctgttgatttggggcagagagttctgtaggcatctagtaggtccacttgatccagagctgagttcaagtactgaatatttttgttaatttcctgtctcatttatccgtctagtactgacagtggggtgttaaagtctcccactattattgtgtggaagtctaagtctctttataggcctctaataacttgttttatgaatctgggtgcttttatgaattcaacagaagagttagctcttcttgttgaattgttccctttaccattacgtaatgcccttgtttgtcttttttgatctttgctggtttaaaatctgttttgtcagagactaggattgcaacccctgcatttttttgctttccttttgcttggtaaatattcctccatccctttattttgagcctgtgtgtgtctttgcatgtaagacgggtttccttagtacagcacacgcacaccgatgggtcttgacagcttatccagtttgccaataagtgtcttttaattggggcatttagcccatttacatttaaggttagtattgtcacatgtgaatttgatccggttatcataatgctatttggttattttgcacactagttcatgcagtttcttcatagtgttattggtctttatattttgttttttgttttttttttttgcagtgtctggtactggtttttcctttccatatttagtgcttctttcatgagctcttgaggaacaggcctggtggtaatgaaatccctcagcatttgcttttctggaaaatattttatttcccctttgcttatgaagcttagcttggctggatgtgaaattctgtgttgagaattcttttcttgaagaatgttgaatattggaccccagtcttttctggcttgtagagtttctgctgagaggtccactgttagtctgatgtgcttccctttgaaggtgacctgacctttctatctggctgcccttaacagtttttccttcatttcaaccttgaagaatctgatgattatgtgtcttggggttgatcttctcatggagtatcttaatcgtgttctctgtatttcctgaatttgcctgttggcctgtcttgctaggttggggaagttcttctggataatatccagaaatatgttttccagcttgtttccattctccctgtctcctcctggtactccagtcaatcgtaggttaggtcattttatgaagtctcatgtttcctggaagctttgttcattccttttcattcttttttctctattcttgtctgcatatcttatttcagtaaggtggtcttaagactctgatatcctttcttccacttggtcgatttggctgttgatacttgtgtatgcttcatgaagttctcatgctgtgtttttcagctcccttaggtcgtttatgttcccctctaaactggttattctagttagcaattcctctcaccatttatcaaagttcttagcttctttgcattggcttagaacatgctcccttagctcatcatagttttttgttacccattttgtgaagcctacttctgtcaattcatccatctgatccttcgtttagctctgcacccttgatggagagatgttgcagtcatttggagaagaggcactctggccttttgtgtttttaggattttttcattgattctttctcatctttgtgtgtttgtctagtttctgtctttgcagctgctgacccttggatggggtttttatgggggcctttttattgctgttgatgctgttgttgtcactttctgcttgtttgtctttcttttagtagtcaggaccttcttctgtagggctgctgcagtttgctgggggttcacttcaggccttattcatctgattcgcccccatgactagagatgtcactcaaggagactagagagccgcagagatgggtgcctgctccttctgggacctctcacctctaggggcaccaatctaatgccagtaggatctctcctctataaggagtctgacaaccgcttttggagggtctcacccagttgggtggcactgggagcaggatccgtttaatgaagcagtttgtcctttggtggagagagtgtgttttgctggggggaaacccactcggccgggctgcccagattcctcagaactaccaggaggagaggctaagtctgctgatcccgagactgcagccacccctccccctaggggctcaggcccagggagatccaaattctgtctctgagcctctggctggagttatcggagatcctgcaggaaggccccacccactgaggaaggatgggtcagggttagacctgaagaggcactctggcctcagactgccacagccagtgtgttgggctgtgaggacaagtcttgggaccaagccatccaacctccctggctccagcaggggaaaagcacagccgggagctatagaaatggatgcagcccttccccgtgcccagagagcttagtgtgttcagcagttgcttttttttttttttttttttttttttttttttttgttgctaaccctcccccaaggagctcaaaaggcttagagagcagacagcagcagctggagctggtcgccacaacccccggggggctccataggcttaagcagattcctgctcagaggctgtaataatctgtacgttccagggttgagatggtagtcccctgtggcttgggtttgagagtgggatcctccgattcgtgggttgcacagttccctggaaaaaacagtttactaggctgggtatcacactcactcatgacctcccttagctgcggggagggggtttcccatccccgtgtggctctcaagtgggccgtggcaccacactactcatccttctctctgtggatcacgccagccttctagtcaactttgatgaaagaacctggatacattggttgccagtgaaggattcacactctttgtttttttttgatgggagcctctgagagacgctgcttctagtcggccatcttggccccacattttactttaaactgttgccatgctaacattctggacttaagtagtgtcagaaaggtgtgccctcctagcgtggtatgaaatcagtcatatcaattcttgatggctttaatattgagagccatttgagttttagccgttgtgcttaatccacatttaatctactttcttccattttattatacattaaaggaccaaagttaactcatataggacttaaaatttaagctatcataaaacaagtgaattaaaaatgttaatagtgtcattaagcccttttccaataatatttgtgaactttaaatatataacaaattgccatgtgcatatgatgtataattttcttacaaagtttcttctttttttgtctttagtctcatgaacctactctaattaggagtgacattttgtttaagattagtacttggctttggatcttttaggttttcaaatgaacagggtgctcctaaaatttttttaaatatattaaaattaaactggcataattattaatttttgtaccatgtgatatttagggattaggcttttaaactacttcaaatgcttcaaaactgaaggtatagcagaagaaaattgtttgtgaaatttcatctcttgcttcatcattgatgataataacattgatgccaagcctctgctcctttccaggtaatgtgaaatgcacaggaattcacatatttgacacaggccctagctaggacacaggataaggtcatgaataaagaaatagcaatacagaccctaaattggtttctgcaaaacaaatgctggtgtgtgttcttttcatatggcgttagtgcaccagaaacataatttctttagtctgactgcatgtgagagagtagaggactttaatctcagctgaaatcaggcagatgttgctagctcctcaattgttgaatgagcagaagacgccctgagtagaaagttatttccaagccttccacatagccaagtaaaaagtaaacttggctattatctgatttatttgattagaataaattattaaagatagttacagccaaaacaaattcatcttggctgcctacattaaccaagttaacgagatcattataaagtctaactttaattcatgctgtattaacacaagttattcctaaacaattaaaaaactttaaagcaaactcaattatagaaactcctatttaaagataacagaatattcctcttcttctaaccccacaaaaaactaacatgaaaatgaataatagagaacaacacatcattctaaaacaaaatcctggaacaaaaccagtgatgagcacatgtagctgttgggaagtcactgggacagggagagttttctaagcatttactctgagtgtcataatcctgaaaggtgtttgaacctactaagagcagagagctaggattgtggatgttctattggagaggaggagatgttcccataagagacagatctacttcagaacctcacagtaacagagggtaatggaaggagaaacttggggggggggcaagccatttctgagtattctactcccagtcttccatcccagagacactccttgagtgaggtacaggagggtggaaggacaaagaggaagtatggaccactagcaagtaatctgtaaatataagagtcacaccaccaactgacagttgaaaattgatgctcaagggaaaaaaaagttgggggaggagtttggtgacaaactgtttcaggactatgccttgtggaagtttcaaaccaacacgtttcctttgagccttccccactctgcatttcagcaggaaatggctgcattgagagatgaataataaagagaaaggcctgcatataaaaactgaaaaaaaagaaaaccaacaacaaaaaaagaaaacataagtaaaaggcgggtatgaacatgcttcaaagaattactacccaaataaatgcaaagtttatatacttctctcttatctcaaggaaattaaaaacaacatttttaatggaaatttaaagcaatgatgctttgtggagcatcagttataggaaggccagagtggatgccaagaagccagttataaagtttctgcagtagtccaggtgctatatgatggaggctgagaccgggtagtagcagaggaaagatttgagatattcttggaaagtaagcagttgttgctgatgaagtgatgtgacataagtgagaggaacatgccaagtttctctcttaggcttctgactttaacagctggaacacgatggtgacatttgtgaagataagatcgagatagaaccatgctctgttcttgttattacaatttcagggtcctgcagatatcaagttaccaatatatacttgttttgatgatcattttaacatttgaattttgtgtatcatacatgagtagatattcattctggatcaaaccatattaaatgattgctaggacaccccatatgtttcagattccaaatagaaatagacctattatttagttgctgcccttaaagttagacatttgttttcataggaataaaatattatgtgtgaatatctacagagtatagaaataagaatttctgtttactaatggaaataataagcactggggactccaaaagtagggaggctgagaggagggatgaggactgaaaaattacctattgagtacctactgagttttcactatttggataatgggttaactagaagcccaaaccttaccattatgcaatatattcacataacaaacccgcacctgtatccccgaaaccataaaaattgaaaagaaaaagcaagttcaatgtaaaaaaattaaaattagaaatggatctaatttggtaacaagaaaagttaaaaaacacgctatgaaatatagtagtaatttctatgtcccctggttgctacacatataaattaaatgaaccatttttatatgcctataatactgcacatattttccatatttggacatgaactaaaaataatatatcatctaataataatttatgtaataaaataagtttaattttttagaacaagtttacacggagaatttggagaataaatgaggttataaactagaattattgttgctttgttacattatttttaaccttaatagacatggactgacgttattgcataaggtataaatttcaaaatatataattgtgttctataaaattgttacatgtgatttggaataattcaaaatttaaagaaatagtaagtttttgcctgaatcgaaggaatgagcaaagataacatctgtacagtctggtcattggagaattaatcaatcattagtagttgcttgtgataggactttgcagatgtagaaattcttgcatagtttgaaggcttgaggcatgcttttttatatttataaagagcacatcttggtccaaagtggttattttttggttatttctatataatttcttttaaattttcttttttattttaactgctaacttgatctaactaaaagaaattaattctacataactgcagagcctaggagacttcaaaaataagggtttcgttcttctaaaaaaatactttttaggcagttacagaataaatcctatgatgctggattgtttttctttttgaaaaatcactgaatctactataatccgtatgcagcatacaattttatgaataatgttaaggttttatagacttggtctcatttttcagcttttaccatattttttctctgatttatctgccaggaaaacaagtttctagagctcttttataccacactgtaatgagagtgggagtgtagtacatttaaaaatgaggtttaaggctgtgcgcagtggctcatgcctgtaatctcagcactttgggaggccaaggcgggtggatcacctgaggtcaggagttcgagaccagcctgaccaacatggtgaaaccctgtctctactcaaagtacaaaattagccggatgaggtgtctcatgcctgtaatcccagctactcaggaggcctgaggcaggacaatcgcttgaacccaggaggtggaggttgcagggagccgagatcgcaccattgcactccaacctgggcaacaggagcaagtataataataatttctcaaaaaataataataacaataataataatgaggtttaaaatgtgctgaattagaatgtttagtatatagacttcttgccatatattgtattcatagttgatttttgtttacatcatgtatcctttaataagacactgaaatctactttaattcagtacaaaaatactttggacttttgtaattagttcaatagatatagctaataggaggaagaaataatctgtaggcttgaattcactaatttacacactgagatatacagaacttttgagcttaccaaaaaataatagggcaaattgatatgtactgacacagagatgtgttcatgaaatattttataatgaagaaaaacaagatgcagaaaaacacatatactatggttttattctcgttaaataaacagaccatcatcctgaatatgtgtgtgaataaaagtctaaaaagacagaagcaaatttatattgatggttatttctttaattttctattttctgtatctttaacatttgttgcaatgagatatgttattttgtaattaagtatatagcattaataaatctattatgtaagcttgtaagtttgaagagagtgtaacaaatttgtgtaaattcacatttatttttatatacagtgtttattataaaaatcaactgatttttttacttgtatttccaaaagccaggttttatagtaattgattatctctatttttttgtattttatcatcattattttattgattccatttactttgggtttaatttgctcttctttttaaaatgtcttaatatggaaactgagatcattgatttaagaagcttctctttttgtactataagcattttaatgctatacatttacctctaagcaccactttagctgcatcctgcaaattttgatatggtgtatcttcattttaagttaattcaaaatatgttctatttctccatgtgattttttttctttgacctgtgcattgtttcaaagtatattgtttaaatttcagatatttgaggttgttccagattttttcctttattactttctagtttaactctgttgtgtttggagaacatattttggattattttaactttcttttacatttaatgaaccttttacatggcctcagaatatagtctttcttggtaaatattctgtgggcacttgataagaatgtgtgctctgcttaagtgaggtggagtattctataaatgtcaactaggacaagttggttgaaaatatggttcaagtctaatatatccctgatgattttcagtctacttattcttttagttaagagaagaatgtggaaatttccacatacttgcaggttatctatttctgttttcagctttatctgctgaaattacccttgctccaggagtttaatgctttataatcatgcatgcacagttagcattatcatgtcttcttgatgaattgacccctttgtcattatgcaatgtccatttttatccacacactttattacttgtcgtgatgagtactacttatagtattaacatagccattccagatttttttaattgaattcttaatatatctttttcatctctttactttttaagatgtcaaaggagttttcttgtagacagcctaaaattgagtcttgctttttaaaaatctgacaatcagactttttaatggaatttttcgtaccactgacatctcatatgattatcaattttattgtgtttaaatctgtcattttactatctcgtgtctgtctcacctattctttgttactctttttctctttgcctgactcttagattaatagtgtatattcttgtattgcagtttatctccacagttggattattagctatatctctgcttattttttagtgtttatacgtatttaacttactacattctattttcaaatagtataatattattatgccatagtttaatagtatactattatatagtatactatataattatacagtatactattatatagtatactatataattatacagtatactattatatagtatactataaattatacagtatactatatagtatactatgtaattatacgtatactatatagtatactgtataattatactattatatagtataatagtataatgccacttcacttataatgtaataactttacaatggtaccatttacctcttcaatttttcatgttattgttgttatgctttttacttctatgtgttataacatccaaaatacgttattgttgttgttgcttggaaaaatcaattctgttaaggttaattaaaaaataagaaaatatattttatctctattaacatattaccattcctactgcttttcattttctgtgtgtaggttagaattttaatctcacttttattttacctgaagagcttccttttacatttaaagtccaaaaattctttattaatgcttcgtgaattttattatgtcaatactaaggatttctgttcctatgtggatgaaattaatagacaatttaaaggataggatgataatttcaatgtctaaaactgaaattttaaatttagagtaagaggacgacaattccaacaattccaatataagagtgttcaaggaatatagacaactttcacatgaggaaataaaaaagctagtaagtgtaggagctagtaattagagaaatgaaaactaaagtaataattagtattcctttacaatattagggtatttataatattacaaatattacaatatttacaatattacaatattcctttacaatacaagacaattaggatattggaggccaggcacggtggctcatggctcatgcctgtaatcccagcaatttgggaggccgaggcgggcagatcatctgaggtcaggagatcaagaccagcctgaccaacatggagaaaccccatctctactaaaaatacaaaattagccgggcgtggtggtgcatgcctgtaatcccagctactcaggaaggctgaggcaggagaatcgcttgaacctgggaggtggaggtttcagtgagtcaagatcacgccactgcacactccagcctgggcaacaagagcaaaacttggtctaaaaaaaaaaaagaaagaaaattaggatattggatagtaatatcatgtattggcaggaaagaagaaatgcaggagtcttcatgaacagtagaggtgtgtagactgctagtggtatgaagactcctgcaggcattctgaaggaccactggacactatttattcattataccctatgatctagtaattctgctctgggtctacagcaaagtgataaagaatctgagtcctcaatgtccatagtcattccacaaagaaacgtagtggagacattcactgtaccattcactgaggttttgagaagctaaagataaaccaagtgcccatgatcaggagaggaaacacattaagtgttctgcagccaactgaagcaacagattgtccacataacagtatggatgtatgggggaacccgcccccaataattcaatgttatttcacgtaggttcttttctatttccctaagtgttggccagtctgagaaataaagggaaagagtacaaaagagagaaattttaaagctgggtatccgggggagacatcacatgtcggcaggtgccgtgatgccccacaagccgcaaaaccagcaagtttttattagtgattttcaaaggggagagagtgtacgaataggctgtgggtcacagagatcacatgcttcacaaggtaataaaatattacaagacaaatggaggcagggcaagatcgcaggaccgggccgaaattaaaattgctaatgaagtttcgggcatgcattgtcattgataacatcttatcaggagacaggatttgagagcagacaaccagtctgaccaaaatttattaggcgggaatttcctcatcctggtacatagtacgcctgggagcactaagggagaccggggcttatttcatcccttatctacaactgtaaaagagagacagtcccagagcagccatttcagagacctccccctaggaacgcattctctttctcagggctgtttcttgctgagaaaacgaattcagcgatatttctcctatttgcttttgaaagaagagaaatatggctctgttccacccagctctcaggcagccagacctaatggttatctcccttattccctgaacatcgctgttatcctgttcttttttcaaggtgcctagatttcatatcgtttaaacaatttgtgccgttaacgcaatcatcacagggtcctgaggcgacctacatcctcagcttacgaagatgacaggattaagagattaaagtaaagacagacataggaaatcacaagaatattgattggggaagtgataaatgtccatgaaatcttcacaatttatgttcagagattgcagtaaagacaggcgtaagaaatgataaaagtgttaatttggggaattaataaatgtccatgaaatcttcacaatttccatgcttctgccatggcttcagccggtccctccgttcggggtccctgacttcccacaacaggatggatcttaaaaacaaaattctaaaaggaaaattaagaaacaaactaagatatataacatgataccatttacataaattaaaacatatgcatacaaaggtgttttacttctctaaccccactctcttgagaaaaactgagtttcttagaagaatgtttatataaagtttttatagtaaaaaaaagtatagatattctgaaaaccagtgtcatctgtgttcaaaatgttttcttcttgcagatgttgatgaatgccaggctatcccagggatatgccaaggaggaaactgtatcaatacagtgggctcttttgaatgcagatgccctgctggtcacaaacagagtgaaactactcagaaatgtgaaggtgagtctctctactttgggaagcatgcctaattgtgactttaatgcaagaaaaacaggacttcatttgaaattttgaagactactggtcacaattaaaactctttatctactatgaaagcataggtttaagcctagagtagttctgtgtttgtgtattgtagccttagtgggtttgatttgaaaagagtcaatgagcatttgcatctagtttgttatctcagttgtgttgcattgagaatgggagtaatccagccatttatgtttcttcttaataaagtaggtttccatttcacttataaagttatatcaaaaacgaaaattgagatagaaataagaagtccaagtgaaatacagtatcatgtgtaaatgatgtgttagtagttggcaccgtgtcatatattataaaataaaatactctaattggtatactgaatattgtttggccatcaaatttttttaaatggattattgattcaggaagggtttggaaattaccactacaaatatctcaataaagaatagcttgctcaaataaagatatcaaaaaacctaatacttttctgcaatattaaatatggattataatattgaaatgtaaattccattagcagttcttaatagaataaatttatttgttatatatatctgtgatcaaaacctgtatcatttttataaaattcaagaagtttctaagtgcatgtggcttcaatgatcatggatatttagaatagttttgatgattctagtagttttgatacaatgtttatcttttcagttatgttacttaaataaatttatttcatctaaggcagttttctaaaggcaatagagtataactgttctcattttttgtgacataagcattatcatcaagtcaaattaagtcttttgctctttctctttccaaaagtagtttattttttgttgattggttgtaaacagctgcattcctctttgtaaaaaagaaaatgggaagaggcaaaatctaaagtttaattatagaagataaacagcagtatgaactatattatttcataagagatagaatgtgggtacatatgccattgtttcaatgccagaaaccataatcttataaatccttgagacatgtattatcctgttttttttcatttgccctggttcatgtatacttagctccaaattaattgttatagttatatacattttatgtaattacaaattaatttcatgctccctctaggaagaaagtttaaaaaaacatagttgattattttaaggaccaaataaattctctgtgaaattgtttacaagaatgcccaagtgtcttatactacttaaatacactgtcgatagtcaaagtcagcctgtagtggaaaggtgaaagtaacacttggaagacatgaaaaaatatctgaattacctgaagaagcacccacattagaccaaaaactcagggatctgcagaaattctgggttgtgctgctttttcctggccgctttttgtattttttctcctggctttttgtaagttgattgtgttgctcaaacttttctcactccctttcactttttacttctggactaatatctaaactagatgtacttgggaacaaagtttgattatagatgagaaggcacagccactgactgattatagtagttgtgacatttctaatgcacatcgaacaatgtatttcttcttagttaaaaatggaatgaggcttttctatgttacatttcatcaaagcagcatacagagccaagccagacatgggagaaagacagtacaagtctttattcaccacttgcctatgttctttaggaaagagggacattgatagcacgtaggcaccacccaaagccctgaatccagtcgtgcctttctttgcttcctgcccaggcagccaaatccatttaaccattgcccagaaataattatgtgatttaatatttgggattggtggggaatagcagaattggaagaagtagtgattagaatttgaaatataaaggttttatgaaggccttacttgtgtataaggcatatttatttaaatatttcttaaaagcagctattttcaattttatttgggtaatattgtttctttatataaaagaacaagtgggccgggcgcggtggctcacgcctgtaatcccagcactttgggaggccgaggcgggtggatcttgaggtcaggagatcgagaccatcctggctaacaaggtgaaaccctgtctctactaaaaatacaaaaaattagccgggcgcggtggcgggcgcctgtagtcccagctactcgggaggctgaggcaggagaatggcgtgaacccaggaggcggagcttgcagtgagccgagatcgcgccactgcagtccgcagtccggcctgggcgacagagcgagactccgtctcaaaaaaaaaaaaaaaaaaaaaaaaaaaaagaacaagtgatatttgcttatataaaactatttaatgtaatcagtagtataatatatctggaaaaactataaacagttgctacacttagtgacaggttttgaattgtagtcagttttatggataatgtagtgtctgtaaaaatcttgccataaatgtaatgtttgctctaaataaaaatataactatagcaattacttttgatcaactatcaaaggtaaaatattttaatttattatgtgaattacagtgcaaatataaaacatagtactattggcagatttaagatgatgttcttcctgtttttacagtagcacatttcatgtttctgctcacacagcaattaaattctctttaaaaaccttttttggtctttaagttactaggtctgttcagaaataagaaaagtaagttcagtattttgggtctgagtaattaggaaaatggtggtatccttaacaagaaactgcaattagcttattaatcgttaaacattatgttattgatattttctgtgtgtatttttttgttaactatctcactccaacccttgaatgagatccttcaggacagagcctctgtctttagtgctgtatcccagagcctagaaaagtttagtaggctccaaacaaatatatgttgattaattgagagtaggatatataataagttagtttatttgacttgggctgaaggtccaaatggaaggtaaaatgtgggtccagagttaaaactgaatttggaaagaagctactggtcttcctcaaaggaatttttgcttcatcttagcattttttgttttgttaataatttgattttcctttggttgccattgagagatcaagagcatgtaaacattaaatgcagtttcaaatgtttagatcttctgtgtcatggttcctctttggtcacctgcaggtaatgcttctgatgtcaaggacctttgctttttagctaaaagaaagaaatgtcttctgctcattcactgtgatgtcttcttaacagaaatcttattctgaaaggcttattctgccaaaaaatcaagtttgagcatatatagtttttattaaaaatgttttaatgctgggggcagcattcatctcctaacttaatgtttgaaacatgtctgtcactatctatcatggaggcttatgttgtttgattctcctgcgactctttttttccctcatattcagatatagacaactaggtaagctgtaaatctgaacccaaagcagaaagaaatacatatttctcccttttcctctctctctgtgtgtgtatgtatgtatgtggtgtgtttgtgtgtgtgtgtctgttttaaggagaaccagttattatccccctttgctcaattagggtcctggatctcaaaaaaacctctcatgatgctcactgcagccatgtttatttctgctgtgccagtttggttcccaaatctaatttcctaattctgtaatacagcggataaaattattctttggtggaataaaccatttcttcacatgcaaagagaaggttgtttcagttaacttcctctgttcaaacatccattaatttaaatatccatttaatttaaatgaagaagggaaggagaacacatcaatataatatgaaatggtacactaaaagacagctcagcgtttttcttttgtacaataaagtattttcgtttgaatttcagtccatgtggataaagcacaagcaggagccagatgtccttgcgtgatcctcccttccagactataccttcgttaacattccttgagctagttattctttcctggcttacatgggaggcagaaaaagaacatcattgtattggaaagtttcccttaaatggctctttatgtggcagatagttgtttgcaatttagtttgaagagttttcagctttgttccattaacacagcattttgttgtttgagacttgtgacaacaaatatatttatttaggctcatgaaactcataaaagttgttggcacagtctcctctgctgctgttccaactctgcttagataaaccatggaaaataaactttctgtactaaactgaaaagtacttgctcttattcatattacataaagtatattaattttaaaataaataaaaataaatccattaacattctcaaggggaaaactcattaaaatggagagtgaagcaaggggattgctaacattggaaacagataagactttttgggtcataaatttaaaaaccatgaaaatcatcttagcttaatttataacactgtagttaaaacatatgtattccctctctcttgaataagaaagtcaggggtgctacactcaaacctgctttctgcccccatcacaaataatttattcctcacttaccatattgtatctgaactatttttcttgcctgactctgccagcaggatatatgtaccaaaataaaattaataaaagctgtattaattgaacattttctatagtccagacaatatttaaactactttacatgggttatcttattaaatcatcaccacagagctgtgaggttagttactattattaactcaccttagagatgaaaaaactgaggcacaaagaggccaagtaactttcttaggattatatggatgagaaacagaagagccagaatgccagtgtgctagattgactccaaagcttttgctcctagccagtgctattgagcaaacaaaggtgttggatgaccaggcggcacacatcccagcctgggactgcactgacggggaaactcatggagacagcagttgcagtaagagtgtgattctccctttgcccattgcattttgtggtagtaccctggccagaatctaccaaggctggaagtagatccagtttaaagatcctggcactggctgtagagattataagctgcgtgattggaaaaagcatcatctgtctgccctgaaaaaatgaaggcaaaaaaatacagagccttgaccttcatttctgtttcttcacttgagccttcctggttgggagaactttttatttgtatcgtcagggattgcagatgtatgacctggcagttcactggctccaacccaaatctactgcttcaggccccctccccagattgaccaatttaagcactgcactcataatagctggtttccatggagccttttaagaagttagcccatgagggctaattcctgaaaaagtaaacgtttctctccgaagtattctatgccgcctctctggctgatatgttagatattcagttaagggatttttgttatattttctgttaattaaattaaaatgtattctgtgcctaaataattcattcattatgactttagaattgtaattgcaggtcttggaaaacaaaagtaggtgtaagaaagtggaactgaactaattttatctttgttcacagaaggtagttgatatggcttggccctacgtccccacccaaatctcatgtcaaattgtaatccccaatgctggaagaggggccttgtgggaggtgattagatcatgggggcagatttcttccttgctgttctcgtgatagtgagtgagttctcatgagatctggttgtttagaagtgtgtagctcttcccccttctgtctctctttctcctgctctggccaggtgcctgcttcctgttcaccttccaccatgattgtatgtttcctgaagcttccctagccatgcttcctgtactgcctgcagaaccatgagccaataaaataaaactttttttctttatatattacccagtctcaggtagctctttataacaatgtgaaaatggattaatacaggagtcagtagcaatagtctaaagaaatagttttaaaatagccaagagtgtactttactattcctatggaaagataagacagcaaaatatttgaaagactggagaacaggacattttagatactaaaacatgttataaagcgaaaatatttaaattactatggtactagcatgtaaatagcccaatgaaacacaatagaaatttcagtaaaagttgaaattgtgccatttaaatcaataagggaaaagatcaaatatgcagtgaatcatgttgagatgacagggtattatttgaaacagataaatttggatctatgtgtcacatcttataccaggataaattttaaatgaatcaaagatacaaatattatctatacaattttgtataaaatattatgtatacaaaagaaagtgatactaaaaataatcatgagcatttttatatagtcttagacctgagaaagcatatttcagtgtgttggccacttaaaagttatagagaaatagattaataaattcagttacataaaataaaataaattacatggcaataaaagaaaaaaaaattactaaccagaaaaaaagacaaatgctaaactgggaaaagcatttgtaactcataacacacagaaagacaaatttttctagtacaaagagattccacaaatcagtaagaaaatatccaataaaatgttcaaggatatgaattgactattgatggcaagggaaataccagtgactcgcaaaaacatatttatccttatttatataagcagagtgtatttagaataagagagtgtaatataaaactgtgagacactattttttacttctaaatgttgataaaataaaaattctaatggcaaactgtattggtgagggtgttaagaaatagacactctcacaaattcctgataagagtataaaagtgccctatatagagggcaatttagaaatatctatcaaaattacaaatatccatactataatatttaatcacttagttttaattctaaaaagttgttttgtctatactcataatcaagaaatgatggattttaataaggttattccttctgtcttttttttgtaatagcaaaatatcatagacctatataggatagtggactgattcaattaaaaacatgcacacagtgggaaactgttcatccttacgaaaagatagcagacactttatatattgatataaacgtatgttgaaggtatattgttacatgacaaaggcaatttgtaaacattttcataaaaaatattaaaaagtgtgtgtgtgtatgtgtgtgtgttaatgcatagaatgtccatggaaggactagaaagtctgtggcattggatattgttgggggtgaaattgtctggcttggaaaaaggaatggagaggagatttcacattgagtgccctaacctaagtttttgactttgaaccatgtaaatgtattacttattcaaaaaatttaaaacagagagtaaggttgggggtgggaagacccatttatttggcagtttttttcttgagccctcagtgaatttccgtccagaactcttgtctccccggaacaatgtatacaaagctgttagagcctctgtcacagggcattgcaacctttatcccccagaacagtaggtacatctatggcacattatgtgctgccaagtagacaatatatgcacatctaaagcttactgaatgtgggatgaaaatatgggacctttccacttaccataaaactattacttttataaatcaataaaagtttaagagtgtcaaatgaaatgtgtttgattttaatgatcctcccattaattgctgtcagagaaaaatctcattaaaatatatttagtgacttgaagtaaaagtaaaacagacattaagggacagatcaaagatggttattacaatgaagctgattataatatgcttttggaaaaaatacaagacttaaatgggtgaatgtagccgggcacggcggcacacacatgtaatcccagcactttgggaggctaaggcaggcagatcacttgaggcccggaagtttgagaccagcctggccaacatggtgaaaccctgtctctactaaaaatacaaaaattagccagacgtggtagtatgtgcatgtggtcccagctactccggaggcttgaggcattaggatcacctaagcccaggaggcggaggttgcagttacctgggatcatgccactgcactccagcctgtagtagtcatgttatgaagaaaagagatgttgttaagtcattttgaaacaaaaagctagtaaaatcctggtcaccaactgcaaacaaactacatggcctactgaaattaagactttcaaaacagaaaaacagatcaatttctttttcttttttatgatgctttcatttatttatttcagcatttctcctgtctttctgtctgtctgtctgtctgtctatctatctatctatctatctatctatctatctatctatacatacatactatttatctatctatttatctatctagactactctctctatatgtggtgctccccttttctctttcaggtgcataatattgtattaatcatagtatttgattcatgattcttattattattgatccatgacctacttttgctttgctattacaatgtaataagcacccatgaagccaccaaaaccaaaagctaggaccatgacaataacctgcatctacccatggtggttatgaggcccccatataaccatcactttgtataggaatctcacattttcttgttaatttttagataattttattaaatctagagatactccattcatcatcataatcattattgcagttgttaaacgttacaaaagagttttaatgctgtgtggaatttaactttttcacttcatattataatgatatgattgatctatgtaattgcatgctgctctaattcattctttagagtgggatacaatattccattatgtagctataccatagcgtgtttgtcagctttcccattgatgggcatttgtttccccatttcttttcattgtgaatagtattcaacatactttcaggtacaaagactctgtgcagtgttgtaccaggtatcttcttcaaagtagactatgaactccaccctggagcgagtcatttggattttcccaaggaatatgtctgtcctgtcttttgatctcttcattaccaaaaggtgactcattcacatttctatcacgagagatctctgtgtgagcagcttaggtcatagcaatgttagcatgctggagccttgttttggcttactgttgctgggtgcctgattgaagaacaaagagcttgatattccccgcagttagggtgagtgatctacatctccacctcagcccaggactgtgtgtctcccagccctctgtccagattggtgagggaataactgccaagggattctgccctggcttaaaggactttgtcttctgggttactttttatgtctcttccatgaggcgctggacacatcgttcagattaggaaatcatacaggagaaacgaagataccgcaaatatttccatacttttttttctttttttttttttttaagtggagccactgggtttaagaatcaaagccttttttgactttttcttatttgtgctaagcaaaaatgacatcacttagggttaccgttttcctatctttctccatataaaatagacaattacttgtaatccaatgaaagttctttgcactaaggaatctgctttttatgatacatttatgttgggaggcagagcatagagtagtttggaaatttagtgcagagtcatttggagaatatatattaacagttaaaatgtgaaatggaaatttgaagtatgtatgcttttataaactatttgggaagggcatactagcagtgatatttttagtctgatttttagaagcccatgctgtgtttcataaatggaaacgtcacatccaagaaagtgagaccagcggggaagagtgataggaactccagaggggcagccaaacagcagctcagagctgacatacgaggcaaaatgagcacttagcacctcctagcatatttatcagaagttgccaatctaaactatttgagtttcttcccacaaatggcgtgcactagtaaaacacatgtgttaagcaacttggacagcaccttgacggtgttagttaactaacagccatatttcatggggaattactgaagtgacgtcactcctttaatttcaacctaaacaaaactgtttacatggaaagttgcatgcataggtttctataaaagtctagaccagaaagagttctttatttgaggcacagtgggtaacatcattgtcataaacatgaaatctgtgaaaaaatacatattccaaaagaaaattattcagcaaaaggtaatctttggcatgtgaagacaggctttgatctggattgtgatctggagcaaagtttgaaatatccagatgacattttaactttttaaaaatctattttattttcaaacatatttatcccagtaacaagaggaaaattatagagaaaaatgacaatttaagttttcagtaaaattaaggaaataaatttggggagggaagagaacatttgggacccaaatgtccatctgtgctcctgctgcaccccatatgaattgtgtcatctcaagaaaattaatgcctgcatctttacaataggaataataatggtcttttctgcttaaggtttttatgcataacatataaagcatttgacactttgggtccttgttaaagacaaggatagcaaagaaattaattgtggaagagttctgatgtgtaatttcagtgatgacttttagtacagtttctaataaataaattcttttaaaaagctaacaaaaatcttgaaaataacacagttgacttactagagcatatatttgcctagtctgatgaaagtattaacaggcaatgaaatgaccccaagtctatcatgagatgagaaaatgtggaactagggtatccattaattcctgactggtctcagcctgtttttattcccctgctccagttccacctaaattacagcaatggagagttaagacccagagggcttgatttatttaacataagacagtggtcaggaaattgcactttgatggattcaggaaaaatttcccaaatgctgagaaccaatgttgtttccctagtgccattgtatgtttaaattctttttttaaaattatgaaaaaaaagcatggtaaagtaattcacatgattcttgcaattcagtgtctgctaaagatgactggaaaaattgagagcctccaagacatctttctcagagacataaaattagatgtgtgttaatgataggaaaacctattctaccctgaatgaaaggatcaggtgaacattttgttgaactttgccattagaggaaaaaggtatctgaaatattgcctccctttcagttactaaaaaattgctcgataaatttttattttgcttaacatataatagccatttcatagtagaatgaaaaaacaataattcaggccaaaataaaatgcaagttctataatattcatatgtatctttatattctcttgacaaaatgaggaagaaagaaggagagggacagggaagaagggtaggaggaagagagagagagagagggaacctttctccatctcacaaattaccttggctcagtgcctgaaagaaattagtctactctaaagaaatcctgctgtagtcaaataaaaatgtaacaaaacttgaaatgtaatacctagatccaagactgcagttctcgccagtgctgtcacttactgcccatatatacatatatatatatacacactttattcactgccaggcattgaaaaatgtatgcaggtctggagacaaatgttatgggctgccatttcttttagatgcatccttgggagtatattatggcaggatgtaaataaacaaagctgtgataatgcttgaattgtctttctttcttaatcccagactaaatccccttatcttaatgcaaacttttcttattttaatatagtgtttctcatccatactttgcctttactggattttagtacaaataattatattttaaggataatatgaaggattctgagaattttagttctagtcacctgctgtattggtcgcaaggttaggtaaattgtttctccatgtgccagtagttgttttacctgcttccagaagacagctatttaaagagcccttattttagaagacacaaaatcaatataaataaacaaatttagttatagtatgagaaggtttcttttaatgtcatacagatactgagtgagttgctatgtttttatgtaagctttgattttcctagagggctgtggtttcatatttcacatattactgtgtattttctagtttaattataaaactatctgaggtatatttttgtcccagtctagcagcagctaacataggacaaatgaagggttgggttgcaggtttgtgccttttggtgaacggcagaggaaaatttgggcattattaaccaacagctgtatgctatcaaattaaattttgcatagcttgatttaactagccatatagctgatgctaatctgaagcgtaaacatattcttcagctataggtttcatcttccaaattctcagaaatgctaccaggactatgtgactataaatcaaagctttgcttttcccattagtaatagtgcattataataatctattatgttttattacatagaagaaaattgctttttgtattgttcttacctgttttaaggattatagtaaaaacctcttatgttgcaaaatcaatattaagtatttgaatgttataacaagtttgtaaaagagaggatcgtaaaaattatttatcttttagtactgcagtctaacttcaaacttgtatgttgaccaatattttccaatcctctgatagaggaagtaggccttcttttagaaagtggtttcccaaataagttcctgacctgccattgttgtgtaaacctcacccaaatgctctgatttccagtttcatttctttaaattggagcaaacccctaacatcttttttttaaggcatctgatatggtttggctgtgtctccacccaaatctcatcatgaattttaatccccataatctccacatgttgaaggaaggacttggtgggaggtgattggatcagggggtggtttccccactgctgttctcatgatagtgagtgagttctcatgagatctggtgattttataaggcagttttccctgctcttgctcagtctcaggcttactctcctgctgccgtgtaaaatgtgcctcttcttctgccatgattgtaagtttcctgaggtctcggtagccatacagaactacaagtaaattaaacctcttttctttatcagttacccagtctcagggagctctttatagcagtgtgaaaacagactaatacaacaccctaaatgcaggtcaaaataaaatactagttttattaaaacttttttttatcacttatgactattaaaataaaatttatttgtccacagaccacctaaagtcatcgagccagtcactaaatgcagtctttctagatccgaacactaaatgcagttcttctagatcagggcttggcaaacttttctgtgaagagccagatagtaaatattgtaggctttgcaggtcatactgtctttgtcacaaatagacagctctgccagtgtagtgcaaaatccgccatagacagtaaaaacgaatgagtgaggctgtgttccagtaaaactttacttacaaaaacaggctgtgggctgtagtttgccaactcctgttcttgatttcactattcttactctgtatttcaaatggtgtcaattttacttaattttaccactattttcttagtgactggctagttgattttaagtggcccacggacaaataggttttattttaatattaataagctataagaaaaaaatttaagaaaaaatacaaccagtgcatcaaaactatgtgtttatgaatgttattcctgaaaatattattgattatcccaaagttcatattaaatttttaaaataagtatacatgtagaaatagagagatgtaatttaaatgattcagggtatttcaataggtatggaggtgaagttttaaatgattggagtttgggacatgttattgtaagatttatcattatcatcattattattacagtagtccccttatctgcagtttcactttctacagtttcaggtacctgctgtccactacagtccaaaaatcttaatggtgaattccagaaataatccatatgttttaatgcgtgccattctcagtaaggtaataacatcttgtgctggagatgtgcctcatccatctgtccagcatatccatgctgcagacactccttgcctaggagtcactcagtagctgcctcagttatcagattcactgtcacagtatcttagcgcatgtattcaagtgacccttattttacttaataatgccccaaagtgctagagtagtgatggtaatgattcagatataccaaagagagactgtaaagtgcccccttttaaatgaaaagatgaaagctcttgacttaataaggcaaaaaagtcatatgctaaagttactaagctctacagtaagaatagatttttttatctgtgtaattgcgaagagggaagaagaaatttgtgctggttttgctgttgtacctcaaactgcaaaagttatggcgacagtacatgttaagcacttagttaaaaatggaaaaagcacgaaatttgtgggtagaagacgtgaacagaaacgtgttcctgattgacagcaatcaggttcagtaccatgcatggtttcaggcatccattgagggtcatggaacatatttcccagagaaggagagactgctgtattagaaagcgattttaattcttaaagtaagtgttgtcaaacaggaactcaggatcttattatttttgccagaaagttccaaagggaaaggaatggcccactaagataacaataaatttggctctactgtttttctttgtagatctaccttacttattcccaactatcacctcctattttttctactcttcgttatattacttctctttctaatcttctctactattgtctagactgctattaaaacctgggcattcctgaaattagaagacatgaaattctctcaacattatccaaatcatttcagttgttctatgtttatgagtttgtctacctgtacactacatgggatatgagtcagtgtggcacttgaaaagaagttcatgctattgcaatcagtattttgtgttatttatttatttatttatttatttatttatttttgagacagggtttcactctgtcgcccagactggagtgcagtggtgctggtgtgatctcggctcactgcagcctccgcctcccaggctcaagggattctcctgcctcagcctcccgagtagctgggattataggcctgtgccaccacacctggctgatttttgtatttttagtagagacagggtttcaccatgttggtcaggctggtcttgaactcctgacctcaaatgatccactcgcctcagcctcccaaagtactgagattacaagcgtaagccacctcactggcctgtattttattttttcaatatgattttgcaagagaaaacatataagcaactactgctataggcttagacataaataggttctgttttagacacgaatgtgaacaagaaagaaagtgctttaaacataatgctatgtttgaaatatgaatgtaaaacataaggaagtaagccaaatataacaaaaaagtaaagacttaaattttaaatagaacaataaatgtacaataatacaacataagagaattcttttatgttcaaaatccagaaattataaaagaaaataaatgacatattcaactacataaaagtttaaaaaaaatgaaaaatgaaaaaactactggcaaagacatcaaaaagaatgtcaaaagaaaaatgccaaagaaaaaatatttgcaagtaatatttaaggcaaatgactaaattaaaggcaaagccctagaaataggtaaagaaaatggctaacacctaacagaaaaataactaaaatattagaaggtaactcacaggaaaggaaatgcaagaataaaaaaagtgctttaaatgatatgtgaaaaaagtctcagaggttgctttcttgttttgttgaattctaagtacaacagatttgtagtgcttgaagatgttttgtaacagaaaacttgaaatttgcaaaagaaaaaagttctcatttagctttagtgaaaccatactgtaaaaatttaattgtaggcttagaaattaattcaacttaataaactcgtagcatatcatctttcacaaattaaattatcataatttttctcccacatggaatgtttttcttaatttactatgatagaagaaatatttctcataattaacaagtaaagcaaaacaggaagtatagtatcctggcattaatgtaaaatttgattatacattttaaaatatttcttctatgtcttcattttccttgtttgaaggtggaagattgttattttgatgtttttttccacaaagtataatgttacgttgtgtatagatcctttatgccagtatatataaacactatttgcaatggctagttaattacatattaatatttctacctggaatttaaaaatggtgtggatttcatgaataaaatatattctcaaatctgttcctctttaagaagataattaaaatttcatttccgatttttttaggaatactgctatactgtaaaccattgtcttcagtatttgtatagtgggtgggcagtaggagtgggaggagggagaacagaagtgacgaaaggaaggggaagactgttttgcctttagtggcccatcgctcacccccaagctgtgtaaaaagagaatccttaaggagattgaagagaacggtattggggatcttttttgaaaagtgtcatccatgaactagagtgtgggagagggagaaggtaaggagtacagcctgactcacacctggaaaggctgttctgcgtttccagagtttgaaaggcagaggacatgtgagtttcccatctgccaggtgagggcctcacagaaaacagatgagttgaattgtcctgagaggggctctgtccatgcaactacctggagggtggctgatcccagcatgaggataagctgtcaggaacctggggccaatgagagtggccaggtagaggagttattatccctagaatcatccgtgagaggtgagagaccttaggattaggaggattctcaaaacacactaggctttggacctgccacacccagatgacactgataccagaatcactcatacaaaaatatatttacggagttccgtcactgttctagaccctgggaatagagtaatgaacaaaacagatcaaaatctttgctttcataaagtctacattatagaggcaagagacagtaaacaactaaagtctgtgctatgtcagaaagaaaataaaacaggatgagagcctataaaatgctaatgtggtgtggaattttaaacaggcaaccagggaaagtcactgacatggccttatttcagcaaagatctgaaggaagtaaagtgataagccagggctgaattcctgatgggggccagcaagtgcagtgcccctgaggtagaggcacccctgaggtatctaggggacgacattaggagtccagtgtgactggagctgagcactaaggaggagattaattagtaagagatgggtttagagatgtagtccagggccaaatggggaggggccttgccagccacggtgcatactttggactttagtttgaattctcaaggatgggagctgttagagcttttcagttaagaagtataatattctgaccttcattttggaaggtttactccagctgctgggtagtaacaagataataagggaacaagtggggaagcatggagaccacttgggaggctcctgcaataatctaagtgagacttgatggtagcttggaccaggggtttttgtggtaaaagtgatgagaagtggttgaattccagatgtattatgaaggctgagccagaagaatttgttgacagatcagttgtggggtaggaaaggaaaagaattgagtaatttcaaagtttgtagaactgaaggttgaaattgccattaactgagatggagaacatctgtggggagaacatagcgaggagaaaagttatcaggaatgtttaccgaaccgaacttgggttcacctgcccaatgcaggtaagccaaacactggcatcgagattgcagcaaaagaaaatgaggcatttattgcagggtgcccagcagggaaaatcaggcagctcgtgcttcagacccggactctccaatggcttataggtaaggatttctaaaggcaggaaagcagaagttacaggcaaagtcctaagtcaatacatggagcttatacattggtttgactgaaagaggctgggtatcttgaaccaggggcttacagaccataggtagagccaaatattttccaatttgcaattgattaataaagagcagctttatttaaaattgaaatcagcagaaaagaatgttagctctggcacgtgggcatggctttctccaggtgcctcaagaagaactttagaagaaagaatggcggtcagagttcagtcctcagttccccttggtctgaggtctatgtgccagcagatccttttggtgggggtcagggtttctgaaaaacaactcagggatataatggtaaggtgctatatttagtttctatagagaacaaaaatctcattattctaacttccttggttattgttttaagctactattaccttcttgcttattaagttgctcatttacttctcaggactagctatgtgcctggactttctctcgaaggaactcaagattatcttttatttccatgcttggtggggcagtggcaggggggtgggcagaagctcaggcccctacgagggatcccacctccatctcaggagcttagttttagagggttaatttgagacatctgttagacagctagatagatatttctaattgcatatatgagtcaagttcaagggcaaggtcaaggttggcaatataaatttggaagtcttcaacttagagttggtctttaaagccatgagactggataaagtcagtcaggggaggcattttgctagagaagtccaagtgctgagccctagaacatttcaacatttagaggtgcaggagatgagaaagcaccaacaaaggagactgggaaggaaaagtcagggagattatagctccataatcaagaaagatcttcgttcctagtacctgtcctctcacgtccttactgcaaccttgaaagtgctcatagtagttgccagctagaaagaaaggactggaaagatagaagaaagaagacaccatgccccttcattactgagggcttctgagcctgggggatgctcaccctaggaagaagggaagctttaactgaatgaaagattagactgttagatttgttacattttatttatctgaaggggattggaaaacctgtgtgaactgcatgagatttcctagggtcaagaaagaactggtcaagagagaatatgcaaaacagcagtgggagaaatagttgctttctgcttgcactctagcagtttcaaatacccatttaccatatattctctcagttgacatgaaactattcaaaacactttcagcttcatgacttatcgtcctaagtctacaggcaaaagtttaacttttgcataaatcatcaaacagcaggtgctctgagtaacttaaggaaaagggaatttcaaatatgaaggttttcgaagtctcggtcaagatctctgaagtgtgtgggcgcacttgagaattgtccagatgtgtaatgtgaatgtgtctgtgctgtattagcatagttagagtgtggtcctaatgaggttcagccacagaattggtagtctccccattcagctattttgaatttgtcgttttgcatagagaatgccagtgaatggcttgttgggtttatgcaattccatcaccccactgagaacatcaaagtgtgtggtttacaggcaaagcattaggagtgacttctccctactcacaccttcacacgtacaggacctactttatgcatatacacagctaggtctatgtagttcaatgtatatgcagctactttttaaatttaaatagggtacatatgaatgtaaactgtcaagagaataagaaaatcaaccaataatgagaaaattcaactctatgaatttgaagattaacattcttcataaaaattgcacatgtatgtgtctcagtgaatgagggtaccattttcattgagtttctttctttttatgatattaagtgtgaaaaacacagaggctaatgctcatttatatgataattctatagtggaatgtagggtggatttctttttcatttggtgccatttatttagaagatacaaaataaatgatttttagatgcatcctcagagtactgataaaagatcaatacttcttaaattaatgttcttactgcattatgcaaaaatttgttttaaaatcctcaggattttatgatcacaccttcatgtactgatgcttaatgggaaaatattaaattttccctattaaatactacattccaaattctaaattcttgcagctttgccaagttcaaataagtatagtaaatttaactttggaatttcctgacttttgcattgctgaaattttagattttgcccaacattaagggagtctttcaatttaaattccctttatttaaaatgtttagggcaattgtgaaaagtgaggaaattggatgaaagaaattttctggaggacatggttttcacagcttgtcacttaattgttaaaaaatattcccctgtaaagcttagtgtcattatgttaagtcttcagtattttaaaacataaataacttgatctcacttgtcttaaaggtctatgttttaagttttaagtttgtcctaatgtgtcttaaatttggactaacaaaaggtgacaaaatacttccacttgagtaaattacctccccccgaaaaagacagagggacagagagagaaaaaaaaaaaaaggaaaaggaaaagagagaaagaaaaactactgctggcaaacagctatgccttccaagaaatatttgctttggaatgcagaccaaatattcaaactcatattgtttgactatgttatcagtaacttttatgtattttgaaacagagatagctttcagactgttataatgttaaaaagcactgtgatggagctgcctcttgccaccattattacttcatgcctgagttactgcaaattagtgtttagaaagatgcagtattgatttcaggccaaaagggaacctttcattactttgctgcagtagtagcctttcaaaaatgcaattattcagcctaagtgaacaaaaagctcttaattaaaaagttcccttagttcctattaatgataacaaagactattttcaatgtatttccttagactaataacaatagaaaagagggacaagaaagaatatatattgtactatagtaaaatcctgaaataatgcaaaaataatgatataatgtgacagaccacaggctttcatcctctgcataacccttgttgttttccatcattctaaaaaatatccttccctttctatcttctccttgggtaactgccctcgcttttccttcttgttcacatcaaactttggaattatccctaatcattctctgttttctttcttctgattaactcccgaacaccttctaatctagggattattctcaccagtcaagtgaaactaatttcatcgatgtcaccagatggaccttttgcattttttatcttactgaaacatccctgcggaacaatcatctataagcagttggctcccaaaactacaatacagctctctcttctgagttccctacctttgtctggagctgcctgccaggcacgtatactttaaacatcccacaattatctcaaactcaacatacacagactgagtcttcagctccactacacccaccccacgtataccttatcatcatttctcacgttcatcatgacagtgattggcacaattattcattctctttcccaagttataaacctgggtacaaatcacccattttatcatcaagacatttaggtggagtctaaatatatttcctaaatatattttgaattcatccactttcctgcctttgtcactaacgtctctcttctagatttctgaaacagctttccttcaggactcctatctcctacatgttccactgcaatcctttctccacactgcagcacaactacctttctagatcacaagtttggtcatgtcactttcctatgtggatctcccattctcaggataaagttcctgcctgatcattctgtttacctctccagcctaacttcttttcacacattctgattcagacacaggtagatttatttagttccttcaataaattatgctctctcttgctttgtgatatggtttggctgtgtccccacccaaatctcaccctgagttgcaataatccccatttattgtgggagggacctggtgggaggtaattgaatcatggtggtgggttttctcaagctgttcttctgatagtcaagtcttatgagatctgatggtttgataaaggggagttcccttacacatgttctcttgcctgctaccatgtaagatgtgactttgctcctcctttgtcttctgccgtaattgggaggcctccccagccatgtggaactgtgagttcactaaacctcttttctttataaattacccagtctcaggtatgtctttattagcagtgtgagaacggactaatacacctggcctttgtgaatgctcttccttctacctggagaagaatattccatttgattttcatggcctgtttatctgtttcaatttaactgtcactttcccagggaagtctttcctggcccctttctcttctgcattctctcactacctttcactatttctgctgtagaatttatctcaccatattgtcatcaggtataatctcagtctcttggccaccactgacggcttctggagaaggagtccaactagtttcagcttagctcactgtttttcaatactatttgtggtctaaagaaatatttatcttttattttgaaaccagctgcatctttttttgtttttctctttttatatgtcatctgtcagtgctatgtgtttggaaaaaaaggatagtaccaaagctttttgactggaagtcaaaatctgcatgtttaataagctgtccatgtgattcttacacacagtaaagttttgtaacatctgtactctgttttactctcttgagaagagtaaaagatatctgacatgaacttactcaacttcagttctattactacatattcattctccatttcccctgtctttgatgaagtgtcttcacatttttccagagcaaaatgttccagctctgcacattaattccatcacctttctgtactccttttaactcttgccattaattagttcattttctagttgggatctcttctctttcctgactcttcctctttacctgcaaagccatcctaaaacacattaaccataaaaccactctttcaactctttagtcacttctcactatactatttcttgctgcctttcttcactgtaaattttcccaaaagcttagtgtataccagttatctcaagtttctacttatttcttatccttttgtaaaattgcttgtgttccctagaatccctcattgcatttggtgttcttgcttattctgtttcttcttaattgtttttcctcaacatactagtttctttttgctgtcataacatgttgccacaaactttgtggcttaaaacaacagatttattgtcttacagttctagagatcagaagtcagaatggtctaaccaagcccaaatcaaggtgttggcaggattacattccttttgaagtgtctagggtacagtccatttttttgccttttcaagtttcgagaggctaccctcgttccttggcttgtggcctcttccatctttaaagccagtagtgtagcatcttcaaatctgtctctcaatctgacactctatttccttgttctactgataaggattcttgtaattacattggacagaggaccagataatctaggattatctctgcatctcaagatcagctgattaacaaccataattctctttgtcgtgcaagctcacatactgataggttctaaatatgatatcattgggtggctattattctgcctcctgctattgactttcttaaaacgtaatagcttttcagtaatactggtgactctgtttaccttttctttatcttcacttgcttcccttctttcaaatgaatatatccccttaggacttacctttaacgtttttcttctcgtgtgatctcttcattttatattattcatctcaactgattttatccacattgatggtttcaactgtctatacccatagattccaatcaccttgcaaagacttactctagacagtcaacaatttttagatattagtaactcaaattgttaatcatgaagccattaattttcccagaatatattttttactttactgattttattaatattagctcaataatgaaacttattgccatttccccttattcttgcttttactttcaggatattttttcatgtattcttttctctcccagtcccaccttcattagctggaactgagactgtgccatcatctctgctgtccctgacccatttctacgtcagccctgatcatctttatcgacataggtagaaatctttgcctaaagtgaagttctgatcactctccttgcctgcttaatgatttggtcactcctcattgcctacagtgcaaggacagattactgaaaatggcattctaggcctgtcacttaactttctagttttattgttttctaagtaaatgccctcaggtcatggaaagctgcccatttctcatccatgccttataattggctacctccatactttagctagagtattttcattgtctggaagaactcctccctcctgtcttccttgcatgccaaagttccaccccattctttaggggcctttatcaatcaataactatatctgccaagaacttttgccgattctcatggttgaattgaggtaacatgttgttaatcttctttgatggaataaattatattgtgccttgtttcacatttaggtatttggtatgtggcaaatcaaaggcctttttaattagcaattacttaatgagttcatgaatgaatagtatatgcccaatcagtatctgtttatttgatttcttaagagaagttgagagttttaaagaatgaatagcataattttcattaactattgtttctttttatttcaaacaaaatatttatttaagagatatacccatttatggccatttagttgtcatcggtaagctaaattttcaatgtgtttaaatttcagtctgattcaacccttttctataaaaaatacctttgatcaatgtatatactatagctaaagctaacatttgttttttgaagctgaaggtaaaacaatgataattcagaaatttcataactatccttgccagctttgatgtatacttttatgctgtatgggaaaaaaatcaaaagaagatcctggggattacatttgccccccttcccaaaaacaaattatctattagaggaaaaagtttttatgttaagtggctggtctggaaaagttagtatgccagatttcttgtttataataagaatgtaataagtaagatctcttccaatggctaatggttcatattaaattagaaaacctgaattcagttaaaaagaacatggaatgggaggacaaggctttcagaatggtgatataagcaccttggtagactctctcccaagtaaaataagaatttaactcatgaaatacattttttaaaaaataccaacaatataaagtctctgaaaattgaagaaaaaaatccagccccatatagaaaagactatacatcattgtcaattatcaaattaaccccatataaaaagaagtatacatcagccgggtgcggtggctcacgcctgtaatcccagcactttgggaggccaaggtgggcagatcacctgaggttgggagtttgagaccagcctgaccaacatggagaaacctcatctctactaaaaatacaaaattagccaggcatggtggcgcatgcctgtaatccaagctagtacttgggaggctgaagcaggagaatcacttgaacctgggaagcggaggttttggtgagccgagatcatgccattgcactccagcccgggcaacaagagcaaaactcttgtctcaaaacaaaaaaaattatacatcagtatcagttgagatttatctcaggaatgccagattggttcatcatctgaaaattaattgatgtaatatattatttaaataaaagacaaaagccgtgatcacctcaatatatgcaaaaaaccaaaagcatttgaaaaaaagccaatacccttgtattctaaaaataatcagaaaattaagaatagaaagaaaaaaataagaatagaaaggaacgtactcaactttatagagggcatctatgaaaaactacaactaacatcatacttaatggtgaaagaattaatgctttccctaagattgggcacaagactgatgtctactctcaccatttctcttcaacattgtactacaggttctagccaaggcaattatgcaattaggtaaataaaagttacccggactggaaaaaaagaagtaaaactatctctatttgtagatgacacgtgtttagtggacaaggtaacaactgaagtgaataaggaatacactaaagtggctatggtgtactctaaaaactattagaaccaatgaatgatttaagcaaagttgcaattgtacaagatcaatgtacaaaaatgaattttatttttatacaaagaataaatggcttaggaataaatttagcagagtaggtgatagatttgtacactgaaaactgtaaagccttgttaaattaagaatgatctaaataaacaaatatacaccatgcttacagattgaaaaacttaatattgttaagatggcagtactctccaagtcgatctgtaaatgcaacacaatccctgtcaaaaatgaagcttgcttttttgcagaaattgaagaactaatcttaaagttcatatggatgcaaaatacacatttttcgtagcagcacatagaatattctccaggatagagaccatatgttaggtcacagaacaagtctcaacaaattttttaaaaatcaaaatcataccacatatcttctcagatcacaatagaataaaacaagaaatcaataagaagagaaacattgaaaaatgtacaaataaatggaaattcaacaacatgctcctaaatgaccattgaagaatgaaatcaatgggtcaatgaagaaaggaataaggacattttaaaaatgtcttgaaacaaatgacaatggaaacgcaacataccaaaacctatgttatacaacaaaagaaatgctaagaggaaagtttgtagcaataaatacctgggtcagaaaaagtacaaagattttaagtaaaacaattaatgatgcacctcaaggaactagaaaagcaagaacaaaccaaacccaaaattagtggaaggaaagaaataaagatcagagcaaaactaagcaaaatagagactgaaaaaacaatacaaaggatcaacaaaatgaaaagttggtttttctgaaaagataaacatgattgataaaccactagttagagtaatcaataagaaggagagatgactaacaaaattagttgagatgactaactaatcaaaattagaaatgaaaagggagacataacaactgataccacagaatgcaaaagattattaaagactattataatcaggtataactaaaaaactggaaagtctagaagaaatagataaatctgtggacacatacagcctaccaagattgaatcaggaagaaattgaaaaccagaacaagccaatataagcaataagacttaatcagtaataaaacatctcccaacaaagaaaagcccaggattggatgtattcactgccaaattctaccaaaattataaagaagaactaactccaattctcctcaaactattcccaaaaattgaaaaggaaagtactgtccttaatgcattctacaaaaccagacaaggacaaaacaacaaaaaagaactacaggccaatattcctgatgaatatagacgtaaaaatccccaacaaaatagtagcaaactgaatccaacagcacatcagaaagataacacaccacaatcaaatgagatttatcccagagatacaaggatagttcaacatatgcaaatccagaagcattatacatcacatcagcagaatgaaggatgaaaaccatatgatcatctcaatagatgcaggaaaagcatttgataaaatccatcatcccttcatgaaaaatccctccacaaactatgcatagaaggaacatacctcgacattaaaaatgccatgtatgacacactcacagctgacaccatactgaatggggaaaagctgaaagcctttcctcgaagaactggaataagacgatgcctacattcaccacttatattgaacagactacagaagtcctagccagagcaatcagacaagagagaaagaaataaaaggcatacaaattagaaaagaggaaatcaaattgtctctctttgtagatgacatgatcttatatttagaaatcctaaaaattgcaccaaaacctcttagatctgataaataaattcagtaaattttcaggataaaaaaatcagtgcacaaaatcagtagcatttctatataccaataatgaagtagctaaaaaaagaactcaaaaggcaattctatttaccatcgctgcaaaaacaataataaaatacttaagaataaatttaactaaggaagtgaattcttccataaggaaaactgcaaaacacttacgaaagaaattgaaggggacacaaacaaatggaaagacattccatgcttatagatcagaagaattaatatcattaaaatgattatattacccaaaacaatctacagattcagtgcaatccctatcaaaatatgaatgtcatttttcacagaattagaaaaaacaatcctaaaattcatatagaatcaatggaggcatcacactaacctgacttcaaaaatatattacaaggctctagtaaccaaaacagcatgatacttgcataaaaacagatactagaccagtggaacaggagaacccagaaataaatcctcctatttacagattttcaccaaaggtgccaaaacaacattgaggaatggacatccttttcagtaaatggtgctgggaaaactggatatctatatgcagaagaatggaactagacccctgtctctcaccatatacaaaaattagctcaagatggattaaagacctaaacataagacccgaaaccataaaactactagaagaaggcatatgggaaacactccaggacattgtctgggcaagaattttatgactacgactcaaaagcacaggcaacaaaaacaaaaattgacaaatgggactctattaaactaaaagcttctgaacagcgaaggaaataatccacagagtgaagagtcagtcctgttaaattggataaaatgtttgcaaactatgggttcgggctcagtggctcacgcctgtaatcccaacactttgggaggctgaggcgggcagatcacctgaggtcaggagtttgagaccagcctgttcaacatggagaaaccccatctctactaaaaatacaaaattagctgggtgtgatggtacatgcctgtaatcctagctacttgggaggccgaagcaggagaattgcttgaactgggaggtagaggttgcggtgagccgagatcgccccattgcactccagcctgggcagcaagagcaaaactctgtctaaaaaaaaaaaaaaaaaagtgcaaactatggacatttctcagaagaagtcataaaaatggtcaagagatacttgaaaaaatgctcagtattactaatcatgagagacatgcaaatcaaaattacaatgagatgtcatcttattccagttaaaatcactattattaaaaagacagaaaatagcagatgctggtaaggatgtggagaaaagggaactcttatacactgttggtggtaatgtaaattagtacaaccaatatggaaaacagtatggatatttctcaaaaaattacaaataaaactgccatgtgatctggcagttccactacatagcatttattcaaaggaaattattatatcagagggacacctgcaccctcatgtttatagcagcacttttcactgtagcaaagatatggaatcaacctaagcattcgtcactggatgactggattaaaaaaatgtgatatatatacacaatgaaatactacttggttataaaaaagaataaaatactgtcaattgcagcaacgtgggtggaactggagggtatttatgttaagtgaaatgagttcagaagataaaggcaaatatttcatggtctcactcatatgtgtataaaaattgatctcatggagtgagagagtagaataagagttaccaaaggctgggaaggatgtttggccatagtggaggatgaagagaagttacttaatgtgtacaaacatacagttagacagaaggaataagttccagtgtttcataacaagagtagggtgactatagttaacaacaaggtattttatatttcaaaataactagaagagaggacttgaaatatttttaccacatagaaatgatagtcaagatgtgagggataccctaaatgccctgacttgatcattacacattctgtgcgtgtaactaaatgccatgtgtcccataaaaatgtataaatgttatattttaatgaaaaacttttttaaaaagtttacatggaaattcataggcaaatcatataacatgtgggacatatgtaaagaatttttataactcattcgttaaaaacataagtaacttaattaaaaactgggcaaaggaattgaacagatatttctccaaagacaatacgcaaacggcaaataaggacatgaaaatatgctcatcattattaatcatcaggcaaatgcaaaccaagttataatgtgataccacttcacacctacaagcaaaaaaaaaagtagataatgagtgaaggtgaggatgtggtgtgtatgaaggactccctcatatattgctagtggggatgtaaattattacagctgctttggaaaacagtttgtcagttcctcaacaagttaaacatagaattactgtatgactcagcaattccacttctaggtgtatatctaagataaatgaaaacatatgtctacacaaaatgaatacctgaatgttcatggcaactttatttataatagccaaaaaataaaaaatggaaataacccaagtattcattgactgataaatgaataaactgtggtatatccatacaatagaatattatttagcaattaaaaggaatgaagtgctgatacatgccccaacatgaatgaaccttgaaaacataaactaagtgaaagaagccagacacaaaggaccacatattttatgattctatttatatgaaatgtccagaataaacaaatatatagagacagaaatgagatcagtggttgcgtagggcttggagaggaataggaggaatgattgctaataggctggaatttccttggggggggatgaaaatgttctgaaatcaggttgtagttatggctgcacaaccttgtgactacactaaaatcatttgagttttacactttaaatgtgtgaattgtatgacatgtgaatcatgtctcagtaaagctgtttataaattgaaattctgagtacagttgatacacaccatgcttttgaaatctgaaaagaggaaagcagacatcaattttccattgcaatttgtaatattgatattgcctgttgtctttagaaaagctggaaataggcagcaaattattgcacttaacacttcaatcatgaattttcctagtgtcaaacagtatacgaataagtggaagttcagtgtatgcaaaaatatgcttacttttttctatatcaaaaagatattatacagaatattccaaatatgtatagttcttggcatcagtggaaacaaaatgttctaagaacatgtttttaaaacaaaatttcttgttttatttgtactaagcttctgtaacataattgttacatggatggctttttttctgtgacatgtacctataagaatggacagtctctctagggtgttcttagaattcattgatatctgagatcatgttatcactacttatcaaattattcattatattccgtttagtgtaagatttacaggaaatgttggttgacaaatatgaggttatgtggtttggcagtcagaaatctgtcagatggttttgtttagattggatttccttttttaaaaaacctgtgttcagagtcttcacattactgaagacttcccagtctttctctttttttgccctttgaagtcacacttgacaatccccctgttttcacagtgttcttccttagcctccgtttttcacattcttcctccttcctccatgatccttccttcccagactcctattctgcttttcttcctctgactttttcttagatgttgatagttctcatggtttcctccttcaattccagtcttttcatttgtcttctttggaaatctcatatgttgccataacttcaaaggcaatccttatacttggtgataaaccacaaatgtccatctttataatttacctctttgctaagtttcatacccaaatttttagctctgtagattagaatttttactggtttctctcaaacatcccaggatcaaaatgtccaaagctcaacttaactgtaaaacatgttcttccattcgtgttccattctttgttaatagcactatgtcatcatccttgtcaatcaaaatagtagtgtaagatatctttctggtgacaaagtccttcctgttgatttttccttcaaattatatcctgaatatatgttcccttcctcatcataaagccttacttcaagttctcaacatttatccctggactattatatcatctgtccacattaaacacaaggactatctttctaaaatattgataggcttatgtaattcttttgtttaaactccttcatagacactattcatcaccttcagaataaaagccacagtccttggcttggcttttcaggatttagcatatgcctaactagctaagcttattgtccatcagtttcccagctgttctagtacactgtgcattcttcaactgtggtgtattttcagacccagttgcccatgctgttttttgttgttgttgttgttgttgtttattagttggaagctaacttcactcgactggccacaaaaattcattcaggactccaggcctatgccaatcagaacattttcctggccagaggcatcattcagaaattagcatgtgacccaattctagaaattaggacaaaagggatgatttgctgggggcttctggaaaaagttttcttcctctcaggagagagcactggaaaagacactctcttccactaggtgtcccagtcaaaggaatagcctaaagctgctgtatccattttgctcccatcagggaaggcagctcaagtcaaaatacagaggaaggcctagttgaacatatctcacagaaactgaacaagacacattggttgaaaccacttctagacttcagatatgacagctattaaatttttgatttatatcagtttaaatcagtttttctgatatttgcagaccaaagctgcaaactgatatagtttcaaaaaagatcaaggagagatgggtggcagtatattcagtgtgcagaacatggatgaaaccaattcccattgttaagactctgctttttcccatgagcagacttgtcacctttaggcacacttgtttatacatagataatatatgctttatatttgtggatataatacttccaaatctgattatgacatacagtattgaagaactaatattcaaaagagctaaatgcatgtatccttctgaacataaatgctaatgctaaatttaaattgatggataaacattgtgatacagacaggaggcagggaaatactaggtcgaagacggggtgggggtccctggcgagggctccaccctcaagcctggacctgcgaccctaaatgagatcatgaattcctgctttcctgcccgaatgttgccttttccaaaaccaccctggcccaccatatcccctaccctgtacctataaaaaccccaagctccactggcaaaggagcagagcaccatggcaaggaaggagagaagaagcatctgaatgtcgagaggagaagaggcagctggacatcagagactacggttggagaggagttcagctggggacggtcagagaggagttccgctagggatgaccaaactccaggggaagataatcttcccactccgtccgctttccacctccccatcccactgaaagccacttccatcgctcaataaaatcctctgcatacaccatccttcaattcattcacgtgacctgattctccctggacaccagacaagaatttgaaaacactgggcatgagctttttaacatttaagccatctgcaaatggcaaagctaaaaaagcattgtttgtaacacacaccttctggggctccacaggtcaccggcaacacctagacactgccgtgggctggtacagggtttgttcctgccggcatccggaaacactcatcctggctcctgcacctgctcacctgtgtgctcccctccagcaaagggtttgagcatggcagccaagtaaacaagccacccctgtctcaagtcctgtgaggggctcgagggaactctcccatctcaattgggcaacactgtattaaaatgcaggggttttggtcagtattttggggttttgttgttgttgttttaaaaaagcaccttatttttaaatttttaaaatatggtagatgtctagcccaaaaatgaattaaaagcatttctattttttatacaaaacctgagagccttttatgtataattattttgaagctaaccttttagggttcctactcaactgtaaggagaattgtgaaacacataggttttttttgcacaataaaattgttaacagaaaaaccacaaatttaatgtcactccacatgtccttctatgtcccagatttattttatccaaaaaaagaaaatgtcaaacatcttttaattttctgttctttttattgtcaggaagagttttaagactagggcatagggaagttgtttattatgaaacgaaatgcctagaaataaaagccaatgtttaaatgaaaaagttgagtctcttaatgtttaatattttgcataaatcctgggcttcataagcaccttgataattcatataattttagatgttaagagagtgagaaggcaagttttagttcttcacttttttaatgcttgctttaccttgtatccttcttttctttcttttctttttctcttccttatccagaggtgataagtttctgtggtaattaaagtacagctgtttagtttcatctctcttttgaatccatgctcagttgtattaagatgcactgcactaagatagcaacacaggatgcaacaggacctaattttgcacacgtggttttattttgttggattaagtctgatggcagctctttgaccacattttgtatttactcctcatgtagtcaattcatgttagaattctgatctctcttgggaaattggtagatttttgatttgtacctctgtgccttcagtggctaagtgttaagcctcaaatgaagatattatttcatagaatgtctgaatctggtaactttttttataagaacatgccaagaagacacacagcgtatagttatttcatgataaagcttgtaggcaagagtgacttgccagaataaatggaaaaaaataatgaatagaccaataaaaggatgtaagaaaggcattggcaacctttttctttttaagcgtggggttaaacatattttgtgtgtttataataggaatataattatttttccttttttattggacattttaaaagaataaatgcaactgaaaagagaaaaactaaaagtcagcttattttgacttttcagtaattatctgtatgtatggcttttattgttgtttcttctagttactggcttttgctacctctgttcattaaaaaagacagccacctcccaggaatttgggtggatttttctcacaatgactcatttcctttttaaatgtattagcaattagctcccagttatccctaattgcagctttgttagacttcccacctctctctgcttactgaactagaagagaagtacattaaaagtttatataaatgactgggttttctgctttaaggaaaattttaaagaaagcagacttttcattaatgggaaaggaaatagactatttccagcattgagtatgctgaatggataaatgtagggaggtacaataggaaaactggacacttcccaaagcctcccaagtttttgccctttaccatgtttctgtattattttagattgaagttgttcccagaatgtcaaatactcccatattcaaatgtaagtacaaaaacatatcctgaagccaagtttaaaaaaaagttatttgccactcttcattgcttcaaatagtgtgaaaattagttatacattttcaaatacagttattctatattttaaaatgtaatccatgtatgtgtttttttaaaggctctagtaggataattccctagttgatgtagaatggaaactaaaacattgacatctttacttatttccaatttaaattgcatttttaaaaaagggtatagagttctgctttagttggccttgttttaactgccatgggagtttactttcatctcagttcccatagatatgtgtgagaaattctttggggcctgaaacaagagtatcttcagggttatatgatctgacctaatcaaccatgaatgctctcatactcttaaaaaaaaaatctcttttaaaagctatttaatgaaggcctttctcaatcatcttctccttcttcccttgattagacattgatgagtgcagcatcattcctgggatatgtgaaactggtgaatgttccaacaccgtgggaagctatttttgtgtttgtccacgtggatatgtaacctcaacagatggctctcgatgcatcggtaagcctcgcattttgaaggctcaatacactgggtctttataatgacaaaacagcccaaacaggtatgaagatggcaacgattataaaatattgaagaaatggctgaatgagttgtttaatgtaaacggtaccagtattgagggattgatagaccaggtactctttgcaaagacttcagtttcagaatccaactgggtttgttttatgttgtcaaagtcattttgggaataaagaaagacacaaaggcacgagaaaaattttttaaaatctgctttgggagacagaatgtagtaattaaagcttcttttgtgctatgaatcatgaatgttattaacatcttatttacttagaacttgtttattctattgaaaatagttactatacaaaaaagacacctttaattttgtgtttaaatatattcaaattaaaaccattgtatgctctcccttgtttatttagaaagatgcaatagtgctacagtcatggtgaaggtaatctgttattgagcaaggcttagacatctgtcttattgcgagcatagagattatgaagtgtcttttgatgcataatcacagcacagtgagctaccctcacatttcccttcctgagcttttaacctagtctattccaattttaagctgacaataggtaaaaagagaggaaaaaagaggcactgttatctttactggcactaaagattcatgtagtgcaggaattaggaaaattaatccaatacttaaagaatggtgttgtttggtccactagagggtggccgtttgggcagtgtctctctctccccaaaccaggcagttagtatgtcagcaaccaactgccaggatctctgtaggtcttgatgattccctgatgattctcatgtgcccaagagaactgagttgatgagatggaaatacagagtcaaggatgtaagctagaagtcgtaggccaccaataaaaggactgtggcctgaattcatttgattaaatgtactgatatatcaggtcatccagcagtgaacataagagatacaaatcctgccttcagaatgccatattgtcatcataaataacagtagaagcctactaatagcagtaatagaagaaacagtagtagtagtaaaaataatagctgtcatttaagatattacacataccgtgtgtaaggcactgggcttctccactacctcattatctcatagctgtgaggagtcaggcaagctaccatcttctctacacttcagtttcttctaataagtgtccaataaaatattcttcattattattcttattaagaggaggaggaggatatgcctgctctggacctatataaatatgtcatatggtccttctaatagccctgtgtgataagtatagttattccaaatttacaaataaaagaaatatggtttagagaggttaagtgacttgcccagtgttttgcagccaatgaatggagccaggattcaaatcctgacctctctgactccagcctcttgtgctactgtgacactgaactaccatttacccactttaaggctgtggagatcctgtggctagatgtcagggcctccagcatgactgatttcttcactgtcatgctaacagcctgctttgagaagtaagatgtctgttgggagcctcatgtcgtgtctttgaatgagaattgtttgtgttttacagatgaatcagagtttctatcttgcattaggtaaatcatttttcgtgaaatattaagtctgtataactgagcagataaactattttagggttactgttgccagttggctcactgtgtagtaagtttgattcatttaatactctaattcccccttatccacggtttcactttccatggttttgttttctgcagttcccactgtgattcaaaaatattagatggaacattccagaaataaacaattcataaattttaaattgtacatcattctgagtagcacagtgaactttcacaccagcccgtccagggtatgactcctctttttcccagcatatccatgctgtataggctccgcacccactagtcacttagtagccatctcagttatcagaccaactgacagtatcgcagtgcttatgtgcaagtgaccttattatacttcatcatggcccctgaacccaagagtattgatgctagcaattcagatatatataaaatgagaagccataaagtacttcttttaagtgaacaggtggaagttctctacttagcaaggaaaggaaagaaatcgtatgctgaggttgctaagatctatggtaagaacaagtctatccatgaaattgtgaatgaagaaaaagaatttcatgttagttttgttattgcacctcacactgcaaaagttacagccacaatgtgtgataagtgtagttaagatggaaaaggaattaaatttgtgggtggaagatatgaacagaaacgtgttcaaattgaaagcagttggattcagctccattcaaggtttcaggcatccactggagatcttaaaacgtatcccccgcagataagggagaactactttataatttggctgtcagctttctatgagagttgaaaattagtgcaactacctacatctggcttgattttcttgaactctataggaaaataatatgtttatgcacacgtgcatatgcgaacacaaaataatcagcttggaataggtatagattcaactctttaggagaaacgtcgccgtgggagtcgtcattgaacactgttgtctgggtgctgtagaacctggcttccggaaacttgtctcctagaatattgctagaagaaatatgcctggagaaggaagtgaggttattattgtgaagttctggaaataccaaatacagcacatgtattttatttggtaatcaatgtggagtaattgaaggcttttgagaacaaattgtaatgcagggttgggggcttgagaatagagagaaatgaaactagttatgaggtagaattgccaaaacaagtttcagcgttttattccccatttctaaattacttctttttatttactcacttacatttcaaaatctttctctagtcaaacaaaacttgcattcatatttttgttctgcattggaaaagaagcatgaatcctcattttattcagataagaccaacgtacctaatgatttactaaggtgggttttcttagaggagagttttgatttaccaaaaaattatgataaactctttttatctcttgcctccttatgttataaagtcctaagtctctacctgaacattcaaagccttacctaacctgtattcctgagtcatctctaaccacttgccacctcacacttgtatttccctcattgttgtacaagaccacactgccatgcctttgccagcagtaccccctctgcccgaagcatcttgtttttccccttctatgctcattaaaatccagctcaccctttaagtcccaaaataggtatcacttttccttttttgttttttaaagatggagtctagctgtgtcacccaggctggaatgcagtgtcacccaggttggaatgcagtggcaccatctcagcttgctgcaacctctgcctccttggttcaagcaattgtcccacctcagcctcctgagtaactgggattacaggcacccaccactacgctggctaatgtttgtatttttagtagagacagggttttcctgtgtgggccaggctggtctcgaactcctgacctcaggtaatccacccgccttgacctcccaaagtgctggaattaaaggcatgagccatgacctctggccagtatcgcttttctttgtagccgtttcacctaaactacattttcttcttgggcaaaattaatcagccccaccattttgaaatgaaatgaaatatgttttcatttgcttcattttagggtttactgcattgtcacaggtacttctgcgttactcactggctagactgtgggctttgttaggccctgtcttatgcagcttcatggaccctgggctttatgtaataggcatcttgcatagaagtttgtgctgagtaaatcttttctgaatgaacaggaaaaccagcaaatgaatgaatgagatgatattgaatgtaagaacttcatgttgattatagcggccttgcagcctttggcatctctttggacatgatgtcgtgccactgaattacggtcctggatgctcataaagcaagagctaacttgaggttcggaaagctaagtcctgcactaaccaggagtcccattcatttcactatcaacatcctgaacactaggaacaaaggaaggtctctagggaagggagaatggctctccagaattacaaaaccagtgttataattaagtaagcagcttaaaaatgttttgaataactatgttacatttggaataagtatgtgttttccatacatgagaaaaaattaatctaacatattaatgtgtacgagatctttgatttctaaaattctgagtctgtattttctcagattgaatttatttggttgaattatatatgttggagatatttgcacgctatttattttctaaccacatgtatgctaataaagagttggatgaacttaaagctctttttaatactaaactgcgtgttatctgcagctttattctgagagctcacatgtgctgaaagtgacatttgctgaattttgtcttaatttcttattctagttaacacagatattctgagtgtataccacatgacaaagcatcagtaaacttgatcctatttcttttgtgtgctggaaaacagtttcacatggtaggagagtttaaccaggcaatttaattataagacacgataattttccgctttcattgtatactaaatataaaagtcaaatttctgatttgtttatctatctagtgtgtttaatcatctttttatatatccaggaaagaactgttttttagcatagagcactaacatgtgccagttccaaaaaaaaaaggagttaaaacgtacctaataatatttctctaaaaagcgttttaaatagcactacttaataagccttaagtcattttggaagtaactgtcatggtcatgtccaaggaatgattaatacctaatttgcacattgttatataggcacagaagaatggctggcagccagcaataaataacgcgttggcaaagagcagtgagcaacttctgtgtgcaggataatgtgtctgctgctattgtgtacacagggtgagaaaggaccctaagcacagggacccaaaagggccagttaagttcagaaaatgggattaagcatttagaaattcttccagtaatatgatggtgccacagcatgctaaggcatttcctcaagctttccaaacgtgttagtgcacaatactgctgtggagtattcttgaaaaaacaaaacctgaaaacataatgtgaaaaaatataataccaatataaaagaaagtttgaggcagaagtgatgaccagtatatgggttttttttttcctttttcaagaaaagggcaaggtacagaattatttatgtattacacagcactctatgtaacgctggctgttgattccacatgcatgtgtgcatttgaaacaaaacacttggagaacccaaaattatttaactaaagagggaaccagaaatgaaagagtatgaggatatcagttttaattaagaaaggaagaagtgtgttagaaggagaagttttccttacagtgaggaagaagcccgtcattcactattttaaaggaagaaataaacctgggatccacagtggttccttttcattgctcctagttctatagttactcttaaacaatgtaaacatgaaagtattttaggaatagtaagaatccgcaaaatcaatcaaggggagcccaggctggaaccagaccatcaaagaggtgagtgcaggcatccagtctcaggagacaagcatgagacaatggctgctatttaccgaacacctactgtctatcactattgttctgacctgggctaatctcattggtgttttctggctgaacccttcatttcttaatgagcaaacctaattccacaggagacatttatttcaacatacaatccccaatttttgccaagttttcatcacattgtataattaaccattagttctcttaaatcaagtttacacaaaatgtcaagctatgaaacaaactctgataagtgtacctttattacgtttcaaaatagatttatattttaatcagaggagatgaattacttcctgtttctcggtgtgactgtaaatatgactccttgtaagccttgttcaggaaatgtagtaagggcgatagaaaatgattagaggaatagacttgttttcattacttaggacacattggttctacagttaaacatatagcaagcattagagggattttgtttttacaggctttcatctggctttgcccctaatgattccctgtttcaaggaatagtgtgcctggacaactcttgtttctaacaggtgcctcttttttatttcaaatatttttccacatgatacattttttaatacagtgctttctaagggccatgaaatttcatacaaaggaaagagaggtaattcccagcctctgatttgctttgaaatatgcctttttggagaccttaactgtgagatgctacaccagtgtatgtctcatcctggtaggttttggctcaagaaatgagaagtaggttgcctgcctcctttttgttactagaaaaagctaattgtagaatttatgaaaaaagttacaatttactttgcagtcctctgttgctgcctctctaccctctcacctatgacttagtttccttcagtacatgtattacaggactgaccagaggtttccaaactgtgtagaacaatggttattattagtattattttttctttgagacggaatcttgctttgtcaccaggctggagtgcagtggcgtgatatcggctcactgcaagctccacctcccgggttcaagtgattaccctgcctcagccttccaagtagctgggactacagcaacgtgccaccacgctgggctaattttttgtattttagtagagatggggtttcaccatgttggccaggatggtctctatctcctgaccttgtgatccacccacctcggcctcccaaagtgctgggattacaggtgtgagccactgtgcccagccagctattaatttttttaatttaaagacctctctttaacataaaaaatgtacttcagatcctcacattatgataatttaatattcgtgagagcatacataatgaaaatgttcttggatatttagtaataatgataaatgaatttggattttattagctatagtggcatattcataaatgtgaatcatggtagtgccaataaactgttaagtgttacattgcagtgttcaatgaaaatatgcatttgtgaacccctctcaatatcattgcatactcccaaagtctggggattggtatagaatggattcctgataagtacttgcaacattttgattgacatttatattagtctgttttctcactgctgagaaagacataccagagacttggaagaaaaagaggtttaattggacttacagttccacatggctgggaaggcctcagaatcagggcaggaggtgaaaggcacttcttacatggcagcagcaggagaaaatgaggaagaagcaaaagcagaaaccaccgataaacccatcagatcttgtgagacttagtcactaccatgagaatagcatgggaaagaccggcccccattattcagttacctccctctgggtccctcccaccacatgtgggaattctgggagatacaattcaagttgagatttgggtggggacacaaccaaaccatatcagcatttttatacatattaccttatgtataaaatgtgttactgtatttggtccatgaattgtttagaagtataggatgttttcttgtttattttgttattgatttccaacttcatttcatacattgtggtccaagaatattaccagttgataccaattcttggaaatattctggtacagtatttgcttcatggtttaacaaatgatttatttttataaatcttccctatggacttgaaaaagatgggtgttctccaattgatgggtgccagattgtagatatatccattagatcaaacaactgtactattcaaattttctttgtacctacagaattttgtctactatatctattactgaaaaagtcatgtaaatattccactgtggaggtagatttctcagtttctccatgtagtctagtaattttttattttatatagtttgatcttatgctataagtgataaatgtttaaaagtatctgccatattttcctggtgaattgaaccgttttaaaattatgtattgactctatttttttttctttatttgtggtctatttctaaatattttcttttggtttattttgtatcacaaaatatcttagtatactctggtttgttttgtatcacaaaataaaccaaaaaataaagcttctggtagcagaagctttaagtatatacctactatgtattttccctctcaatctttcctcttccttatgttttaaatgcatttcttttaaacagcctatatctattttttgttttatttttacagtctgtaaatctttgtctcttcagttgagatttaaatccatgtgtatttattatattactgatatatttgtttttatttttaccatagtccttgtgcttcctacttatcttactttttttgtatttttttctcctttcttggtttcttttagatttgttcaggatccccccgacctgctgccgtgaactcgattctctttctcctatttgttaagaagttatgtactttatttctgttgcttcagtggctatcctagctgttttaagatgcatatttaaaattacctgtatgtttgcctatatataaataataaaagaatatttaagtggttaaactttgatcttcccctcacaactttttaaaatctagtatattgccattcctatgtgtgacaacttaatcattattgtttaatatgttagtacttatttagatttacccacttatttaatattttttgctcatcatttcttcctgcatctcaaaccttccattgggatctttttcttttgcctgaagtgcctctttcaacattttgtttatcaaaaaaactcttggtagaaaactctggttttgttttcttgaaaattaccttaatttgccctctgcaaacatgatttatcacagtacagaattttaagttgacagttattttatcagagtatactaagatattatttcattgtgttctggcatccattggtgctgccaaaaagtcagcaatttatttttttaaaataccgtttctcagcaggtgatctgtcttgtttttccacctatttttaagatctttacctttgtagttctgcagtttcacagtggtatggctaattgtgtatctctgtttatttttcctactttgaatgtattggacttcttatatctgaggtcttacaacattgctagaaagttctaagttagtatccattaaatactgcttctttcccattctgcttattactcttcctagtactcttattacatgttgtattagtctgttttcatgctgctgataaagacatacccgagactgggcaatttacagaagacagagatttattggacttacagttccatatggctggggaggcctcacattcatggtgcaaggtgaaaggcacgactcacgtggtggcagaccagagaagagcttgtgcagggaaactcctgtttttaaaactatcagatctcttgagacttattcactatcacaagaacagcacaggaaagtcctgcccccgtgattcagttacctcccaccaggtccctcccacaacatgtgggaattcacgatgagatttgggtggggacacagccaaaccatatcagatgtacacaggtgtacatctaattagcttttcattctcaccttcatatttcttaacctctttttaacgtttcagtgtctttgtctctatgtgctaattgaagataatatattcatatatatctgccaactcagtaattttctttatccatgtgcaatacacttgtgtaatgtatttgtcagatactttatttcatttcatttatagaagtttgatctcttttaagtctgttcctattcattgtttatgggccttttccccttgttcatgtcttcagacttgaattgctttaaatatattaaatataatttagttattaattaatatttaattattaataatttaaaataataattgtcagaattgatctgaccatttcaatatcaaaaatatactggttacttaactagtttttgttccttagtgtgttattaatgtattttcctgttagcagctcttttttctaggaactttatgagaattttttgagactttcattaatattaggtcctctaattgtgttggctcttgtgagttgcttggagtgtctctaacctgagaacctctttacgttatattcttcctttgaagttcttcagaccaaaaacctactatgaattgaggcatcaaagctattgatgtgaggaagaccttgtggttacagattcttaagagagatcttttttttttcctccacagagcatcaaggtagagacaggcaagtttcttagttgcctccattaccttatccatatactatatccataaactaagcatatggctctttggaaccctaccttacgagggagttttctgttatgtattgggggagagtggaatctgggctttttatgtcttatgccccgggcactgtgaaactatcagagttgaaattcacagtctccggagtttaatagtagcctaaaggtgaaattagttgttcaaatacctcctaagattctcatttcacctcatttagggactctgttttatccttcatttcatgcgagctggatgatgtgtttttaaatattttttcacattttatccaggatattttaattgagaggaacattcagggtagctaattcaccatgaaagctgcaagaaatagagcatatgttgttttatttcattctcccaccaaccatgttctgtacagaagaagagttaaatacggttgaaaatcgaacaattaataatatttgaatgtaaaactaggtctcttgactcaaggctatggttttgttttttgttgtttcgttttcaaattctatattacaacctccttcttgtagaagccttgaagagataaatatattcatcctaacttgtagcactgattgtgttttataacgttagtgattattgttaagagtttggaactttcttattttaatttacatcctggccttgaggaggtagtatatgatacttcgggttcataaaatgaatattccaaaaattgtttcctgtgattattcttaggaatagaaacttagttgtgaaattattcctaatgacagcctgtccaaatccaactcaagtttttgaaatttctgcagtgcctttaattatgtgtgcatacatcacatttagtgctcggttttgggtcttactgggattttggggagaaatagaaggagttgttcgattcttatacagagtatcttaaaggtaattcatttattttatgatagcttaaaagcaatctgaggcatgctatatatgggccattagaggacataatgtgcttactttaaactctgtatccagtgctaaaaattttaactttacctgttaatggaattataagcaattaacagtttcatcttcattattgatatgcagatcctgattgctgtggtacatctttcttcttgtgatcatagacaaaacaactttgaaagcatcttgatagggttgaataatatgttgttaatgaagctcacagttttttccattggttactataaaggcagtttcagttataacccataaagtttacagatgatattgataatttatccctatgcaactttgcattttatgcagtcttttgcaatcatcataacctgtcttctagcctttatctgatcattttgatccattgtgtattctgctatcagattgacctctattacagtcatatttgatcatgtcacttccttacatcaaatcctactggataatgcacagactctttaccatagcactcctgccaaactgtgcttacctctgagtggtcaccttattttgcctctcaatatctagtttggcacagtcagttttccctagttcttgaaactgtctcatctggctctggcttagaatgacatatatacactgacaattcacagatatatatgttcagcctgactatgcttctgcattccaggctcatttattcaacattccaaatataacatgttttaaagaggagccttgtcttgtgttctctaatcccgtttcttccctcgccatccccatctcagctgtgtaagtcaaaaacttaggaaatgtctaagactctctttcttccataccccacacccaagcaagttcccattggctgtaccttcaaaacatgtctgccctctgctcagcctcatcatctccactgctgccaccctcatcaaagccaccatcatctctcacctgaatgtcttcagtgtcctcctcactggtctctgtgctctggctacagtcagttctcatcgcagccaaagagatcttcttaaaaatgtaaaccattgtcttctctcattgtaaccatccaggaaatctccaaaccctccactcgaaatccaagtgaaatcccaaggtcctttcctaatggcctataggaccatccatgatagcctctgctgtctctctgagctcatgctcctgcactttcccttccacatgctgttctctagtcatagtggcccatctttcttcacacacatgaagcacattctcttcttcctcagaagctgctctttcctcagatacttccatggctcatgccctcattttagtcagctgccttctcaaatgtcactgtttcaggttgcatctgatcaacttttataaaatcatcagtcagatgttgctgcattacagacaaccacaaaatcacagtgacatacaacagtgcgcatctccaggctgaggattgggactgggttgttgctttccttcaagcttcagaattgcctgactttagcttcttactgcagtctgtcctcctatctgctccacgtctttcattgttctgtccctggctcaatgaatgtctgagatattaagagagtgaagaaaggaatagataacagagattaagtggtatgagtcacttcacctacattcatctcatgtacagtgattgttgtaagaacctgaggtaattctgccatatcttctgtcttatttatacatgcacagatcagagaacaggcatgtgtttctcgggcctggtgaatggccgctgtgcacaagagctcccggggagaatgacgaaaatgcagtgctgctgtgagcctggccgctgctggggcatcggaaccattcctgaagcctgtcctgtcagaggttctggtacgtggctggctgttagtctcctcagcacagacactgttaggaaaattagtagcagtactgtattttgctctctgggagaccaaggcaggtggattgcttgagtccagaagttcaaaaccagcctgggcaacatggcgaaatcctgtctctacaaaaaatacaaaaattagccgggcatggtggtgcatgcctgtaatcccagatacttgtgggactgaggtgggagaatcacatgagcttgggctgtcgaggctacagccatccatgatcatgccactgcactccagcctgagtgacagagcgagaccctgtctcaaaaatatatgtatatattttgctcctgtccttgaagtcaagtcatatttgttttcctttgtgtgttttcagtatgacttgagtgtttttgtggggagtgtgatagcattgttatttaggatcagttttgataatatctaatttagtaacatcagacaaatacctgaaagctgtttgacttgtttttgtgcaagtgttgttttttaaattattttgaatgttagtatttcaattcagtttttaaacctcctgatctttcatccagagctcaaatatctatgaggaagaaaactctgtcttcatttatactttatttcaggaataccttcagcttataatgtctcagtccttgaagatatttcctctcttctcatgatcttgaaaattaatcatacaagagtatgatgatggctctcattaactacgctgtggtaactgccatataaatgatgctatattgggaaattagggttaatgagaagtagttcctcttgttacgtgtaatatgagtagtaaagtacaaattaatgtttctcacataaagatatattaatatattcaattctattatcattttctcattgaattaaaagcgtgtaaaataattaaagttttcaaatatacttacaaatatttatgccaatatgtactgttaacagaaaagatatcatgacacattaatcattcttacaaaatctctaagtcataaaataccaaaatctattagtaagacaaaaaggggcagaattaatgcctagtaaataattttggattctcccagttccactagtagtatataattaataattttttttccttctgatacagtgccttaagtctgcaaacagttaaggcaataaggcaattgctatcttcttgcttctctttactcaactttgtcacctggacaaaaaggagcagattttaaagcttacttgatattgtctaccgttaaaatccaagttagaaaaaaatatcattctggagcaatattaatacctaatctcctgaaaaaaaatggacaggaaaaatgtataggtataatgctgaagagaatgtaagtaaaaccatacagatagaatgaattagcataaagctttaacttttatctgtacaagtaaattttctgtatttataattatgtctggaattttatgagttgcacttaggtgcataaaataaaaatacacatgtaaatgattgtttatgcaactcagttaaaataatgtgacaatataggttttaaattttttctaaaacttctatatctttttcttgctactgccagcattaaaaacatgtattgagatagtaacctacttaatcatattgtgtagtataggtaacccaaagtgacttagtacagtgtaccaatggcttttgttatgcagaaagacattcacctgtgcttaatgccaactttcttttcttctagaggaatatcgcagactttgcatggatggacttccaatgggaggaattccagggagtgctggttccagacctggaggcactgggggaaatggctttgccccaagtggcaatggcaatggctatggcccaggagggacaggcttcatccccatccctggaggcaatggcttttctcctggcgttgggggagccggtgtgggggccgggggacagggacctatcatcactggactaagtaagtggtcagttttcctgtggactctttagtttcctgcctcaagtgacattataatatctaacataattttaatttttcaaaagggttgtatgaacacacttgcacatgtgtgtgtgtgtttgtgggtgcgagagagagagagacagagggaaaagtgtttcaaggtctgatacatagtaatactaaatttgggaaaatgtaataggaaaatattacttttatgttctgtaaactttctgttaaattagagaaaagaatgtgtgacccaggtcttcgcaaatacatatgagagcccagtaatactccaatccagttgacaccaccaaaaagcatgtttttggtttcaatgtatttcatttggctgtttaaagctgccctgttcatgcaccccttgaattattttccagaaccatttctccactgagataaactgaatatcttgctctgtgcagatccaaatattgtaacgtacatatctttcctttcctcacccttttttgttaaattgcttaagaaattgaaaaccgtgggcttcagaccagagttggcatttgtgtgcttgacatttaacttcattctttttaaaagccctctcttgctaataatatttaaagatgtcctacagtgttatgtttattctttttggcatattgccgatttactatatctgaatattcagcagagttacaaaggagaaacggaaagcactcaaacgtatggtagaacattcctgtaattttaaaaagacatgattaagggcagcattttcagatctgtaacttaacagatacaagttgcaaccatgtgtctcagtaatattttttagattctccacattaaagttttaataaaatataaaatatgagcttctgatatacatctaattaatttactattaaatgtcctttaaaaatcaattcagaaaagtaatgcatgttgtaatgattaaatataattgtgctttaattttccgtagcaattctgaaccagacaatagatatctgtaagcatcatgctaacctttgtttaaatggacgctgtataccaactgtctcaagctaccgatgtgaatgcaacatgggttataagcaggatgcaaatggagattgtataggtaagtttgtgattctttaataatccttcttagtttttttagtagctattagattacaggatcaaattggaatgaatatgatttttttaagtcttttgaaatacagctaatttccaaactgtctcttctgtgtgtatgctattcagtgtgcccccttaacctatgctgagctagatcactttaagaatttcctaccctttcaagtcctaaatattgtgatttctgtctctgactctccctttccattctccttagaaatgcttactcttaatataaactaaaaataaaaaggaatctatgtaacaatgaatatattttaaaaacaattcgtcaagcatgaatccatctttaaaagatgacaagacaccaatggactaaaatctgatatgtcagggcagtagttttcaaatatgtcggtctcagactcatttcaactcttaaaatcattggttatctctactttgataattacctaattagaaattaaagatgaaaatattaagacatttattgatttattcaaaaataacaacaatgaatccattgcatgttgacataagtaacatttttatgaaaaactacatttttgaaaacaatgtgtggaaacaagtgtcgttgttttacatttttgcaaacctttttaatgtctgccttaatagaagccagctggattctcatagctgcttctctatttaaggtttggtgatgttttgttttgttttgttctgttttgttgaggaatgaaaatctatcctcaagcagatacatagatggaaaagaagaggaatattgcatagactttcagataattgaggttattctttgatattccaccaaaacttacaaggagtaattcttaaagtttagttaaccatgtagaatctgaaaccatattagtacactttttgtactctgttacataaagtccattggtttgtctaatgctttgagtggattttgtaacatgcattggtcatttgaaatatattgatgcactgtattatgcacatctttccaaagttgaaatattttactatgtactatcaaaaaatcatatttgagaatatcaccatcaaactcataaaaatgccttcaaattgctgagaaacaatcaagcatacagtgttaaataatctttctgaattctgtcatttttaagcttgaatgttaacattagcatcaaatatacagtctgttccttttcttaaagtgacaggctcactgcattattttcaagaaaatgtctgccagattaataactctgaataactataatttgtcagtcattcttcaagtaaaaatagtattctgcagaaaaagctgctaatggagtgcacaactcaaaacaactacgcagaaacttttccttgagacaggcactcgtggtgcttcagtcagcaacaatgtgtaatgtacattttgtcacagaagtattttaaaaatgtatattcaagggccaagattattattaattttgtggcttcaccaattatattcttaagtgaaaatgtctttttcaaataccctgtgagttcattgtattgactggtaggacagtttggtgccattgccttaacctgtgctaagcaactatcattgctcttgtgccatcagagaaaatgttaacatgattaaaaaaaaaaagtaaatagcatcttaatatgattgtgaaaatagttttgaatcaaactcactctgaaaggatctcaatggtctcccagaggccacaccttgagaacagctgctataaagagtccccaactttcttgtaggtcatatacaaaaagtttaacagtgagagagttagtagtggtagacttgaaagttttcattccttaaatgccatttaaattgatttgtgctcagtaactgtgatctgtatgctagcaacgtggtgaaagaagagaccatcaggaatatccaatctagcagcaggatctgcagtagttaggggttacattagtgtctgtgaaggataagggatttccgcatggagttaaaaaaaaaactccatagagaaaggccaagatggctcagtagacacagccaggaagagcatttcctactgaaagatcagaccatcaagaagactggcacactctgagaggatcttcagaaggaaggcattaagaatgtatggaaggagcacacagaccctggactgaagtaggaggaagctgggaagccttcatggggctgccaagtgccaggacttgttcctgaccctgagaagtgaattaaatagttgaggagtggcccactctttgcaggggtctctggaatcctacctgcagaagatcttacaacctccatggacatttgagacatgggagagctgcttggatagggggcagggacaggactccagcctgtgcagagcccagagggtttggcaccagagtggctacgatgcccataccccagggcttgacatcctcctttagggggctttggccttggttgactgttggacctggacagagcagagcagtcttgcccatgggacaaggccagtctgatctgagtgtcccccatctgccggcctctgccagtgtccctgcatggctgtgtccacttggagcacagcctcagatgcccatctggggctcttcccaggtgtcaccaccatagctcctttgccagcaaaccctgcctaaccattggagaacttcagcagatgggcctctgccagcattctcccacctgcagcctctccccacaactttgctggcatgcacttgcccacagccttcccccattgctctgctggcacacatgcacataggcctcatcaccccatcaccactggcatgttcttaagaagcaaactgatctgatagagctgaaaaactcactacaagaatttcataatacaatcagaaatattaacagcaaaatagttcaaggtgaggaaagaatctcagagctcaaagactgttctttaaatcaactcagtcagatgaaaataaaaaataattagaaagattgaacaaaacccctgagaaatatgagattatgtgaagaaaccaaacttacaactcattggcatccctgaaacagaggtagaaagagcaagcaacttggaaaacatatttgaagatattgcccacgaaaaattatccaaccttgctagagaaggcaatattcaaattcaggaagtctggagtacccctgtgaaatactgtacaagatgacaaacttcaagacatacaatcatcagattctccaaggttaacaagaaataaaaaaattttaaaggcaactaaagagaaggagcaggtcacctacaaaaggaaccccatcaggataacagtggacctttcagcaggaaccctacaagccagaagagtttgggtgcctatattcagcattcttaaagaaaagaaatcccaaccaagaattttatattcagccaaacaagcttcatacgtgaaggggaaataaaatatttttcagacaagcaaatgctgaaggaatttgccaccagacctgccttaccaagaggtccttgagggagtgttaaacatagaaatgaaagactgttaccagccaccacaaaaacaaacttaagtacatagaccattgacactgtaaagcaactacacaattaaatctgtataacaacctcctaaatgcaatggcaggatcaaatcagcacataccaatattatccttgaaaatgaacgggctaaatgccccactgaaaaggcacagggtggcaagatagataaagaaataagattcaactatatgctgtcttcaagagacccatctcacatgcagtgacatccatagactcaaagtaaatggatagataaaaagctaccaagcaaatggaaaacaaaaacagtgggagttgctattctaatttaagacaaaacagactttaaaccaacaatgatcaaaaaagacaaagaaggccattacataataataaaggttcagtgcaacaaaagatttccctatcctaaacatacatgcacccaacactggagcatccagattcataaaacaagtttttagagacctacaaagagttgtagataacaacacaataatagtgagaggctttaacaccccactgacagtattagacagatcatcaaggcaggaaactaacaaagatattcaagacttaaattcaacacttggccaaatggactcaacagatatctacagaacagtccacccaacaacaacaaaatatacattcttctcatctgtaacatagcacatactctagattaaccacacacttggcaataaacaattcttagtatattcaagaaaaatgaaattataccaaccacactctcagaccacagcataataaaattttaataactaataaaagcaaagatacaacataacagaatctgtaggacacagctaaagcagtgttaagagtaaagtttatagcactaaaatcccacatcaaaaagttagaaaggtctcaaattaacaacatcacacctggaggaactaaaaaaataagagcaaaccaaccccaaagctaacagaagaaaagaaataaccaaattcagagctgaaccgaatgaagttgagatgtgaaaaaacattcaaaacatcaacgaaacctaaagttgggtctttgagagaatacataagattgatagcctgctatctagactaataaagaataaaagagagaagacggaaataaacacaaactgaaatgataaaggagacattaccaacaaccccaaagaaatacagaaatcctgagacacctctatgcacacaaactagaaaaccttaaaaatacctctgtgcacacaaactagaaaacttagaagaaatcataaattcctggaaacataacatctcccaagattgagccaggaagaaattgaatccctgaacagaccaaaaatgagttctgaaattgaatctgtaatgaaaagcctaccaaccagaaaaagcatgggaccagaaggattcacagacaaattccgccagatgtataaagaagagctggtttcattcctattgaaactattccaaaaatttgaagaggaggaactccttcctaactcattctatgaagcctgaattattcttataccaacacctggcagagatacaataaaaaaggagaaaactttaggccaatatccttgacgaacatagatgtaaaagtcctcaacaaaatgctagaaaactgaatccagcagcacatcaaaaagctaattcatcgcaatcaagtaagctttatccctaggatgcaaggtgagttcagcatatgcaaatcaataaatgtattttattagagattttatctctgatttctttcagagacaaagaaatcagagacaacacaaacaaatggaaaaacattccatgctcatagataggaagaatcgacattattaaaatgaccatagtgctcaaagcaatttacagattctagctattcctatcaaagtatcaacattatttacagaattagaaaaaaacctattttaaaattcatgtggaaccaaaaaaatggcctgaatagccaaagcaatcctaagcaaaaagaacgaagctagaggcatcacactacctgactttaaactatactacaaggcaacagctaccaaaacagtacagtactggtacaaaaacagggatatagaccaatggaacaggttagagaacctagaaataaagccacacacctacaaccatttgatctctgacaaagtcaacaaaaacaagcaacaaagaaagggctccctattcgataaatgatgctgcaatagctggctagtcatatgcagaagattcaaactgaatcccttcttttcatcatatacaaaaattaactcaagattgattaaagacttaaatataaaacctaaaactataaaaactctagacgaaaacctaggaaatgccattttggacataggctctggcaaagattttatgacaatgattccaaaagcaattgcaacaaaaacaaaaattgacaaatgagacccaattaaactaaagagcttctgcacatcaaaagaaagtatcagagtaaacaacctacagagtaggagaaaatatttgcaaactacacctctgacagtggtctaatatccagaatctataagtaacttaacaagcaaaaaaaaaatctcattaaataatgggtaaaggacatgagcagacacttctctaaagaagacatacatgcagacaaaaagcatatgaaaaaatgctcagcaccacctctcattagagaaatgtaaatgaaaaccacaatgagataccatattataccagtcaaaatggctgttattaaaaagtagatgctggtaaggttgtgaagaaaggaatgcttatccactgctggtgggggtgtaaattagctcagccactgtggaaagcagtttggagatttctcaaataatttaaaacagagctaccattcgacccagcaatactgggtatacacccaaaggaatataaaatgttctaccgtaaagacacatgtacacatattttcatcacagcactgttcacaatataaagatgtggaaacagcctaaatgcccatcagtggtggactgagtaaagaaaatgtggtacatagacaccatggaatactatgtagccataagaaaaagaatgagaccatgtgctttgcaacaacatggatggagctggaggccattgtcctaaatgaattaacacagacacagaaaaccaaataccatatgttctcatttgtaagtggtagctaaacattcagtacatgtgaacacaagggaacaagagacactagggcctacttgagagtggaaggtgggaggagggtgaggatcgaaaagctacctatcaggcactaggcttattacatgggtgatgaaataatctttacaacaaacccctgtgacatgcaattttcccatgtaataaacctgcacttgtactccctgaatgtaaaataaaagttggaaagaaaaatatatgtgtatatgtaaaacatatctttctccatgtctgagttctgagccaattgagggatagccaaagaacccatttcatatggagttctaaaaattttgagaattaaagttgtttgtactgtctaggctccctatttgtgcttgcttagttcaaagtcttaaagaagttggtcatgatcctaagatgtactccatgtttgcacatactagtcaaagctgggattaatactcccagctttgggcccatgtctgaaaaaatccaactataatttcatctagagccttggttttcccaagtagatttttggtccccaggtgccacttgaatattttctccagttttcccagcccatgtaccctgtgttgaagaatagaggcattctaagcacttatttctaaaagacaaggaggaaaatgaagctcttaaagatatgctgtaaaacagccacagagttcacaacaccttatatcataggtgttcatgactcctaaaagtctgtaagcccaagaagacaagaccatatctttttcttagttaatcatgatggaagtattgtgcagatttttaaactagctttattgtggtttaattgacatacaataagttgtatatatttgaagtatatagcttgataagttttgatatgtgtataccaataaactcatgacgacaatcagataatgaacatatccatcaccctcataaggcttacttttgtcccttgtaatctctccatcttgctcctcctttcatccatccccagcccccatcctgtccccaggcaatccctgattagtcactgtacattactttgcatcgtgtagaattttatataaatgaaatcatactgttacatatatgacttttgtctgatttcttttactcagcataattattctgtgattcttctgtgttgtggtgggaaaaatcatttatttctttttgttgtggaataatattttattgtatggatatagcacagtttatttatatattcccaagttgatgggcacttattttgtttccagtttctgtgtatcacaaataaagctcttatgaacattcatggacaagtgtttgtataagcattttagttttgagtatatacctaggcgtggagtggctggattgtgtgagaagaatatatttaattatttaagaaactgccaaaatgtgctattttacatttctagcagcagtgtatgagagtatcagttactccataaccaagccagcacttcgtatagtcaggtttttacactttagccattgtaataggtaggcagggatttctcattgtggttttaatttacatttctctaatgattcacataaaaagatgttgaccatcttttcatgagtttatttgatctgacacttctttggtaaagggtcagttcaaatcttggtccattttaaaattattttcttattgagttttgagggttctttgtttactctggatataagtccttatcaaatatatgatttacacatgttttctcctagcctgtggcttgccttttcttcttgtaacatatcttttgaagtgctgtaatttttaattccgacgaagctttatttattaaatttgttgttttatggatcacgcttttgatgttgtgtctaggaaatctttgccaaatgtaaggtcacaagggttttcttcagtttttgcttctagaagttatctagctttaggcctatgatccattttgaattcattttttttaatattgtatgaagtttattttttgtagtatattaataaccatcaccctttgttgaaaagagtgtcttctctctattgaattgcctttgcaccttgttgaaaatcatttgctcgtatatattgggtctgtttctggactctcagctctgactcacctacttaggggcttgctgcatcctgccagtgttccccctgtctgcatcgtggtctgaaaaccctcttaaagcaataagctgaaatagttatgatattcactgtgtttgttttccttctcttagggatctatattctttgttgcctgatgtcaagtttcttgaaaaccatgatttcttatactttgtccatttgtttgtgttttgaggaaggagggtaaatctgtcttggctgggaacagaagtgtcccctattttcttagtgcaaagattgtggaatgaaaaaaatgggaacaaaaacgccagctagtaaatttttatataagtctaggcaagaaattatgacaatagtgatgtaggactgcagaaaaacttaatgattcaacaagtgcttgggaggttaatcgatagaatctgatgacagattagttgtggggagtcaaagagtagaaaactacaatgatacacaagtttctggctgagcaaaactggacatatagtggtggtgttaacatgtataagaaggtgcagattgggaggaaatagttgttgagtctttcttggacatgctgagttttaggtgtctagggtatttaattatagagctctaatgctaagaggaatgtccggggtagagttacagatttaggagtcaacaacacacaggtggctcttagaaccatgaggatgaatactgtgtcccaagctgaacaacaggacaagtgaaaagataacaggaatactacagctggaatcttatggaacagacacatcgaaggcccttagtctagctcaactcagacgcacctcgttctagctcatagtgttagagagatagcaaaataatatggagaattatgttcctgaagttagggaagggcacactttcaagagaaaagtagtgttaggtgttaaatgcagtagaaaaatcaaaggcagtgaggaaaaacatctgttggatttggtaattggggggttttattaactttgaagagtggttttaggatggtaattgagtcattttgaggttattttatttattcataatattaacacacatgtgtttcattaactagcttaaccctaaataacagatttgagttcaggtcttccattaaacagtatagatgagaggccaggtatagagagagttagcatcataattttgccaaaaatgtcttaggtccactatgattataaaagaaaatgtgggccaaatatgatgttttggaaaaaacaatcattctaaactaggtacagggctacaagatcagagttattaaattaggcttagctcaaattttgtctgtacaaacctaaagggtatcattcaaagagtctatataagtggtatgccctagggttgtacactatataaccatatgcagcctacctagcttagctgataccacctggtgcttctttaagtgatagatatacctcatcatttagccctgcaaagttaaagccccagcagcaggcttgtctttctgactactgtaattcatagagacttagcttagtaatggagcacattttcagaaaatgagttttaatatttttaatcctatactctaattcaatttttgatcactttgaatttataaacaacaaattgaatttataaacaacacatcagaaaaagtgaagaggatattaattaactagtgctttaaattataagagcccaagataacactagtaactatgtcagctgcgctaatgttttgaggaataacaaactgccattgctgtttgggaacttttatgagatacctaatgaagcagtataacttgaaaggcaatagatttattaaaggatcagtgacaaagaaaatagaattgggtctattttgctattatgagaattgctcctgatgcctgaaaacagttatatttacccattatatttttctctttttcttgagaattctactctaaaattaaaatttgtaactctcctagtgtctgtataagtcaaactgctgttagcaatgtttttaattcaagtcactctattttggagtagtaaaaaataatttaaatttctattgggctacaggtaatcctcgagcccttgcaaacaaaaaacaaagccttttctaagttggcatataaagtatttttcaagggaaaatatttcttagctatatagtagtatttgagaaattaacaattttgataatcaacattctccataattttaaaatttattttaggaggttaaatcccatgaattttgcttaaaaatacccatccccccaatgaaaacatactaagaagtcaaaatgtacagaacgtagtatttaagtactttctgttcctgtaaacaagacaaaacgaacatggtctcttggaggtccaggactgtgagactcagaataaagaggagacagaagtgttcatgtagaagttggcagtggtcgtttgtgactagtctaaaactgaaaatcccagaaaacaaacgaaaaacaacaaatgggttttaaagtcatatggaattgtaaagtcactaattgcttttttggtgattgttttgaccaaaattaagtgaacgattacatcttctctgtgtactagacccttgatgagtccctgaggggctcaggagacagaagtgaattgtggttgtagtggcaaaatagctgacagagctgccatagtaacaaggagccttaggagcagactctccaggggagaaaacagtcctgcagaagtggctttcctgaaactttacctaaagagaggggagtggatgcgtggtttctcatgttcttcaaacagagctttatgttgaggctgctgtaaagataacagctacaacacatttttaattgttgcatttcaattatgtaacacaaaattgaagtgatcttcaacactgcgaactgaaggtggtatttcatattggaaagtctatttattatactttatatgcttgctaatgctctctctcttttctcattttgcttcgttcctttggctcagtagaattgatggtatcaactaaaactttaaatgtaagtgagtctttatgggctgaaggggtccttggatggatggaaaaggatttagtcctgttattctttgttgtttttattttatttgctatgaagtttatttcctttaccagaaggggcttaattgcattcagtctgagtgtttacataaatgaagttggtgggtttgatacagtacagttcctcttttaagaacatctgtgaaagtaggaatctgcttattaaaatggtaaacctgtgaactgattttattgttatgttctccaatttagctgaaatggtatatgttaatggcttctacacatatatgaaatggcaaatcattatgccctctaccaactagccaggtttttaatttgcaaggattgaaaataatatttagtgggcattgctgagagaagatgaattaaacttcttatactggcacacgtgatttctctgggatttaactagtccagactgttcagtctgtcatttggtttttcagcccctgaatcctgcaatgggtttgcatttaattaggctttaggagaccttgaatggaaagcatgactttctcactttttggtcacgactagtatttgcataaaacttcattttatgcaacaaatcactgtgccaattttaagatcctaaagaaacttgaaactgctgaaaaaaataggctttgtttaaatgttttcattttctactccctcatgtttttttacttcaaaatattatccaagctttagtgtatatatagttgtatacatagatgagttcaccaaaaaaaagttataccaaagacattccataatccatcaatctctttctttaaaactaatagcagtgacaacatgtaacataaatatatatcttcagaatcctttcattgttcttctggcactttactaagccttagagaggttattaacttgcccacattggtgtaagcaataagcattatagcctatttctcttttcagggcacatgcttttaatcattggccattattccaactgaaaaatctttaattcttgattaaagcaaattcccatggtactctctaaaaggtgatatttttgtaaatcctcaaactggcctctgagtgtatttgaagagaggaattttcattcatttataaatacttcgctatttagactattaccactgactggccttctctcaaactttagaggactaaatgtactttaaacaaacatttctacaaatggagtgaagtctataatggtttcttttgctgctcacagatgttgatgaatgcacatcaaatccctgcactaatggagattgtgttaacacacctggttcctattattgtaaatgtcatgctggattccagaggactcctaccaagcaagcatgcattggtaaggcagtttgctttcacatatgaaaatgttccatgaaatatagtgaccaaggctgttgaggttaaaagtaaatttattaaaacatggaataaaataagtgttacattattacagatttatttgtaataccctcagagattctcctttaaacataaacaatgtttgcatatataacccaggcaacatggtatctgttttcacaaaaattcagtttatcttccttccttagatcagagcttcctttctccagataacatcagtaaccttctctgattaactgagtttaagatttatagtcattttaaactactgttttctttgaatcccacacatagtccaacaccaagtcatgcctggtctttattcacagcttcagtgctacacccaccaccctggtccaaacgcgctacctcattgctgattcatctcagaattcttttagcagatgactgcctgtcttctttttcatttcctattcatccacaggtagttgcttgaatcaactttccagcagttttcattgtgttactcttaatctagaaattctgtagttactttacacttatccaacatcttgttctgacttttaaggccttcatccactatgtgaaaaacagctgcaaccagtaattccagctgtcttgcccaccctttcttaggtttactggataccctctttttttttttcctttcccacttcagctactataagagctgtaaaattgcttgcacctacctatccaaaaaaaaaaaaaaaaactgctgagagacagaaattttgctaaagaagtaacatgattttgaatatttaaaattccatttcttatcttactgtgtttatctataagtattgtaaaagaatgatgtttggccattctcaatcttcctagatattgatgagtgcatccagaatggggttctttgtaaaaacggtcgatgcgtgaacacagatggaagtttccagtgcatttgcaatgccggctttgaattaactacagatggaaaaaactgtgttggtatggaaattgcctgctcccttgcaaaagattttaaaaggatatacatttttatttagaaccatgtactatttccatgaaagctcacacaccacgtatgtgagatcttcaggtaacttaggtaaaatgcaaatgcatttaatataagactgttaaagcaaaaggacaggttttttgtttgttttttggtttttttttttggtggtggaggggaggagatgttataacagtgaataatttactgcttctaaaaatttcctgtgtgttacaagttaaattgtaagtcgcagttattcttcataagtttaaacaattactgaccgctactgtatttcaggtgttggggttacaacactgacaaaatagaaaaggtcttcccttcctccacaaactggaggaatataaaaatgtttgacatatgcagtacacaaatctctaaaactgtggcttgtgatatctagcagtgcaatggataccaacacaccacagaaatattgtttacaaagtaacacatcatattcatctactaatgaaagtccagatcatttcatttgcagtgaggtctgccattgccttattttcttataaaataaacactcattgaaattatattatctttttggtacacaaagtaacactactcatggtttatgtggttttaacaggagctaagcacaaaatttgattattttcctttatatccatatactgaaggtcctttccactctccgcactattttttctcattcagttggcgttctttttttaaaaaaaactaaaagccatgagcacatggctcatttaggtagtggaatttgactgggggttgtttatggaagaagaaggaattggttccctcaaggccagtgttcaaagtcactcaatcctcttctgcagatcatgatgaatgtacaactaccaacatgtgtttgaatggaatgtgcatcaatgaagatggcagcttcaagtgcatctgcaaaccaggatttgtcttggctccaaatgggcgttactgtactggtatgtgtggctttcagataggaaagtgaccatgattgaaaccaccttttttatttgaatgaaccatggaagaattacttcagcttccccatgtggctttcatattattcacatttcttgctaattcactaaggcaggtgtctaaagctttctagaaaaacacacattgtggtctagggaacagtcatatcttaacaaaaataataatggtataggaaaaattaaggaactgacagattggttttagcaagtcttgtggaaaacaacgtagaaataatttctctcaactgcttggctgaataaaaaagaagaagaaaaaatcttgaaaggtttttgttttttatgcattctcagaactagattttccactgtcattcattatgggtttagcattacatcttttccataaagctaatatacagaccatttgtaactgtgtcattatctaaaaaccttacattgatttagtgaagacataattttaatatttcaattaattattttgtttacaaagccattttgaagaccaagctctaatgataaccttaataagctaaagttatacctcttggaaataaatgagaccttattatgtttgtactcacaattggaatttaataaagtggaataatacattttgcagcttctacttagaagcacatttttccttttcttttttaaatttatttatttttgagataggtttttgctctgtcacctaggctggagtgtagtggcacaatctcagctcactgcacccttgactcctgggctcaagcatcctcccacatcagcctcccaagtagctgggagtacatgcatgtgcccccatgcccagctaattttgttttattttttgtggaaatgaggtctcactatgttgctcaggctggtctcaaactcatgggctcaagcaatcctcctgcctcagcctcccaaagttctgggattacaggcatgagccatcgcacctggccaaatttttgtttttctttgtttccttccttaagacaaaattaactccatcaatgatgttctgccttcaattgcacaaacttaatctaagtaccagataaggatcatgctcaattcttataatttcaatgaattacaatgaaattctagggacagtagagattaaaaaattgagactgaattcttatgtttctgagtaagaaacaaatttttgactctccaagaaggaggagtactgtagttttgctggttgaactcatgactgggatgtcatctcagggttagctgatttagatttaacacaggataggaaattgtcattatgcttcagtgtgtagaattatgttacagtatgtgactttatttcagcctttttaaagaaacttcaatatacatctaaagatgacttcgacctcaccagtttctgctttctggaaattagttcttattaattatttaattacaaatgttgtgaagattttaagtattcctgagtcggcagctctgtgtttgaagtctctttcatcttttggggaagtcatttaatgctgggttacgtttgataaattcaagtggattgaaaattagaagacatacctcaagttattttgttattatcaaatgaccaaatgaatatcagcatagcatctacttctagttaaagtgtctttgtgtgaaaaaaattacagaaatttaccttaatttttaaagaatttgttttacttaactaatttgaattatttagcgttaaatgggattgtcaaataaataatgaaaaagaagattgtgaggcttttttttcctcagtaggtaaagtaaagcattctgaaatgtgttgaaaggattgcatttgtatatgatacctgttaccacacttatttgttcttcacaaattataaagttataaacaaaaggttagtagtatagagcagtggctgcaagtaaaccctgtaataacgttaaatttacccagtaactgcttggcttctgtcacccactgcacagatgttgatgaatgccagaccccaggaatctgcatgaatgggcactgcatcaacagtgaagggtccttccgctgtgactgtcccccaggcctggctgtgggcatggatggacgtgtgtgtgttggtaagtgaaacattttataatggccccactgtgcaaaatgatctttgaaaaactgacagagatatttctatacagtggagtaatattcaccataagaagagtacatgctaaaacatggataaaccttggaaagattatgctaagtgaaagaagccagtcacaaaacaccatacagtgtatgattccatccatatgaaatctccagaatcggcaagtccgttgtgacaaagtagattcgtgttaggacagagaggatgggggtggtgggagaatggggtgggagctaaaagatatttttgaggtgattaaaatgttctaaaatcatctgtagtgatggatgaacacatctgtaaatatgctaaaaactataaaattgtacactttaaagtgatggattctatggtatgtaaattgtatattaacaaagctattttttaatggacaggaacccccagatagcccccttcagaacctacagaaggctctgatgacatgctggagaagaaaaaatatatttttaaactagcatacttgataatattagataactgaatcctaaacacagtgcatttcagttttataattaataacaaataagatatgtaatggggattatagttataggtaagtaaacttggtttcaccctaacaaaacttaaaatataaatattggacttgcatcaaaagctcaaaatgttactcctcatcaccatgcaactagctgcagaagcaagagtataaagaagtatgagcaagaatatatattttattctaagccattcagattcctctaggttatttttgtcaaattgatcccatgaaaatcaatcagaagtaccaggcccagctttgaagaggcaggcaaaacagaagcgtcactggcgtttgggaaccccagcaatatattccagtgataaggatagcagaatgagtggtaaaaatacatttaatgcagttttctctccaaaaatgttttcatgaggcttctagggtgaattagccattgtataccctctatttttcatgttgtacagtaaaacacagaaataggatttcaaagtatatttgagagataccatattcttagacatagttaatactttactcctacctatgagaatcaaaacatatggatcccaaaggtggaggagaagaagtagagaatttgcagatggaaataatctgttcactcaaatttatccactctatccagtcaaagatttatttcaccctacaaagttgtcagcactttgttcagggatatttcaaatacagcagctagaagaatataacttcttcctgcttacagagctaaaatattttcagttgctttaatatatttacttgcttttttcctttacctaaatgattctgttgaaatctaccatgagcacaaagccagttttggagggagaaattatttttctcttaagtaaccaacatgcgagttgttgctaggaattcagtaaaacataaaatttcattatcttgttcacaatccaggaaacacattggaaattttcagaaagcctccttcagtttttcatcattgtggtcatttaaactttttaaaataaaaacattatttctcatgtgtataaaattatatattactgtttctataacatgctagatgttttcttcatgtcttttgacttgatgtcactttttagacccattgattctttaagtttgagatgaggcctggcgcagtggctcatgcctgtaatcccaacactttgggattccatgttgggcggatcactggagcccaggagttcaagaccagtctggccatcatggtaaaaccctatctctgcaaaaagtacaaaaattagccaagtgtagtggtgcatgcctataatcccagcactttgggattccgagtagggcagattgcttgagctcaggagttcaaaaccagtctgggctccatggtgaaatcctgtgtctgcaaaaaatacaaaaattagccaggcatggtggcatgtgcctataattccagctacttgggaggctgaggcaggaggattgcctgagccctggaggtggaggttacagtgagctatgattgcaccactgcactccagcctaggtgacagagtgagaccctgtctcaaaaaaaatagaaaaaataaatgaatcactgttatgaaaaactattaggataagcattttaattttagatctattttttgtttgttcatttttcttctgtagatattaagatgtgtttttgttttttgttttagtctcaggtaattaagctatgattttaagtagtatattgaaatacaactcacaagcaaggttgtaaacaaaaggcaatcatatctttatctttcccattcattcaaaatttatttttaagtttattcagtgatgcagtttagtaagtaaggaagaaaagtcaggcaacatgataactactgaatattcttaagtgacaaaaaattataagatgacagcaagatacaggacctctctgttcctcctttcctcttttgttgttttgagaattaaataaagctttgaatggtgtctagcacatagcaaatgcgcaataagttaactactactgatattattgttattaaattagaatagtggtatcatatctaggtcatagtcttaagagttgctgctttaagttataaataaaagttgattttaaagaaagaagaataaaataaagttagcattttgcatacatacatattttactcatggtatgtagaatctgctaattacctgaagaaatttttaaatcttttcattttttaagaaagaaaaggggacaggcatggtggctcacacctgtaatcccaacactttgggaggccaaggcaggtggatcacctgaagtcagcagtttgagaccagcctggtcaacatggttaaaccccatctctactaaaaatacaaaattagccggttgtagtggtgtgcacctgtaatcccagctactcaggaggctgaggcaggagaatcacttgaacccaggagctggaggttgtagtgagtcaagatcatgccacgccattgcactccagcctgggcgacagagcgagactccatctcaaaaaaaaacagaaggaaggaaggaaggaaggaaggatggagggagggagggagggaagaaaggaaggaaaggaaggaaggaaggaaggagaaaaagagaaagaaaagaaagaaaaagagagagaaagaaggagagaaaaggcatgcagaagtctgctaacatatggaaaagatgcatttaggtccagtctgtcaccagatcattcatgtgagcatattctcatggtgctaccggtattgttccttttatcctatcctgtatacagtggttctgttatatttgaatagtataatatgagctaggttgccaatttggggtctttgaacaggaaaaggtcagtagggaaatagtgagttatctcaactgatagttcacagtatcagttacagatagaactccttgttctacttttcctcccttctcactgctgcactttactagtcttagaaaaaaaaatagaagagggaaataaggtggtcaccattttttttagtatttcaggtgtgtcctaggcagtgtgcttagtgcttaacaaatatactttcatttactatacaaactgtatccttatttaatgaataaggaagatgttaagtaatttatgtaagatcatcttgtggggatctgaactttgggaagtttatgtccgtaaaacctacacataagttatgctactttctttttcatgaaacttctggtgttgggtactctaaagagattggttcacctgtaatgcaaactaccatataacatgtctcactcttccagtgagctccataggccttttatctgcttgcttttaaaaattctgcatggcatatgctctaaacccaaaagcagaaataactttggctgttcatagatgccttccaagatcatcagtaatgtccaaagaactcacaaaaatcatattggaaatgatgaaccatgttatatttgtgcaaatttgccttcaagtcaaatctgtgtttgtgtaactcagaagatacactgccaaactcagccacagcagaggcagcacaagtttctctgagttgactcctcagggatggggttggtgaattccatggcctccttccatttaagcacacacgtatctcatttttaatgcagccataaatcactgttttaatcagaaatgcccccaggtcataagaaattattggatggccattttgcataacaagcagatgaaattttttccaacaagttgtgaatagttacagatatttataatagaggttatctctggaggtatactggagtataccaggtcagtatactgcttaaaaattgcatgggttctctgccctttatgatctgagttttttatagttcaccatttactgtcttataaagttgtagggtattttatgagaattaagagtgagagaactaagcagaatatgcttctttggggtatagcattacttactagaaagaggaagagttttagaagtcacataaaccttgtctgaaccccaactcaggcactggatattcaaggacttcaaactacataggtagctgtgaacctcatcttcctcatctataaaatgcacgtaatgaccactcctatagagctgttgacctgactgttcaatgagataatgtctgtaaagcaacgagcacaatgccaagagcacatatggtagttaactatttttataactggatttactgagtttctgaggttaaaacagtcacaagcagtatcctgggggttgaaaagaaaggcctcctaactcggaaagtgggagtaagaaatctcacgcccaagccagtatcacctcaaggtagtttaacttgattgcacttcattgttcatgagaacttccaaaattgaaataagaagtgtcattttgaatatagcatagccagtgattagagctccaagtattctttataactgtggaaatatcctaggtttcacaaaaggtttgtaagaatacatcggacaatggatactgtgtagctcataaaacttattaaagaaaacagagtcggtgatatgcatccattcttttcctcactcagaaaacatttgttgatttcctaacactattagatgctaaagatgcaaaataaaagtctcagatgcccttgaaaagcttccagtctagtggccacttaggttaaaagaagccttctgtttcgaaatctctttgtctctatcactgcctcaagtcattgtttttgtatctcctttagatactcacatgcgcagtacctgctatggaggaatcaagaaaggagtgtgtgtgcgtcctttccccggtgcagtgaccaagtccgaatgctgctgtgccaatccagactatggttttggagaaccctgccagccatgccctgcaaaaaattcaggtagtcacatgtgccattttcacagttgataaagaatcaagaaatacaaccttagatgtttggccaaagagaacatcagctcttaagtgtttcatcattaattttaactgaagaagagaaatccaatcctgtattgatatgtgaggcatataataaggagatttggcttgtgtttatatacgatttctaggccaacagaacacacagtgaataaaaaaatctatttgctggctgattgtggtggctcacacctgtaatcccagcactttgggaggctcaggcaggaggatcacttgaagccagggtgagaccctgtcttggtaaaaaaaaaaaaaaaatcttaattagctgggtgtggtggcacacacctgtagtcccagctactaggggggctgaggtgcaagggatcacttgagcccaagggttcgaggctgcagtgagccatcactgtgccactccactccagcctgagtaacagagcgagatgctgactctttaaaaaacaatcaaaaatctattttcttatacagttatgattattataagagggtttttttacatgaacatgatagcctcagtttccttgatctgtgctgtcatggtgaagacaaatagcataaaatttacttaccactttcaaggttataaacacaacaagaactcaatttgattatatatatatgtatatatatgtgtatatatatgtatatatatgtatatatatgtgtatatatatgtatatatgtatatatatatatatacacacacacacacatatatatgaagatctctctctatatatatatcttgacaccaagtggtctcaagtcacagtctcaggcaatagttccaaactcttaggtcaataacattgactcttgtctgttcatagtttaactaaacctgtattgaatatatattgaatatacgtaagtacagtagggattctaacataaacacaatctgtgtttttccttaaagttaacagtagttgagaatacaggcaggcaaatgtataaattacaatttagtgtgattagtgccttaaaaggttcaagtatggagagagcacagaggaaggagcaatttgtagcccagggaagctgggaaggacctcaaagaaggggcacgtttagtttggtcttgaaaaaaatgagtaagaactttccatatggaggatacaggaaagcattcctgtaaaggaaatgtcttgttattcccttaaaaatcctgaatggagtcttcaaacgtggaaataatgatttgaagcatccagaagaattactgagtgtgactttttttaaaaaaaaaagaaaaataatgaggagaacgtagttctaaaatgtaccaaactgaattatgcatattatcaaataagttcaaaaattggcataagactagacaaaaacctaagtgaactaataaaatgaatctagaaacctgaatatgaataggaattaggatataacaaagcattttggagcagcaaggaaaaagattaaataataattattgttgataactttcagaaaaaaatatgaagttaggtccctacactaaacattaaaacataattttcatatagaatataaattcttttttattttgtaatggtaaaagactttcaaagcaggcctaaatagtaaaatacacaagtaatctggaaaaatatttttatttatcatttcttaatctttatggaatttacattaatcaataaggagagttgaaatcctctatagaaaaaacagcagtgtacataaacaggatttcagaaagtagaaatgcaaatggaagaataccatgtaaaaagatgcccactctccgtataattaaaaataaggtgccatttttgtttagcagattggtataaacgattgattcttcccggtgataatgagggtattaaaaaaatgaatactgtcttataccgctgatggaggggtaatttgggggcgttttaggaggggaagaactatctaaaaccttaaaaggggcataaactttgagagttttacttgtaagagactatcctagtgatataattaaacttcatattatttatgatagttgctaaaagttggacaaacctaatttcaccagtaagagattgactgaataaatgtgatacctctatgtaactgagaaaacaatattaaatggcctattaaatgggacattgacatgacatgcctgtgatagagtacccaggagccaagtcggcttctccacttacaacctctgtgactttggtcaagttactgcacttctctgtttcccccttttcctcagttgtaaaaaggaaaatacaatagtatttagtttgtggtattgggaagattaactaaattgatagatgaaaaatgtagaacaataccaggcacttggtaagtactataacctatattttggctgttattattttattagtgaggaaaaaaagttaaatatcaagctctttaagaccatttatatttttcttaaagtttccttatgtagaaaatattagtaacatttatatgtattaataatattcaggatgatgattacaagtgatttttactcttttatgcttatttataagttcagaattttataataattgtttgctagaaaatggtaatttttttcactttaaaaactaatgcacaaataattcttcctaatggtagttttggagttatgaaatgacttgtatatggaataggtatagttaagtttttaattcttctatttctttttgtcatacagctgaattccacggcctttgtagtagtggagtaggtatcactgtggatggaagaggtaactctagttaatctcaactttataataatcacgtgacataatcgtatagctttataattctaatattaatatgagtatatttaatatgaaaatgtagtattataaaataataagattaattatctcctagagcagtggttataagctagatgatattaagtgatatgtagatacacattttcatcttggataaatatttatctgttaaatatgcattgttaaaaatgtcactaacaaactactctcctgatttcaggcagtcattgcttaagaaaagaataatgtgacatttaagttaaaaaaagaagaataagtcaattttatgataaaacattaagtaatggtgcagatagggttagaaaaataaacagtattaaagagatatttgatatggatcaagtttgggatatactggctgaaataatttgttaagactatttacacctaagaataataaaacatttctctccaagtaaagaagtaagattcactaaaatttttcttgctttcaattttgtattatggttaacaaaattccaatatagaatcttgaacatttaagtacatatgtgtttgtaattttcagattcttttatattttaatatacatatagattcatttatacataaataaaacttgggtgttattaatcttcactatatatatgaatatgtatatatgaagagtatatataaatatatatacggttatatatatatatttatgtatattcttctacccttgtgtttgagaaagctttagtcaaattatagatggtaggcagtaatgttgaatctttataataaatatccaaaccagagtgaaaagtaaacttttaaaaggatgtttttcccaagtataaaatgaaagacatttccaaaatatttaaggtctcccaaattattgaaaacaatagcatcaaaatttgagcatagtgaccaaaatttgactttgggcttactctttcattatattccctgtcagtacagcctttccagcagagccagcctctattggaaactacttgatcattcatacaagcacatcagtgcacaagttccactgcccctcggtgatatagtagtagtagtcatgttcacggctcgttataaaacgtcatgttctgaagcatccatgtttaaagtgtcctctccagtaatttcaagtatcagcaatgagaaacacttattaaatattagtaactggacctcaaaaatgtaataaaatagaaatatcctgtacctttggggaccataaaattatatgggccaccctaataaatctgtcttttagttagatgattacaatatctatcaactcgagttttcctttggatttggagccaacagcctataaattgtctttattaatttcatcataaatgctggcatatttcgtgatttaactctttgaatttctgccagcgtctttcatttttcttttgatttaccagtgaagtgtcctatatctttcagttttattttcttactccttgttttcagttctttttcctttctgaaaggcaggcaaattgtgagtttgcagagttaaacacttcatatgttgaatggtctttactagacctgcatttatcaacaaacaataacatgtttgttgatagcactaaactttcaatatttaatgcagatatcaatgaatgtgctttggatcctgatatatgtgccaatgggatttgtgaaaacttacgtggtagttaccgttgtaattgcaacagtggctatgaaccagatgcctctggaagaaactgtattggtaagttatttgttatatttatgcaagaacatttcatatagtttaatcccatggattatattagaattaaaaacacaaatgactaaaactaaaaattgtacagtttttcttgttttcttcatattacacattgacaggaaaatatcagaatcaaacaaattttgttacacagtaacagacttcttggtggtaccaattcgtttttaaaatattattttccggaattaacatcctcaattatttgcctattgttttcctgcatataccttaatcctgtaattttttacgaagaatttgatttcaaaaattaacaggtcagtatggataaaagtaagtcaagaaaataaagtgttacaggttgagagaattttaacttcataaagaaacaaccagttgccacaatatacctaaacatgacaactaagacaaaggtatttccttttttaattataagagaatgattgaaaaaactgaagtatgtaatttatgtttaacaaatgcaagaggaggaggatgaaaaggtttgacagtcttatttcctattagtgcaagattttcccataaagcacttgagtggacttttataaaataaatgttattcaatccatcattgtgcatgatagttttacaactaatcacttatggcttttacaaccaagtgttaatgattatgattagaaaaggaacagatttttctgtgtttctggtagtggcttttactattgaacatattcgtttgatttggagttgaagacatacatacagatggatgtaaaagctatatttatattacgtgctataatagattttgataactacagggaagagtaccaggcaaagattattgaacatttctaacaacatgcaaaccatgctagtttttattctccagaagtgaaatccagatttcccctttttacatggacaccggtcatgttgactcacaacctaccctaacaacctcattataacttgattacttctataaaaatcctatttccaaataaagtcacattctgagatactgggttttaagatttcaacatatcttttttaagggacacaattcaatccatagcttagaaaaatgggttaaaaaattgtgatgcaagctggatgcagtggctcactcctgtaatcctagtactttgggaggctgaggtgggtggatcacctgaggttaggagtttgagaccagcctggccaacatggtgaaacccccctctactaaaaaatacaaaaattagctgggcatggtggcacgtgcctgtaatcccagcacccaggaggctgaagcaggagaatcgctggaacccgggatgcggaggctgcagtgagcggagacctcgccactgcactccagccgtggtgacagaccgagactccatctcagaaaaaagaaaagagaaaaggaagggaagggagggaaggggagtggagaaagaaagagagaaagaaaattgtgatgcagtcacaatttgtacacatattacactattatgggaaaagctatggtagtctagtccttaaaatataatgttaatttttaaagtatcaagattaagagttggagcaaaaacaagatcaagaaaggaaagggtcagataatacacaaaagaatattatcagtgatgatggaattgcagatgtttttctgatctgttttcaaaatctccacagtatcagtatattatttaataagggaaaattgttatttgcaatactagaaatgtaactttaagtgaaagagctcttcactctaaactacagggtttatttctttttgtcactaactacacttgcaaaaatggaagaatatgaagattaaaatgtgaggccaggtgcggtagcttatgcctataatcccagcactttgggagaccaagctgcgagaatcacctgaggccagaagttccagaacagcctgggcaacatagtgagatcccatctctaaaaaaaattgttttaagttggccaggcgtggtggcacatgcctgtattcttagctacttttggaaggctgtggcaggaggattgcttgagccaagaagttcaaagcttcagtgagctgtgatcgcaccagtgcactataaccagggcaacagagtgagatcctgtctcaaaaacaaacaaaaaactcattgtgggctttttaaactggagttttagatgatattctctaggctgttctggactgctaaaagagtatgcaaaatacatcattttcattaataactgtttctgagataaaaacatagtgggaaaagattaatgaatgtcttttaactgctgtttaatgcattttttaaccatctgggacatgaagacataaggcattctttttaaaaattttaatcataaaaaatgccttctgttacttttattatacataagcaagtatacaggcaaatgaatttaaccttttgatatcttttatgaatgctttaaaaatatatctaacataatatcattacaggactaaaagcaagtgaagtagagatgtgcctttccaagctagtgcatactttccagggatttaaaagcatcttaaaattagccactagcataagaatatcccatttgaataaaactaaatatattttgcttaggatgaagagtgcgctgtgatacagagactatgtcacagagaagaaagagggaaataaaacaaataacaaaattaaacattgctgcccactgtaatagatgcttaaatatgtgtatctcctatctttcaatcgttgctttcagacattgatgaatgtttagtaaacagactgctttgtgataacggattgtgccgaaacacgccaggaagttacagctgtacgtgcccaccagggtatgtgttcaggactgagacagagacctgtgaaggtaagagctgtcttcatcgccttatttgtgcatagtgagtacctggagttgtataaacatcaattacagtgatgaagcaatgtagtgaaaagaatattgtttgaatattttattttataatctcatttagctaatctgccagtttttgaaatagtaaggacctaatacagtttacaaacaccatcaattttgttccactcagacaaaatatcaacacacatttggaacaaacattttaaagcggataaaaaagaaaccaactggaaggagccatattgttttacttgctgaaatacaatgtcaaatatttgtttactgtgttttcctcttttcagaaccactatgatccattaatgtaggaacctgaatcgtaatggaaaagttaactcttaggcattttatttatgaaatgattgatatacccaagaagtcagcccacaaaatatttgagaactaagtaaaaatgataactttaataggtttttagtccaagagaattgtcctttccatttgataatttaaaagttgtcatttgagtttatagaccataactagtgtttaaaagcttctttgttttcttctaatcacatatttttgcagtggaagttacttaaatgagttaaatggttagagaagtcctcattttcagtgagatactggctgagcagtgagtacactgaattatgtttttgtatcttgatcaaagtactgtatatttcagaataatctgtggtatgaatactagtcattgttcctgtttaaatctcactgtgtgggcctacagaagggtcccataacattctcaaatccaattactactttgtaatagaaacttttaagaaaagatttcatctttgatgactgtggaatagccctttttttttatctgttaaagtatttggtttttttttttgtgatgccacagccaagaaaactgcagtagtaatagtatgcaaaaagatgtaacattctctcttcatcttactgtttaacttcaaagcattcttgtgaacagaaaccagttaggactatagaacaagatgccaaaacatgaatgactctgctgaagtcaatgaaatgcaattacaaagtgcagtgctaactttgaattgaatcagaggggccactaaaaaacagtaattagcctaaagaaaaaaaaaagaaaacttcagcataaaatcccctttttctaaacttacttctggtgacagtttcccctattgtccaacatcttttcaggaactcctcaaagaggagtgctcattccattcccactgaaagtacttgaagatttatcttttcagtaggtgagaaggggacacacttaagagtttgaaatatctttcaataggttatgagagtcctctttttaagccagctctggcttctcaaaggtattcaactacagagtctctattttctagatcctgctcccatctctaacaccaattcttcagaaatgctctgagaaatgtactttatgaaaaagtatcctagccatatttcctccatgatttccttggacagatggaagaagggatttcaaaggtttttgtttttcctgattttctacacttccttcccgtagtcttttttcagttttgtctgttgtctgttggaggataagcttccgttaaatctcaggaaacttagaaagcaagagcagggtaggacgtcatcttgatttaactaggaaactgatgatttttagaactggtttctctgtctaggaaaatactttctggtgctattgtgagagacacgtaatgcggaactaaatggatagtgtctggttctatttgctatgtacactgaattatcaatgattatttatagacaagtaacatagagtacaaaggttctgagagttgaaataccaaagaaggtaaaatcagagactcacctgcttacatgaacagttaagagtaggagctggtggtgtttaatagtgtaacatttggtgattatgtaaatattaaggcactttcataccaaatcaggcaacagtgagggttagaaacagtgatcttcacttattacaagcatacttaatctgagagatttatttaatgtaaaaacaattttatgtctgtcattcataggaaagaagttcatgttatgtaaataaagaagaaatgatagacaactcttttggctccagccttatgacattggaggaaataaaaatgatttatcatgggaaacctaaccaaataactgttatttctacactttcttcccactgttatttgcattttattaagagttttgcaaagaatagacttgaaggctactaatctctttttcccttgggtcgctttcttatttcctctgttgcattcaaacagtaagtgtttctgtctgaagcagttctcttcattctcttctttctgaattaatttccaaagactagacagggaattattagcagattcattgcaaatcttagctttttcttgtatatttgtcttgtgcactaattttgtttgtcaatcatgttttcagagtattttaaatatataacaaatagcactaataataaagagagtaaagttcttctatatttcagattgaagttacagaaactttattttactttttttgtttgagctatgagagtctgtgaaagttaaaatttttacagcaagcactgtggtttagattgtgtttccagtgacataactagttaaatgtaaaccagatgtgctttgaagtttatttccaggaatgtacagtgaactgtttcaattcctggttccatgacatttataacataacaacatattatttaaaggaaaactaaatagttgatatttgtagttgtcagcgcatatgtttatagtttctgaattcataattgcttaatttaaaatagaaattttaaaaacacacaatattgaaattcttcttttttcaggcttcttacaaatgaaattaataggagaattatatgtggtctgtccttagatttgttatctgcttcttttatggttagctagtttcttttttacattgtgtttttatgaaaaagtttctctactcggattgatgttttcattagaaatctgtgctatatttacaaaatctcttcttgtatttttaagaggttttctcagtataaacaatctgaaaagcaaaatacattcatatttcttcaaacaatttctatttcaagaattaaattagcacctggatattccgctgcgagccttgctctttcaggattagtttagtttaaagtcctctagttatttgtttatgtgctttcctcagtatagtaaagtgctttataataaattcaaagaaatatttagagaaagaaaaagtattcttgtgaacctagaaaccccagtgttcaatataaaatgccttgaggactattgacctctttcagataatttagtagagaaggaaaactgtgtgccacttctttaaagtgtaccactttaaaagtggttgaatttatactgaaaatgtctttgattttttttatagtactttacctgaagcttgtatttctttttcattaactcatgtgttaaactatttcacattacaggcttgacattttctgtaatcaccatttgagaacataggcatagtgcagttctgcttacttctgaccatcaacaggaattgtttagattatggtatatgatttcatttaggactcaaatcaaataaatggtagagtcccatttaaagcaattatttctacttgatcaagtatttctaatttttattttaccaaaattagttgtattaaaaaaaaactaagcaaactaaacatgtaaatgtgaacagctaaagacagagaaggtggatagggactagaggagagttatgtacccaccatgaatgtttcagtccttatttcctgattcatacccaagagcttggaattaaagcagcattgtgatattttgcatctaagatagactttttaagtttttcagagcctcatgaaatcatcaaagcaatcaacctttgtttgtgcacaggatgttgcacctggaattgcatcttattatgtgggaaaaaaaaatccaatttatgtaaagttgtgatgatgtattgaaggagcatgtaactgaactctttcccaataggctgatcactgtggtcctactgagttcccagtcctatagatgtgtatccacgatgtaaaatgcatgtctccattccccattcactttatgcttcatagatccatattaaaattaccagagccaagtttaccagacattctggcattgcatggcttgttggaataatattttccagaaacacatggcagttctaacagaatcttttccttctggattgtagatataaatgaatgtgaaagcaacccatgtgtcaatggggcctgcagaaacaaccttggatctttcaattgtgaatgttcgcccggcagcaaactcagctccacaggattgatctgtattggtaagattcatacacaatactgatgcttcaatttcactgccaagataagcacagatctcaggccttactacggataaaaacagaatatgattccaaaaagcaaagaattacacattatgttagttgtttttactcaatatcaatatagaggtaaaacataatagcattaattaggcagcctattcaatttttgttagattctagaaatcttccttttatataagtagatatattatgctataacttataatcatttccataccacacacatatgtatatccgttaccctaaaaatgccttgggcagcaatataatcaaatctctactccatacttttttataaacaaacttcaatggcaaacaaaaaatgtgatgaaatttggattcagttaacaggacaagaatttgaagcttttaaacacatagagggaatttattattttttcttttttccatcaatcataaattttggggctctaaggaagagaagataactgttctcttgcttttggaaatctctaggggaaattattctaaaacatctaaactaacatctttcaatatgtctcaaaacatttaaagtcagttcttgataatgacatgggatgtatattaagggagattgatctgttactgcaaggaaaaatccagcacgtaaaagggaacaaaactgtcccagtaatttttccctacttctagcctctgtggttccattcactaggcctacacagttcacatcattagctagtatccacctttaaagtgaactaaatatatattccaaataggaagatatttcagttttacatagtgccaaattaactggcagtttttattatctagccaaaatgaatctttagtttcatatttgtcgaagacaatagctttttcagtattatgtctgacattaaccatatttagctggatgctagagtacctgtttgttacataaagacaaatgaccaagtccaaaattatcaatgaaaaccttctctttggaaacaccaactcctcgtttcccagtgaggtacagctggtgaaatctgagccttgttcagctcttcatattaggaaatagactgccatctgcctggggcattactttttttcttatagaattccgggctgggttgggggggcggtggggtgtgtgggttggagccactaaagcagaaatatttttgctaagccacaatttccaattgagatggagtcattttattatgcaaaggaaatgaattcagcattaatcaattaatgtctcagaaaactaaatctgcatgccacttgagcatcaaagatagtttttgcctcatcatgtagacttccattattttggccttttgcccttatatttattaactaaacaagaacaaagacttttttacccccaagtctttatgtcattcttccaattgccaacaactaaccaccaccatatttttctcagccagtgtattgtgtgctttcatttattgtgattaaatttgaatatcccagtgtagagcagctcaaaatgagatttccctaatatttttaaagtttagacattatttcatgtacttttttattaaaaagagaatctagttgaaaaagaaaataacaaatagtaaaatatacacaggacaagtcatgaatgtataataggactgtcagtggctctcatcagtggttagcctgcaactttctcttccacaggtccaggtcattacattttgaaatttcatgatgtgattactaatttaaaattacattagattatatatgaattagttggatactatgaatatttaaagatttagaatctatttttcaagctttctaaatataaattaatcttcaactattctgcaaactgcttaaaaagactatggtgttctggttgaatatggttaaatgtaatagaacaatgcatttgattaatatttcctgcattatactgctgtggtttgatggttctatataatccagaccagtttccctcatctttggcttgggtctgcgctctgtcttcaacttgcatggatatatggctgtgaccactctgctgtcaaatccaatggtctattctcattcctcaccttagattattagcagtatttgtcacagttcattaatcattctttctcaagaaattttgcatttttggctttccaggcacaactatcttcttcttctttcacttttatggcacattttctctttcctttactgagtcctccctatcctcctaacctttaacctgaagtgttccaccagtccgtctttggacctctgtttctctttctacactcatcctcgagagcctctgtgttgactctcacatttgtcactctagttgataatgaaattctaggcctcaaccttgccaccaattccagatttgtgtttccaactgtctgtacagtgtctccacttggatggctcatcgatatctcaaattcccatgtctaaaaccaaattcctgtgtactggcttgaacctgagtctcccaggaacatttccatctcagcaaatggcaaattcattcttctagctgccaccccttaaaaccttggcagcatccttgatgtctttttctcaagctgtatatgaaagtcatcagcaaacctattgattgcacttgaagtttatccatatttcaaccccttctcacgatcaccacaccaacccccaatccaagtcaccatcatttctcttcgtaattactactgtagcctctaccttaccttcttttcctcatactacactcagttctccacatagccactaggcagcccttttaaaacataaatcagagcatatcattctttgtccaggaactgtgtctaggaaatcctaggcttctcatttcattcagtaaaagctcaagtcctaaccgaagcctgtgctcccctcatgatcttgctcctgctgtgaccttgtttccctgtgcctcccaccccctcagcctgagccagactggcctacttcctgctcctgcgtcagacacatgcccacctgaagtccactgatctatctggcaggaatgtttttctctcgggtttgcagggttctctttatgtctgtattcaggtgccacattgtaagtcacgatttctctgaccatcctacataaaataacagtctttctcctgtttctcccctcaagctaattaccctgctttattttttgagagttcttaactaattcctgactatctacatctgtatctcagttgtgtgtgtgtctgggggccgggatgggcatacacacacaacagtgggtcagtggggagacagggagggaggatggaggaaaggaatcggagagagagaaggatgagcctgtaggggggtgcggggtgctatcaatggatttgtagcttttcaagtgttgatacagcaccagcctaaagaatcacagtgctacagagtgagggctttggagtcagactgcatgggcttgaatcttgatgctgacactgtactagctgggtgaccttgggtaaattggttgacctctgtgtgcctaaattttctcatctgcaaattgtacataattcacagggttgttttaatgagtaaataaattaatacatagaaagccttccagttcctgtcactatcttgataaatcttagcaataactgttgtttatcttacttaaaatgatgacaaggtgataaatcagaactagtccaggtcattaaaagatcatttaaatacacagtagctttacacaaacatctctgtttcctctgtgctatggaatttacagatgtaaatctataacaagcctgcagtttgagacctgacacaaatgcttctctacagttttatccaaactgaacattccagccagagtgaaaaagcaaagtgactgtccagctctttttcacacctttgccctgtaactttttattcagtacaggagagaattgttttgtttcaacctctgtcttggtgtttgggttgttggtaacttcttgtgtttcctagggaatcagaaattactatttctgccatcataggcccatggtttaattgtaattccctttctgtgtttgggggcaggggggtatttttgttgttgaatttagaagtaaaaacttttttttttttttggaagacagggtctcactgtgtcacccaggctagaatacagtgacacgatctcactgcagcctctgcctacggggctcaggcaatcctcccacctcagcttcctgagtagctgggactacaggcatgtgccatcactcccagctaatttttgtgttttttgtagagacggggtttcaccatgttgtccaggctggtcttgaactcctgggctccagcgatccgactgcctcagcctcccaaagtgctgggattatagtcatgagccactgtgtctggccagaagtaaattttatctgtacatattattaaaatgaattttcaaataaatactataggaatacacttattctttgttttcttccaagtcttaatgccacaatatgctgttgaggttttggtaaagtgttttccacatcactcacatcagaatcacctgaggagtttgtcaaaattcagattcctgggctgcataccgggaaacttatgaatcggcattttaacaagcgtcttggtaatattatgcacacttaactgagagccactgctctacaaggaaaacatgacatatgatttgttttagccaattagtatttgctatatcagctttgactggattccttatcactgcttcaaaatcagttaacagtcatttattatttgttcatttgaaaaacttttcattatgccaccaaaaatatactaaccattcgttattccctttaatccacataaaataaaaattttaaagtgcataatatttcactgggtactctaccattcaaaaggaagaacaaatttgatgtggagtcagtctaaaacgttaggaatggttatctctagagggttacaggtgatttttacatcttcctcatacttctctatttcttcaaattgtttaccataagtatgatttactttttgaactagagataaatctacacacacacatacacacattttttaagtgcctgaaagaaaatacatcagatattagccctgggaatgcattagtgagggttttataagtgatgtttattccttcttcgttttatagggctttttcttttaaattattcatcaaataattatcttcagctggagaaatattggcctttgcataacagaacatacattgtgtgtgatttatttagtagggacttaaggtagaaggaaaaggattttatacgataaaatcttaaatatcaaagcatttgtcattaaggatatatcttatgaatacttttcacacaagtgatggtcttatcatgttgttatagtatgttaaaagaaaaaaaaaaagaagggcggggcgcactggctcatgcctgtaatcctaacactttgggaggctgaagtggaaggattgcttgaggcctggagttccaaaccagaccaacctgggcaacatggcaatgcactgtgtttctgagtaccagcataaaatcttggacaactcctcttagaatatcaatagatataattatattaattaccatattatgtgagagagatacatagtataatattttatttacatatatgtaatataccatatttgaatgcaggtacatgaaagtattttcaaagtatatgctattaaaattttttcttttttttttttgagacgaagtttcactcttgttgcctaggctggagtgcaatggcacaatcttggctcactgcaacctctgcctcctgcgttcaagcgattctcctgcctcagcctcccgagtagctgggattacagacacctgccaccaagcctggctaatttttgtatatttagtagagacggggtttcaccatgttgaccaggctggtcttgaacttctgacctcaggtgatccacctgcctcggcctcccaaagtgctgggattacaggcgtgagccactgcacccagccccactattaaaacttttaaagtattctttttttttttttcctctggtggagatggggttttgctattttcccaggctggtatcgaactcctgggctcaaatgatccttcctcctcagcctcccaaagtgctgggattacaggcgtgagccagtaatctttcttttttagaatactgtaacaaatgccttttgtgtacacagctgaattctattttcttcagaggtaagagctccccaacctttcctgttccttttcagacagcctgaaggggacctgttggctcaacatccaggacagccgctgtgaggtgaatattaatggagccactctgaaatctgaatgctgtgccaccctcggagccgcctgggggagcccctgtgagcggtgtgaactaggtaggagccttattgggagcttctgggcttctccttggaaacttctcctgccactaggacacctctttcactacgcagttccttagtgaagaaggtcagagatcatttacttttgctaaaatgttatctttcctggctaatgttttttacctcttaaaatgtgtatttgttttatcctggtacataagcaggccttctaaatattttaacatggaagggaatcagctagaatctatctgctagatgactgtatcctctggtatccttgtttgcgtggtggctgttttcctcaaatcttttgtttacttttatttttttgagacggagtctcgctctgtcaccaggctggagtgcagtggcgtgacctcagctcattgcaacctccacctcccgggttcaagcgattctcctgcctcagcttcccgagtagctgggactagaggtgcccgccaccatgcccagctaatttttgtatttttagtagagacggggtttcaccatgttggtcagatgggtctccaactcctgacctcaagtaatccaccctcccaaagtgctgggattacaggcgtgagccaccgcgcctgacctgtttacttttaactcagttgtcaatgtgacagcaaaaagaaattgtaggaaaaattatgagaatctcaatacaggtcaataccaatggagttaccacagaaagtcatgtgccctactgaatgaagaggggacaatgatgtccttggaccctaagaccctgccttgcattttttatttagttccatttagatttcattatacttcttcttgagcataccatggttgtattttattctataatgaagtaaaatttgtcctgttgttgttacagatacagcttgcccaagagggcttgccaggattaaaggtgttacgtgtgaaggtgagtgtatccttccttggaagatactatacatcttttgagcagtaagtaaaattaacattcactctcaaactttggagatatttatcattttcaaaaaccttgacatttcaataaaaatactcgatgtaatcaacaaatgctttagcataattctcttaggaaagagcttagagtttcccgtttctcctctttatggagttgtgtaaatttcatgaagacatcgctagcctttaaggcccagaacagctgggaaaggcacatgtctgggccatgttttatggacaggcaaggctgtggtaattttcacagctggtacctaggaaagcgggtggctcggttgtggaatatttctgtttaactcaagtaataatccacattgtattgaatgtggattgaaaatgctatacaggaagtaggaccacacctgctttttctatttgtaacatctttgctcctctgcttgctgcatttccctgcagatgttaatgagtgtgaggtgttccctggcatttgtccaaatggacgctgtgtcaacagtaagggatcttttcattgcgagtgccctgaaggccttacgttggatgggactggccgtgtatgtttgggtaagattcacaccctcatgtattctatgtataaaacaagccatgaatttccttgtttaagcagtggctagtccaaaaccacaagagtttgtacttgagaaaacttgctttaaatgagatatttagggggaaatcactagaggctgttttaaaagtgaatgtatttatgcgaaattgtttctgtttcatgccaaaagttgggactgctcaaaaatctatctcaaaatcttccatttctttaaccagataatttagacaggttcagtctttcacactgagttaatagagtaagaatatgttgaacacagcaggaaagttggagactaggattttaaaagtttacatttgtcagctcattgcagctacaccctgaagacagtggggaaagtcaagagcaaagatatgttgcttctgcttgaaatcattcactgatcctggtccttcctttattgctattagagtttaagttttcttaatagtttattttttaaagatctgtagtgatgaatctctttctttcaacagcatattataggaatagtgatttgacctttttctttattagtgtcatgtttgaacttgaatttcatgattgaaaaagaaatttctattaattttcattgtatgtaacaataatttttcatttacctacagagattttttttcccccaataagctatggaacagtaaatttttagtttataaaagaactttacatagatttgtatttgaaatttagacatgtagacaaagcataaataatagtggtggtgtatgcaatcacctttaaagtatttacatatcagtgatttttaaaatttactgtaagaaaaaagtttgcaataccatacagttattataattaaaacagatttcatttttaactcagtttttgatagcacatttaaatctggattggaagcatgactgtaaaatcatacaaaattatttagaaaacataatatccaaagtacaaaaataaagaaaatgtctttcagatttttaaatattttaaaaattatctttaagtgatctacaatgtttagaaataagtatcatttgaaaatgacaaaatattcccccaaaactatcgaaattttaaaaaaagaaaatgtcaaaaataataatatcagtatggccaaatgactaatgaaatcaagttaccttctataatgaaatgctataatatatgaagatatatcattgattgtaaattattactcagcaaaataaattttcaataacattattcaaaattatggctgggagtggtggcttacgcctgtaatcccagcactttgggaggctgagacaggtggatcacctgaggtcaggagttcaagaccagcctgggcaacatggggaaccccccccctccccgtctctactaaaaatataaaaattagctgggcatggtgatgcatgcctgtaatcccagctactcgagggactgaagcaggagaatcgcttgaacctgggaagtggagattgcagtgagccgaggtcgcaccactataccctagccttggcaacagagtgaggctctgtctcaaaaaaaaaaagcattttttaatattctaagatgatatattggattcttcatccttgtactttgcttaaatgcttttgtcaccacttgaattatgctatattaattaattctgtctggggatgtgagaaagtttcaagaagcaactggcacatgaaaatgtaaagtattctgagaactaaagttttggtaaatgctctgatagaacctcatctgaatcagggatcccaaactcagatgcttgcaggagccaagcatgtaacatataaatgagtgatgcgacaacagggagcagtggggactgcagcaaacttcagagaacatggaccatccaaaggtttccaaattcatattttaatttccatgcaaggacaatcgcagcattgataggccttatgtggccagtgtactgacgtttaattcctgatataaatatagagttctcagtagtgtgctgacttttaattgccgatataaacatccatagaggtctcagtattaaagacaggattgctcttcctggctgttataactttttacatgcatagttcagatgcctttcccctctcaccctagtttattccaataagctatgaaatggtacatttttagtttgtcttgagcttcttgagcaggtttcttcagtaacctcacagtatgactcaggccagagttcttaggccacctgtacttatataagactttcacatcttgagaagattcttacttagctgctgacatatgggacggaaccagctataaggagactagcccctcagagccctgtgataatgagacgctggattactatcacacttcacactggcaaagcatgtggctttttggtttgtgttaatgtagatatataagacagaatcaccttctgtagatatctacattcagtctgctgaatcaaaataaacatttaccacagttattttttccttaaaaataggactttttctcaggtagctgggattacaggtacccagcaccatgcccagctaatttttgtatttttagtagagatgggttttcgccatgttggccaggctggtctcgaactcctgacctcaggtgatccagctgcctcagtctcccaaagtgctgaaattataagcatgagccaccacgccacacctggtctgggcaacagagtgagactccatctcaaaagaaagaaagaaagaaaaaaaatagaactttttaattccagtactcagaaatgtaactcattaccttttagaacttgaaagaatcaatattgacagtaactaaagtagtaaacattaatttttatgtgtacatttccatcagggatctcattccctccgttagacagttttcagcttctggaaaggatttaatgtcttaaaatgttcttatcaaagaaatcatgctatttgattaaggaaccgtttccaaactcattatccatatttgtaattaaacagccaagtgctttagtatgatttgaaaataaatctatttgctaacagatgaacatgttatttatagaccattctggtctactctatttttagatgtaggcgactgtttatagatattctaaggtcctggctagcacaggctaagcactgaaatgttggtctgttttgaagttggagggaaaatgtgacatttaaacaaataattggtcccttaaaacggaaaattcacataatccagggaaaaaccatgatgcaaaaggtaaagttggcaggagaaaaaaaaaaactttaaatgtaataatattataacactttcttttgtagtgatcttaatagttgtaacaaattggcaaatagattatagccgatcatttactgtttatgaatgggatctgacagggctgcttaaaaggcacttgaagcaattctctgaacaggaagaattatcattaaaattatcttactttttctaaagtgaacaatacaaaaaaggagtaatagacatgaagcagtcatctcatgagaggaccttttcttcctgagggtttcttgtgagaattaagactgaagaggatctcacctttgttctccttaaatgactgtcattatggagtccattccaggaggtcagggactgcatcttgcccaccagtacaccgcaagggtcctgcatgatgcctggtgctgagcagacgcttgacatgtgactgttcaatggatgtttcaactcattctcaccctgtgatttcgttctcggtgtagatattcgcatggagcagtgttacttgaagtgggatgaagatgaatgcatccaccccgttcctggaaagttccgcatggatgcctgctgctgtgctgtcggggcggcttggggcaccgagtgtgaggagtgccccaaacctggcaccaaggaatacgagacgctgtgcccccgcggggctggctttgctaaccgaggggatgttcttactgggcggccattttacaaaggtaactgcctgcggccagcgccttggtccttcttcaccaacaggaagccttccacattctctgagaattggttttgctttaaatgtttgacttcccactttattttctcagttaaacttaggttttgtgaccaatgttctgtcccaagagtataaatcccctataagatggcattgaagtaaagagataaaacagattgcttatctttctcttctactctttgttcctctacaaccggagatgtcgccctgatagctacatctgtagcaaaaagttacctattcccacttatctttataaaacaagtagtgagaaataaaggaatcagaactctttcttaagcatatagaatctttggccgggcgtggtggctcacgcctataatcctagcactttgggaggctgaggtgggtggatcacctgaggtcaggagttcaagaccagcctgaccaacatggtgaaaccccgtctctactaaaaatacaaaaattagccgggcgtggtggctcgcgcctgtaatctcagctactcgggaggctgaggcaggagaatcgcttgaacctgggaggtggaggttgcagtgagccaagattgtgccattgcactccagcctgggcaacaacagtgaaactctgtctcaaaaaaaaaaaaaaaaagaatataagatctttttcaccatattgaaacttcctgtgtgatatcagtgtgatcactgaaacatttagtagccctgttttttacttggatgcattactgttgtccatcatgatagatttttaacttaaagtgatggacctaatcgtttatatcaaccggctctacattctggcttcattctgcttttagacatcaatgaatgcaaagcatttcctgggatgtgcacttatgggaagtgcagaaatacaatcggaagcttcaaatgccgttgcaatagtggctttgctctagacatggaggaaagaaactgcacgggtaagatggttctgctgttttatttgataaactctggctgtctttcctttactctgtttgaaaggactgccctaaaaagctaatcctctcattgagaacatgaaaatttttatttatttattaatttctttttagagaaaaggtctcacttagtcgcccaggctggagtgcagagacatgatcatggctcactgtaacttcaaacttctgttctcaagtagtccctccacctcagcctcccaagtaactgggagcacaggtgtgcgccaccatgcacagctaattaaaaagttaattatttatttatttatttattttaagagatggggtctcactttgcttcccaggctggcctcaaactcctggcttcaagtggtcctcctgcattggcctccccaagtgctgggattacaggcttgagccacggcatccagctctgtaaattttttaaatttcttttctctacacttaaaccagttctccaaataaactcgttgtgagagaactgcaaaacatcatgaaaatgctgtttgttttatatttaggaacagcatacaaatatgattttcaaaatatatgactactaaagaaatacagtcattaaatccacaagaattatataaacttgagtagtgttctcttaaagattttaaggtttgtgatatagaagttattacttcttttcctcatctgtgaacaggaatcttaatattagttttcagtcaccatccatacccataacattctctttgaacaagatgtgaagttctaactttttctattagtataccatgttgttccagacccttgagctgtgtcttcaggatctcgttctcagcactctctttgttcgtattctccatgggatttccccttatcgcactccctcctgcctgctccttcttcctgacctcacggccacatctttcttggctctttcctgtgcctcctcagccaaggctatctctgagcttttcacagctgtccatctggctttctgaagtcctgctgccttgaagtctgctcaagccctgtgccagtctccagagcttcatcccctcacctgttttctccactctggctgctgcacttggctgggagagtctgaggagtgctgcctgagattactgcattcacctccaagtccttgaagctgcttgacaacactcatattcacctccattcatcactttctgaattcctctcagcactgcttctaaacctcttccctgacttacatgccctctcctctaccctccacccccatctattaccgttctccttcattgagaataaatctgattgcctgcatccttctcacacagcctcctctctagtgataacatctcctttatcccgctgggcatggtggctcatgcctgtaaccccagcactttgggaggccgagacgggcagatcacctggggtcaggagtttgagaccagcctgaccaacatggagaaaccccgtctctactaagaatacaaaattagccgggcatggtggtacatgcctgtaatcccagctactcgggaggctgaggcaggaggatcgcttaaacccaggaagcggaggttttggtgagccgagatcgtgctattgcactccagcctgggcaatgagagcaaaactccatctcaaaaaaaaaaaaaatctcctttatcccccactccctctcctccggtgacagagaatgaggtgtgatgctctacctggatttggggttaactcctcttttccctccttcccagctcctgctctgggttgtctcagcaggttcgctcctctctcctctctctagcatctcctcttccctgcttcctgttcctcaacttatacacaggttcaaaatatctcctcagcccttcttttctctcaagctaccatcccgttttcctgctggtaagtctcacccctctctttcaaccagccatttgtcctgtaattttgacttttgccctctgtcactcaggcacatacatgtatactcatctactcttgcaaaacatctttgtggtgttaaaacatctctcctggacctctgcttgccaaatctctccttgagattttcttttctcttagtttctgtggtattttccggtcttgatcatccttctatgcagatgatgtttcttctctaacctctacagattcttcttgcctttcccatttcttgggtgttgccagagtcctctactcagcgtcttgcctctcagagtttcatctaccatcatgacttcagagatggcctctgctgagctgactcccagaccctgtctctaactctctctgttcttcctgagtttcactcccacatttataacttcccatctggaaagtttgtctttgttttgatctttctttgctcttccccctaccctgtactttatcctactagggacttccctgtatgcattaggagtataattttgaacaggattgaagcctccaattgaattttgacgtctctctctcccaaagtgaaaaagttatgcgaattctttcattaaactggctatttcaattacctgtgatatttcttcagacagaggcaggttaagctcctcaggaaacagactccaaggcagagaagagcattcaggaagtttatcggggcttgctcctgggatgaacaatgaggaagggaagggaggaaagcagaagtgggcagagaaagaaatggggctatgatgcagtcccactgaagtcctcagcccatgccactgggagttctggaactgggatggcccatcagagttgccttgagtagggcatggaagccatgcagttaggtacctgcaggaccaatcttgggatacagctgcccagggaatgggggaagaggtcctcttagaatagtgggcatctgagggctttctgccagcgacactaccaatagctgacggggagggggagtaagtccttctttcctgaagagggacctgggtgacatgtcacagtatctactgtatcacagactcctccaggatctcccaacctgttaagttcccacggtcaaatccttcactgccacaacccaggttaaccatccaagcagggctggattgtgtaacttcccactgaacaacttccactggtataggcaatcctggtgctggataaagaagctcagggttcttccagttctgaccccacctcttcctttgttgtgaaattagccaaagttgcttaatgtctctaacacattcacagggctgcattgctctggatatactgtgaagttctgtggaaaattgttggctctcatcttcacagcaggaagggccggtctcctcccatgctgggggcttttagtaatcctaccggtccgtcctgtacccacactcattgtcagcctctccagtccagccaatctgtggcttactgctccctgaaatgcttcctttctcttcaccggtgcgcttcatctcttgcctctctattctgtatctttaaagctagcatttctgtacaaccttcaagaaccaattcaaaagccacaccctccaaattacccattcttagcagagaagtttgcatatatatatatagagagagagagagagggagagagagagaaagagagagcactttctatgagacaggcactgttctcagcacttaacaaatagtcatttaactctatgaggtggattctatgacaaataaggaaattgaggcacagagagactaaatgattttcccaaggccctgttctcagtagatgacagactgggatttgtagccaggtatctggttctagaatccacactgtttatactatgaaactcccaccacatcacattagccaaagattgtccctgctccaccctagaacacattcctcatatgactcttaacaccagtcctagatactgatagatagaaagaaaattaatatacatattgttagctacttaattgaatcaataaattctgttaatatgtttgtttaaaagaaagtatttacatttttttcgcatggccagtaatgagggaaataaataaagactcctgtaattggagaaataaatacagaaaaactaagtaaaagctggcagaaagcagagactgagacccccctctcaagagaacatgcacaaattatgcactaaatcctgtgattttaaaacttcaaaattaagttcatcaaaataaagagatcgtagtggggcatttttccccactgacagatttttagattaaaaacttttgatttttggactaaaacatttgtaaataggtcatgttttcttaaacatattttatatagacatgacttctctattaaaaatcttagttataagcataggagatttctcagagaaccctgtgtttgagaatatagttgctgaagattatttactgtaatatataaaaagaggaaacaaactcacccacacagtcctcaggtgttggtgacagctcatgtcaccaaagggcttactaaatcaataagctctttacatctgaatatgacacaaaaacacaaattggggcacacaccatggccctgccctatgtgtgctctctggctcagggttggtccgtcgtggctgcctgtctctctggggtttgccagtccctcctgcacagagacaggggccctgccttcacatgctgcgacctggggtggcatgggctagtgtagtagaccagcactgtcttccagtcacacatgaggtttcattccatgggggcctggctgcctcatttaccacctgcctcattcagcccataccacagttgcagggttcatccttctgttaacatttctttctttttctttttcttttcttttttgagacaggttgtccctctgtcacccaggctggagtacagtggtgccatcatacatcgtaactccgtgcagccttgacctcttgggctcaagcaatcctcccacctcagcctccccaataattttttttttgtagagatggggtctccctacattgcccaggctggttgcaaactcctggtctcaagcagtcctgcctgggcttccccaagtgctgagattacaggcatgagtcaccatgccccccttttctgttacgatttctaagccacaaaaacaaatacacaattcagaatttttaaaggtgaaaaggcaccacttgcctgttggcatggcagttttggcagttggggaaaggaatgtgcctcaggtcccaggcccttctatctgggtctactgaaaacatacccttgtactgttagccagcaatttccccaacttttcaagcatgcagcaccttcgcttggaaggccaagtctatctcattcaatttttaaatttcttttaaaccctgtgaattagacatcgacgagtgcaggatttctcctgacctctgtggcagtggaatctgcgtcaatacaccgggcagctttgagtgcgagtgcttcgaaggctatgaaagtggcttcatgatgatgaagaactgcatgggtaagcaccgtgagctcttcctcgccagcttgaaaccatactagcacagactcattcgtgcgcatgacctttgcttatctctgggctgtgaacggcatgtgtggccagcatctgtggtgagagagagaagagatttaaatgtcagacaggaaatgcgctcctggatagctctcggggagccccaacctcttggcgccttcatggcaatgagatactcagattggatcctgtttattcatagaatctaaaatcacacagactgtttatttaggtgggactactttaaaatgcatggcatcgtgtggtggccccaagatttgtattcagtcatgccaatcccatgttattgctcttatttgtgtactattacaaactcttttggtattcccaaccttttagcccactgtttaattttcagtacgatataagacctacctcataggatatagtaggttataagtctaagattctccttcaccctgattagcgttatagacaccaggataactgacaacaatatatcatgagtccgtggtgatataaagcaaatattatgtatttctaccccttgtgagcctgctgatttcatgcaattaaatttcttgaaagcttactacctttaagagtagaaattttagtttttctgttggtcgtaggaaaagtgaggaaagcgttatcccatctcctatgaagcatctctcttccactaactcacactctcacatcagataatattctttctcccacgctgtatgtgtgaatatttttccctcagagttctttaatggatctcacgtttttacctttcagacattgacgaatgtgaacgtaaccctctcctttgtaggggtggcacctgtgtgaacactgagggcagctttcagtgtgactgcccactgggacacgagctgtcaccatcccgtgaggactgtgtgggtgagtttatctcctcagcacataaacctgcccagcacaactggtaaagaccagggatcagttctgacaaacctgttgtttgaggagcacatgaaatctagcttattaaaaggtggaaattgagattccctacatctggatgcaggctgtgtctttagtggatgcttgggtgacacactcgaataagctggcattcttctggttggcctctttttttataacaagccacgtgattggtccctgtgtgaggagccctgtggaagtccttgtggtctcatcctccattaggaaaaaatgggaaagctactgtgtgcgttgtgcacctttgcccagcgtcttcccatccactcggcagactccgctctacgcccctgtgcctgctcacgatcggcttgcacatgtgtgaacatggcgctcccttaacccacttctcatggaaacactgggtttcctcatttgccctgagctctgtagggctgccagaaaggatatgagaagactaatgactggtctttgggcgttgcaacctattgcttttcacaatacatgaagatctctggacttactatgttcctagtatactggctttaaaactttgttttagccagaaagcatgttcttcataggaactctttcttaaaaccgtaagcaaataagacagcctaaaatagaacagattgcacaccaaatttcaaaacataatttgagcacacctttccaatacacatatatttatttataagccttatgtattgctttgctagtatatgaggtgaattttgtcatagataaatagatattttaaaatgataaatgaaaaggtttttatgttcttatttcattttaatagctgtacaaaaggctttttcacactaataattgcagaatatttattcatggttgaacatattgaggtataatgagtcacagatctaagtttactttgttatttagttttcgtggatcttacagcttaaaaacgtatcccccaaaggaacaatgcagaatataaaatatatatttctgtataatatacacttagtgatcataagcataaacccatgccatataatcttcttggttattttgagaatttggaataaatttcttgttatatctgattatactgtactgttttttaccttaccttatacctgacaagtagtttacataaggaagtgtatcaccctgccattttcttctgttatcttgtgattacattattggtactagtttatttttaaggcacctgcccatattataggggttagtttatttttaaacaggcagtgtgatttgtagattactatcccgacacacaaaacataacacagtgtaaacaattaaatacatgagggccctattgtcatgcctctgtcttgtggaaccatcagtcttccatcagtatacttcaaatcatgtaggcaacacttcaccatctaatatagaccaggtgagcgtgccagtgtaagttcatatattaagtagtatttagcttcagttctggcatatgtgaaatctgtgtggtctaacatgatagtcactagccatatgtggctatgtaaattcagttaaaattaaataacattaaatattccttagttatactgtccatatttccagtactcagtagcacatgcagctgtgtattagaccgcatagatttgggagcagttgcatcattgtagaaagctttactcaacagtattgttgtagatggaaatagagaatccagcattttctttcaatcccccaggagaacattttacttcctcgtgaagtacacaaacccctttggagaccactgctctggtgaagcacctttctgatggctttagtgagtggacattgtgtaaagcattacttctgtgtatcttttatagatattaatgaatgctccctgagtgacaatctctgcagaaatggaaaatgtgtgaacatgattggaacctatcagtgctcttgcaatcctggatatcaggctacgccagaccgccagggctgtacaggtaaggggagaccaagcaggcctgaaactcatatgtctcaaatcagcctaggaaaacttttggcgctgaattataatgaaggctatgcaaatcctttgtcccaaaaatgaatgtaagactaggggcagatctcagttattgtgtgatcttgcagcagactcactcatcttaatgtagaaaatgctctaatccccatagttcttctatttctgagttaatcttagggtactgcacttaaacatggaatgctgcctaaaatgaaggtgaaagaactaagaaagataatgttcaatcaacacacatagtggggagaaaaattcaaagccacattagcattatctgtttaaaaagaagaaaactccttttaaggaagcagacctgacaatgtggttgcaatgctgttttcacagatattgatgaatgtatgataatgaacggaggctgtgacacccagtgcacaaattcagagggaagctacgaatgcagctgcagtgagggttatgccctgatgccagatgggagatcgtgtgcaggtatagaaaggaaaacacacaggttttgtacatctaactaattttttcttgaaaatatggctccagatattaccaagtggaaccagatagaaaacaaaaacatttgagattgatgaacgacatttttattttcatttgatgctaattttgtatcatcagacattgatgaatgtgaaaacaatcctgatatctgtgatggcggccagtgtaccaacattcctggagagtatcgctgcctctgctatgatggcttcatggcttccatggacatgaaaacatgcattggtgggtatcataagaaaggataaacatttatacacacacatgcacacacacccacatgcacacacaagcgtgataaaaggaaggctttttctgttgttattttaaaaattcaaatcattttactagaactgtaaaatctcaggaagaattacttttaaaaatgtctaaaggcaggttgtatatttatctataacacgatgatttgcggatggattatattttagatcttgcctgtgtatttcagtattatgctattcagtgtagaagatagcttttaaattactgtgatgagcacatactaagatattgaaaataaattttctagatgtcaatgaatgtgacctaaattcaaatatctgcatgtttggggaatgtgagaacacaaagggatccttcatttgccactgtcagctgggttactcagtgaagaaggggaccacaggatgtacaggtaggtttcaagcttgtgttctctgtatttcaacttctcagatgtcaaaggccaactttcaacatcatttgttctctggcatctcttagagcggttacctgccaccagactgtgactgtgtgtgtgatgagtgtgtgacctataggatgtgtgatggatttggctggtctctgtggtagcacgctgtctgagccacccaccgtggggctggctgtgggctgtgacagagtgagtgagtaggagtacagtctggttcccatggccctgaccacttatggtcgttcatgcagcatcagtcactttctgagtatgactgctgcccgcttggaagacattcatgtacaaagagcaccaaaagacccgaggatcccggttgccatttacctctgcacttcttttaaactagtaaaaattaatcaagtttcattgagactctttccctttcttcctttctcccatcttttcctttcttgtttgctcttctgtttgcttttgtcttctcttctctgtgcccaaattgcctttctctttttcctctcttcactttccttctttgctcactttgctcactttgtcttttgttccctttctctactactactactaactagttttagccttttgcatgcaggtggggctaggatgtgccggggtcaaggttttggatcacgtattcctcagtgcacaatttaagacttatgtgtgatattttttcaaggcaggtggtggaagacttaagagtccaacccagcccttaagctgacccctccagtaaggggcagattataaaagaaggtgttctttgcatgttcaccactgacagggttgatgtgaagccagtagtgtgtgtgtgtgtgtgtgtgtgtgtgtgtgtgtgtgtgatttcagcatctataatatgtaatcgttgaactagatagaacacattactatttatagtcaagaaagctttggagaaccaaatctacataggttatacatacatatatagggatatgtgtgtgtgtatacagacacacaaatacacacacacacacacgcacacacacacactggcgaaagcatctggctactttccagataacattcccagtgaatatttttctataatctcaaataagtagaagaaataaaaatatacacctaaatgaatagttttttttaaattctgtaaaatatttatattgattttttaaatgacaaatgatcatgtaattttaaagagaataaactattactttttttaaaaagttagattcttatcttcatgaaaaatatgtaataaatatcaataggaaggaatagcaccatctattattggaaataagatttctcttgatctgtaatcgaatgtcctctttatggtgttgtgtctgaatctgggcagggaagaaggccccaggataatacacatacctgccagggagcaacactgctgtgtctctctctcttctactggaaagtggctgaaagttgtttctagggaagaacttgttttattaggatcatgaattttccaagtcctcttggagcctacaaaaattaaaaataaaagttagttaggctactcttttctccatacggttgcatctttactttaaaatgttacctatacaaaaatatacttggaagtagaattaattagtttgtattttgattttcttcttatgaattatggtttatcagatgtggatgagtgtgaaattggtgctcataactgcgacatgcatgcctcatgtctgaatatcccaggaagcttcaagtgtagctgcagagaaggctggattggaaacggcatcaagtgtattggtgagtttgcaaatgtaaatatcctttgctaaggcacaaatttttaaaggctcttttttgcatggttgtagaatcatgctcttcacttttattaattcctttataaaaaggttatcttagttgcaagataattcctgcctaagggtgtcctttacccttaatataaattatcaaaatttcaacagtatgccttggcacctgttttttaatgtgtttttgttcagtaaaaattgatatgcagctggtgatccaaacacagctgtatgatgaaaaatgactagtatgttcttccaatcttttcaaagaagtaatcagtgagatttaaaatccagtggaataaatggagagcaatgaaaaggttttttcagataacctaattttttagtaagtcatcaataccaccatcttattagaaaatagaattcttcttacaggaaattgtaaatgctttcttgcattccaagaggtcttatttgaagaaaaaaaataggcaaattctccaagttttatggttcttgagccagagtctaagaagtcttttatatctgagagggaagggactagaatataccctgagtgtcattcacagttttgtgtaatatgcttagtgtttcacatgccttacaataaagcatttttccaactagtaagaatttctaggtcaatttaaaacagaaaagaaagcaagctaaactcacttccccctgataacttacaaaaaatatataggccctcagtaaggattaaagaatagctttaagatctcttaccaaaactataagttaatttgaatatatacttttttatccattcaaatatttcatacttatcaaaagtttatgtactgactatagaatttgaagtatcagagcttccaaataactgctaaataacatcctgcaatggcttagtgaagtgccagcctctagtccagccatctttccagggttactatcataacttttcaaccataccctcattcccattttcgtagccccatgtgcctactctttttctctttttggcctcccatttttatgcttcttgtccatctgtcattttggccaactattgcaaaacagcctgcctctgatacaagacattcagctgtgtccagcctcctgtgctccaggatgtcacccaaattcatcctctcctttacatcttctttcccctactctagtcccaaccagagagagtttctgtctctctcacatgccctcgctcttcgtgtctgctgaatgctaaaagaatcccctctggtatgttggcttgttccctctctggccctcctgcaatccattctccacgtagcagcaggaggaagcttttaaaccatggattcgatctcttcatagtcttcactataacccattgaattcgggataaaattcagcttccctcccttggctgcgggtttccactgtctctctagcttcattgtccatcaccctctgtctggtgcattctgctttgccactctaacctcctttcattttttcagtcacactgagctcttttcctccttggtgtcttaccatgcactcgtccctctgcaaggaatatccttccccacctctgttcagcaagttaattgtttctcatcctcaggtctgaccttaactaaaaactacttcctcaatgggggcatctttgttcctgcagcccaaatcagatgccttttttattctctcatggcaccttgtaacttttcttcatggcacatatagcaagatttagtttttttctgtgtttaacatctgtcttttctgctcaactaagggattccatgaggtcaagaatcatatctctgtttcctcatctattaaataaacttaaaaactctttgttaattttcctgctctgaaattcagtatcaccttcagaattgattcttctactgataaggaaaccactaataaaattcaccctcagtagaagtcagaatgagatctaacactaatttgctttaagctgttaaaaaattcacgttgactagatatctcacaaattgcttgaattcataattttggcccacatttatagcctggacattggacattgggtctgagagcttagcgaattagaactgtgatcctgcaaactaaaatgcctgtcatttatccagtttatatgtaaattaagacaaacgataatctttccaggtgcttaaatgttccattttcatttctgaactttattgctgtgttctgcagatctggacgaatgttctaatggaacccaccagtgtagcatcaatgctcagtgtgtaaataccccgggctcataccgctgtgcctgctccgaaggtttcactggtgatggctttacctgctcaggtgggtgacagtcctgaggtgtgctctgacgggatggtcatagaacactctatatgcttccttatttgaagaaaattataattaaaggagacaaaagtaactacctctttttttatacttgacttgcaggtgactatgtatctttctcttacattaaacacaaaaacctgaatgactttccaaatatattgttggaagttttcaaataacggcatttgtaacaatcatgtactgttaatgactcgccattttatcttactcatttgtaacacagtggttaaaaaaacacaggctttgtctggatcagactacctggattcaaatcttgcctatgccattttttgcctgtaactgtaagtgaattacttaacttgtctgtcctgatttaaaatgcaatagtaataatacaattttcttttcttcttttttattcctaaatgaatggcatgggaaaactgttcagctttttaagataggatatatgacctatccaatcactgctatttaatgtgtttatcaaagtctcagtagtttatcacctggcattgaaaggattaaatggaataatacaaataaaggacttagaagaacacatcacaaaatttcagtaaataatagcttctgtttggcttctattcattcatactctttgaggataaagcatcctctcattatatgcatgtataagactagataatcttgctggacgtaaagttgaatactcttcagtttataaaataagggtttctcaattgattttcagtacacactttaaacccataattaacggatagcctaaatttttttcaaattgtggacatcaaaaatgcagcctcatcattttcaaatgcctgtttaaggaaacatgtttattcagttttaaagcttcataacttgtagccttagagtttgcatctttcctggcatttctccgcactgtggtgtcaaggaaagagcatggctttcatgtcagacacatctgcaatcagatcctggctcagtcaacatgcattattagctcagtgtggctgtgtcagcttacttggctgctcttagccacaggttcttcctcttctaaacctcaggagattggtgaattcagtgaaaaaatgcatgtcaggccaccagcacagcatatggcaaatgacaccctcactaaacagtgatttttccttccctcttattctgcttgatagaattaaattatctttaaggtctgtgagtaatgtctgtttgtgtaattaagataggagtatttttataagattgtaatgacatgaaagaaactttccccattcccatagtgtctttaatttgctttaaaacacttgaattagtgaaaaagccagttatttattcgaatactataattttctcaaagaatgatcaccattttaagattaattccaatgttctttttcatatctaaataatgttggcatactactgacaagagaaacaagacaaatgtgagagatgtctgcgtttctcctattaataatattacaattggatgttagggtgcaggttaaatagcttttctttaattatattacaattgaatgttagggggcaagataaatagattttctctcaggttgataccctcctttaagtgaatgtgattaactgttgtttcatgttaatgagcattaagtcaagccagtaaaactgatctatttatagagcaaggagaaaatgtgtcatgaaatttggaacttaacagagatgtaatttgcttttttgcacagatgttgatgagtgtgcagaaaacataaacctctgtgagaacggacagtgccttaatgtcccgggtgcatatcgctgcgagtgtgagatgggcttcactccagcctcagacagcagatcctgccaaggtgggtcaccaggattccaactcattttcaagttggatcaaccacagtaaatgaaaccacaacaagggctggaacaagctccacctggaagcagaatacatagcacatgctgcactataaaagtcattcgtttaagcgtggattattttgccgaatgaataatgatgatggcggctttcatctcttatgaagttttcctggccaagagccagtagttggaagtttggatcattcttttttcttttttaaccatttcttctcttctttctcttttttatcactaaatgaatgacatgtggagaaactattcagcttttaaagtatgctccattacttgtctcaactaccactatttattgtgtttatcaaaatcataaaaagctcatttttggcatttaccttcgtggttgagactgctgtctgtatgtctgggaatggaagtcctcttcagggattcagcaagggctgtacttttgcttaatactagtggttccttattctaagtgatgacatcatccacctttcctagaaatgggtctttgtgcctagtatgatatctttccaagaaaaagaatttggattttctattaaattagaaactcaattcacattatatatagtttgagccatcattgtgttatgaatagggactatatgaaaatataaatgaagaaaggagagattgaaaataatttatacaccatagggcttcagtagaatttatgattcacagaaaacctttaaaaaaactcagtttgggccaggcgtggtggctcacgcctatattcccagctctttgggaggccgaggcaggtggatcacctgaggttgggagttcaagaccagcctgaacaacatggagaaactccatctctactaaaaatacaaaattagctgggtatggtggctcatgcctgtaatcccagctactcaggaggcagaggcaggaaaattgcttgaaccctggaggcggaggttgcggtgagccaagattgcgccattgcactacagactggacaacaagagcgaaactcagtctaaaaaaaaaaacaaaaacaaaaacaaacaaaccaacaaaagaactcagttttccagtcatgcagcctcatgaaaaaaaaaaaaatacctaactgctgagcaaaaatgataaaatgaaacatattaaaaacttccccctacatcagtatctaaccagaatgaacagaattggcaagtactggcacacgtgcacacacacatatacacacacaaacacacaattcatcagcatcaaccaaacaaaaccaaattatacaacctgcggtggttcagagtggagcccaactctgctccaccatcagaagtggcactgaagaaagaaagtgtgccaaaagttcatgaaattctccagaaatagcaaccaatttggagagactcagaaaaaggggatgaacagttggccgtagggaagatgaagttggaaactgaaagcgttcgtgcttctacgttgacccacaagattgggcagaatctaatccattttatataaggcaactgtagggtgagttcctttttttcccaatcctggtttcttctaagcactgaagcttagtagtagaattagtagaaaatgtgaatcaatgtaaatgtggaatgacatgatttattatctacattagcttgacaagagttagtgggagaaggaacaggtcagcagtagccactttcaacaacataaattctttatacccagacaggatttttccttcctaattgtgtattactttatgggtggcataggccctttcagaacttccctctcccccaagatggtgctaaatagttactgtttactgtacttccttcacatctagttttctcatatgtcattaccacagagagaaactcctaactgacagggaagctgagggttggcacacctgtagttcaccctcagttggaccctctgctccattcagctgaacaccagcttttgagatccaaaaaatgtaattccatggttctggccattctccttgtttttctctcctctccacaaggtctgggtcatctggacagtttctcctgaatttactattttaatcccttgttgtctacccatcttattataaatacatgatcctccgatgaatattttccactaagcatccacttctcaccaaagtctcagaatttctatagaattcaaaaaattattgaagttggccatttcccagtaaattccaccaaaatgggggaatataaaacctggaggagcccctgcaggaacatgagagaggactccattaaatggaacagacctacatacagaccattttctataatttctgaggagagagcaaaggctaagttcatcaacatagagcccagaggagctctccccattctcaatcttctctccctccaccttacgaaactttgggcgactgaatacagctttaatgaaaccgaaaccagctatcttccacataaagctctgataaagaaggaaagatatcaagagatgttatttaaactgtactaaagtagatagaagctcttgaaagagcagacaaagtagtgtctatacaagctgaaaaacagtagcaactatgcaggcattctgtgaaaacgaaaggaagaaaaacacaaaatcagctaaagaaccaacccacgatggaagaaaacaactcaagaaataaaacaaattttccataggtactttatgccatatatgatcttaataaaatcataaatgtagttgaagaagtttgtagagattataagagctatagagtaaaagggagattgtagaatcaagggaagtaagaaatggggaccaatacagcaaaataagaggactattaaataaaaacagcaaaaaacagaggacatacagatgaaaatgtaattgctagcatagagaaagggcctgagataataacagtggaaagaggaaagagaaattaacactattagagaaaagacaaaaactataaacatcagtataattggtgttgctgaagagagcccaaaaaatcaactagaaaaaaggtactaaacaaccaaacattttcctgcaataaaacaaagaactgaatatacaaagcctaaattgtaagacaaagacttagatttgctacatttgtcaactttaatcatagaggaggattgaagacttcagatagaaaaggcaacgcatctcacgtgcaaagacacacataggcttaaaataaagggatggaggaatatttaccaagcaaatggaaagcaaaataaaaagcagagattgcaatcttagtctctgataagacagactttaagccaacagagatcaaaagagacaaagaagggcattacataatggtaaagggatcaatgcaacaagaaaagctaactgtcctaaatatatatgcacccaatacaggagtacccagattcataaagcaagttcttagagacctacaaagagacttagactcccacacaataatagtgggagactttaacaccccactgtcaatattagacagatcaacgagacagaaaataaaggatattcaggatctgaactcagctcaggaccaagtggacctaatagagatctacagaactctccaccccaaatcaacaaaatatacattcttctcagcaccacatagcacttattctaaaattgaccacatgattgaaagtaaaacactcctcagcaaatgcaaaagaatggaaataataacaaacagtctctccgaccacagtgcaaccaaattagaactcagggttaagaaactcactcatggccgagcgcagtggctcatgcctgtaatcctaacactttgggaggccaaggccggtggatcatgaggtcaggtgatcaagatcatactggctaacatggcaaaaccccatctctactaaaaatacaaaaaaagttagccgggcatgatgccgggcacctgtagtcgtagctactcaggaggctgaagcaggagaatggcgtgaacccgggaggcagagcttgcagtgagccgagatcacgccactgcactccagcctgggtcaacagagcgagactccatctcaaaaaaaaaaaaaaagaaaaagaaaacaaactcactcaaaactgcacaactatatggaaactgaacaacctgttcctgaatgactactgggtaaataacaaaattaaggcaggaatacagaagttctttgaaaccaatgagaacaaagtcacaacatgccagaatctctgggacacagctaaagcagtgtttagacagaaatttatagcagtaaatgcccacaggagaaagcaagaaagatctaaaatcaacacgctaacatcacaattaaaagaactcgagaagcaagaacaaacaaattcagtagctagcagaagacaagaaataactaagagcagaactgaaggagacagggacacaataaaccctttaaagaaaatcaatgaatccaggagctggttttctgaaaagattaacaaaacagatagactgctagtgagacaaataagaagacagagaagaatcaaatagacacaataaaaaatgataaagggggggatatcaccactgatcacacagaaatataaactaccatcagagaatactataaacacctctctgcaaataaactagaagatctagaagaaatggataaattcctggacacatacaccctaccaagactaaaccaggaagaagttgaatcccttaatagaccaataacaagttctgaaattgagccagtaattaatagcctaccaaacaaaataagtccaggaacaggtagattgacagccatattcatccagaggtacaaataggagctggtaccattccttctgaaactattccaaacaacagaaagagggactcctccctaactcattttatgaggccagcatcatcctgataccgaaacttggaagagacacaacaaaaaaataaaatttcaagccaatatccccgatgaacattgatgcaaagattctcaataaaatactggcaaaccgaatccagcagcacatcaaagagcttatccaccacgatcaagtcggctttatccctgggatgcaaggccggttcaacatatgcaaatcagtaaatgtaatccatcacataaacagaaccaatgacaaaaactgcatgattatctcaaaagatgcagtaaggccttcgataaaactaggcctttgataaaataggcccttcaataaaattcaacaccccttcatgctaaaaactctcaataaacttgatatagatggaatgtatctcaaaataataggagctatttatgacaaacccacagccaatatcatactgaatgggcaaaggctggaagcattccctttgaaaactggcacaagacaaggatgccctctctcaccactcctattcaacatagtattgaaagttctggccagggcaatcaggcaagagaaagaaataaagggtattcaaataggaaaagaggaagtcaaattgtatctgtttgcagatgacatgattgtatatttagaaaaccgcatcatctcggcccaaaatctcctaaagctgataagcaatttcagcagtctcaggatacaaaatcggtgtgcaaaaatcacaagcattcctatacaccaataatagccaaatcatgagtgaactcccattcacaattgctacaaagagaataaaatacataggaatacaacttacaagggatgtgaagggcctcttaaaggagaaccactaaccactgctcaaggaaataagagaggacgcaaacaaatggaaaaacattccatgctcatggataggaaaaatcagtatcatgaaaatggcccaactgcccaaagtaatttatagattcaatggtatccccatcaagctaccattgactttcttcacagaattaggaaaaactaccttaaattatggaaccaaaaaagagccagataatcctaagcaaaaagaacaaagctggaggcatcacaccacctgacttcaaactatcctacaaggccacagtaaccataacagcatggtactggtaccaaaacagagatacagaccaatggaacagaacagagccctcagaaataataccacacatctacaaccatctgatctttgacaaacctgaaaaaaacaagcaatggggagaggattccctatttaataaatggtgctgggaaaactggctagccatatgcagaaaactgaaactgcacccctttctttccccttatacgaaagttaactcaagtggattaaagacttaaacataagacctaaaaccataaaaaacgccagaagaaaacctaggcaataccactgaagacataggcatgggcaaagacttcatgactgaaacaccaaaagcaatggcaacaaaagccaaaattgacaagtgggatctaattaaactaaagagcttgtgcacagcaaaagaaactatcatcagagtgaacaggcaacctacagaatggaagaaaatttttgtaatctatctatcggacaaagggctaatatccagaatctgcaaggaacttaaatttacaagaaaaaaaacaaccccataaaaaagtgagcaatggatatgaacagacaattttcaaaagaaaacatttatgaggccaacaaacgtgaaaaaaagcacatcctcactggtcattagagaaatgcaaatcaaaaccacaatgagatatcatctcatgccagttagaatgacgatcattaaaaagtcaggaaacaacagatgctggagagcatgtggagaaatgggaacacttttacactattggtgggagtataaattagttcaaccattgtggaggacagtgtggcgattcctccaggatccagaaccagaaataccatttgacccagcaatcccattactgaggatatacccaaaggattataaatcattctgctataaagacacatgcacacatatgtttattgcagcactgttcataatagcaaagacctggaaccaacccaaatgaccatcaatgatagactggataaagaaaatgtggcacatatacaccatggaatactatgcaaccataaaaaaggatgagttcatgtcctttgcagggacgtggatgaagctggaaaccatcattctcagcaaactaagacaggaacagaaaaccgaacactgcatgttctcactcataggtgggagttgaacagtgagaacacgtggacagggagggaaacatcacacactggggcctgtcggagggtgaggggctaggggagggatagcattaggagaaatacctaatgtagatgacaggttgatggatgcagcaaaccaccatggcacacatatacctatgtaacaaacctgcacattctgtacatgtatcccagaacttaagtataatttttaaaaaatgcaattcatgagctaaacagaaatattcaatatcaaaagacattagatccatgcccacagaattctgaggaaatgtgaaaaatattatacttaatattaattgtaaagataataagcattttcttacacatgaaataagtcaggtagaaaacacctgtgatttcataaaagtcccacccttcttggagaaagaacaatcagcaatgaaacacagccaatcaagaaacaaatggagaagttgtcataaaaccattattgatccctttaagtaaataattagtactaaacactgtggaaattatggtaaactgccatagacattaaaaaagtgaacataattaaataaaaataaggagttggaaggatacatgagtgctaattttcttataatttattgtatagaattcattaatactgtctaaaaattacatttcaactttagcataaagccaaaaaatttttagcgttttttattcttaacattagaaaagtattttaaaactgttgagatgatggtaaatttatctgatgcatacaaattgttttagcttcactgtctaaatatgtatataaaaatgtctcatcatcttaaatgattctttctagatagaaacatttttgagtaattgttttgctgttttgttttctgtattatttgaatttttgaatatttatcacttttataaaggaaagacagtaatcttttaaaatgcgttcttttatacaacaattacattatttaggtggaagaaatttctaataaagttcatttaaaagtaaaatggatcgggcatggtggcccgcacctattaatacagtgctttggaaggccaaggagggaggatcccatgagcccaggagttcaagaccaacctaggccacatagggagaccctgtctctgcaaacctttttaaattagctaggtgtgatggtgtttgcccatagtcccagctacctggaaggctgaagggggaggattgcttgagcccaggagattgtggctgcagtgagccatgatcgtgctactactccagcctgtgtgacagagcaagaacctgtctgaaaaaaaaaaaaatgcatagtcagaaggataataatacaattccctttttgagtataaattaacacaattcaattgtaatctagcttaaagagtttttactcatttatataaagagaataactttcttacccccaacacaataaaagacacctttgcacatgttaaactttaaacatgattggaaccataccttaaatctaaaatagttgaaaccaatattttaactgggaagaatgaccaaagaagtcttgtttagacttaagatataactgtctgaggacagcagtttagaatgatttgtctagtctagcctaaaatgacgtgcctggtctgcattctcagagtgttaggcaatttatatacataaatatccatcctctttttgagagtagaaattcagattatttccacagctatacatacacattgattttcacctgagtgaggagtgataacttcatatttactaactttgagttaaagcctcatggaagactctcataaacttttcataaatgaatttttagtccaattcagtagagatattttaatgaaatttactagaatgtggggtcaatggatcatcttattaacatgaaattagggaagaaattagttctctgtttaaaactgctttataataacagataagattacaaaataaaaaggaagtaaaaactaaaaagttaatatttatttaattaactaaatttatttaattaactaaattaactaaatttatttaattaactaaattaactaaaaagttaattttaatatctccaatatttaaaaatgattatgtatttgttttttcataatataaaacatttattaactataaaatgtctgctgtttgcactaattagttagaatctttgaatttgcttttatctttttttcacaatttcatttctttgacatgtttatatttaatttttgtattttgtgtgccttgagccaactcttctttaagtatatcataatccaagtcattcaaaatactagacactcattttacgaagaaaacagtattcttgtatatcttagttccataggtgaacattagttgcttgccctttacacttatctacctagccaaaaaagagaaaaaaaaagccttactgaataaaaacatctgagggggcagaaaaatgcgctaatgttagacattacattaaaattttaaaatgtcttcttaaataagagattacttttttttaaaatcttcagatattgatgaatgctccttccaaaacatttgtgtctttggaacatgtaataacctgcctggaatgtttcattgcatctgcgatgatggttatgaattggacagaacaggagggaactgtacaggtatggtcagttaccagctaagttgtgttctgattcattgaaatgagtattctgtgctaagcataaaaattcctgagatttctgcttagctaatctatgcattaggttacacatttttcagaaaaagaaaattatattcagatgcatttatttgtaactatggaattgatgcatttttatgtaaataatattaaattgttatctgtatgattgttaaatatctgacatgaaactagtaaagtgtctctttatatatatgttcatgtatatgtatatatagtacatgtatatatatatatacatgtatatatgtgatttttgttaagcaaatagtgacataattttttcgtcctcagagttgcaaattttaattaattacaatgtatttgttaaggatgttaaacgctgtcataaatactctgtccttgatgtatggaacctgttttaggtatataccaaaatttaagatatttattttattgtgttgagtctttcctagtgatctttaatctactcacttgcaaaaattccaccaaattctttggaacagcagtatgcacagaaaaagtaaaaatggtaacctgggcattttaaatgcttctcctagatattgatgagtgtgcagatcctataaactgtgtcaatggcctatgtgtcaacacgcctggtcgctatgagtgtaactgcccacccgattttcagttgaacccaactggtgtgggttgtgttggtaagtaaagctatatgaaacaaacaaatagaattatcaagttgaatattcagactctcttgataatgaaccgtgatgagtgtttgctacagttaacttaaaaacaaaacattatgtggtcgcctttattgtgtttctcttccaaatcatctgctccaccttcctcctctcacggacttgagaaccaaggcacagagaagtgcagtaatttgttcaaggtctcagagcttgaaagtggcagagctaaggcagtggcccaggttgccacctggctccttgtccagcgtttggccaggataacccagagtggtggtatagctgttagaatatctatttctcctgcctactggaagggtcatatagcaaagtaaatgaagtgatgagaagcaaggaattagagagatggatttatgagccaaaccattggagcagaagaagttggaaggtgacagggaggaggaggaggccgtaatgaaggttcagaatctgtggtcagcacctctgatcttaaaaaaacaattgtccagcttttactatctgcactgttactgtattttcctagagaaggaaatggcctggagaattttctggaagtatacaaaaaaagggaggggtggagaattccttgcttgagtagaaatctgcctactgtcctcagtgtcagtttttgggcctgcagcaaatggaaggaatatttgctgctgtgatttatacacaacttatatactgttttcaagttttggagaatacttttaattatcatttacacaaactccaagtctgtgttttccattcaaaataattcatttggtaaagtttgagtgccttctgtctaagggctggagttgcaacagtgaacagaacaagcacattctctgcttttgtgtttacattctagaggcagggagataaataaaagcaagaacaaacagaattggcactggaggtggttggaggagaagcgctatgttatattagggatgggggagtcacagcctttaaggaggggacagaccaactggaccactgagggaagcctccagttacaaggagaagccagtgcaaggggcatgtggcaggagaaggctggcgttagagacacagcacaaggctgcttgtagcaagagaggagtgagtggaggggacagggatgaggagaggaatcagaggagcagtcgcccagttcgcaaagtgattctcaacccaggctgcatagtaaactccatttagaacctggaaaagatattgatgcctgttacaccctcagaaattctgactcactggggcctcaatatttcttaaaaacctccttggaacaaaggctgtgaacaggcagctcataaaagagaatagtctaaacattaaaaaatgtaagcaaacaaatgcccaaaatcattaggaataagaaatccatttgaaacaattatatgaatgccactttacacttcatatactggcaaaaattaggaaacctggataatgtgaagtattggtggggacatgagccttgaggagcattctgttctgctggtagaagtgtagaccagggcagcactgcagataatatgtttgcacaatggtacaccgattaactgtcaatgtataatcaattttagtttatgagtttctttttgaagcaattcgatttgtatggattgacactttattgcgttcactcattcttagtgccaaaaaaacaaggacttattctatctcaaaagtgccataggaatctattggaacctttcgtaggtctgaaacattataaaatattaagagatcttgtttttcctttgtcttgaaacattttgacgttttatcatcctagctgttatttttgtcaatgttcaacattatgtccaatggatacaacagagtaaaataacgagaagtggaaaattatggcatcacctagaagtaacatgcattagtgaaataaaatgtcactgttttatcatccttcagttttcttattatattgtcctaaggattgcatcatttttcaagaaagtgcaagagaagactggagacaccttacttgaaatcttcttttagcatttattgaacacagttgagaatttagaagtttttacttactggccataatttttggcaaagagaaaaaaatgaagttgagtcaggtaactacaaagagacagagagcagctcttttgtctagattctaaaggtgatggtgaagtgaatcatctaagcacaatcccagactacgtgtcttcagagaccaatatcctaggtgaatgttttcaaacttcagaatcagcaagtgaaaggacagtgtatttccgtagacaaaggaaatacagtattctcatccacttagtcaatagaaagaacttcaacccgcaatatttggtaacaagaacctgaaccatcccaggtttgtggattctttcatattttcatgacgtttctgtaccaaaatttaattgatatgattcataagcagacagagataaaggcaggtatgtataaaaggttactggaaggaaatatgtgatgtagaaatacagtcattagattgattgttctaattggtgttgataaatctaaaaatgaaaacattttctatttgtggagactttaaagaagacggctgtcctctcatcaacaaaatcatgaactgttaatgttttcaaacattcctttgggtattgcatttttatgaagcaagaacaagaagaaccagaaataatgataagctagaacctattagagatgtgtttgaaacctggaatcggtttttacaaactggatatattccaagttcatgaatgacagttgataagcaattagttgcattcagaagatcattttgagtagaatatcttcaaaaccaagaaaatatagattaaaaaattgagttagctatcattaaattgttattaatattgctaataaagttgttttcaacttttttcttctgtatattagttttataatatacctttcttctgtaaattattttttaaaatgacttaaaaatattaaaaattaaagggttccttggatgtagttggtaaatgatgactatttttcctgactgaaggctaagtataggcaaatcctgtgaatcaacaattccttttgtggctgtatatgccaatggaattaactcacaggcccatacagagacacatatatgatgttcatcacggcattctttgtggtggcaggattttagaaaccatttttggagaggagggtttttttttaaaagcaattatacaccacggagttgacagactggaggtttacagaacaagcatgactagaaaagttataaaaatgaaatgagatgtatgacaaaagacatttgtgtacatttaaaatgaacacattaaaacaaaaatatttattttgcaagagcacatgtaaaaagtaatagcattaaatacatttggatgatctggtagggaaggagaataggaatgaagaataggaataaaagagaaagggagggggaagagagagaaagaacaggtgaataaatgaggaataaataaacctaattaggctgggcgtggtggctcacgcctgttactccagcactttgggaggctgaggtgggtggatcacaaggtcaaaagatcaagaccatcctggccaacatggtgaaaccccgtctctactaaaaatacaaaaattaactgcgcgtggtggcaggcacctgtagtcccagctactcgggaggctgaggcaggagaatcacttgaggcagaggttgcagtgggccgagatagtgccactgtactccagcttggcaacagaggaagactccgtccccaaaaaataaataaacaaataaatataaataaacctaattagaagggggaccatgagaatcttgcagcctctgagatctgagattcagcaacaaaaacaaaatgcaaaatctgagacaaaaataaagtaaaataagtttttttaaaaagcccaaatgattctaatatgcagccagggatgaaaattactttgtagactgctaagaactctagattttattctgattgagaagagaagccattggaggttgcctgacctaaggtaatgctattgaagggtcactctggcttacagaaggtaaagtagaccatagtttagtcaaggatggaagttgagaaaagagttagaaaactattacattagactaggtaaagggataatgatggtggctggaactcagttggtagtgattaaaaaaaaaagatagtaatgatagaggcagtggtaagtagacagattccagatatgttttttttttttttttttttttttgagacagagtctcgctctgttgcccaggctggagtgcagtggcgtgatctcggctcactgcaagccctgcctcccaggttcatgccattctcctgcctcagccaccctagtagctgggactacaggtgcccgccaccatgctcagctaattttctgtatttttagtagagacgggttttcaccatgttagccaggatggtcgattccagatatgttttgaaggttgagtagacagcccttattactggattgaataaggaatcatagtaaggagtcaaaaatgatgtcaaagcttagggcctgtgcaactgaaaaaaaaagtgaatttccttttattgaaaatgcagaagactgggagagaagacggcagattttgtacatggaggaaagagcattgacagtttgattttagatgtgttaactttgaaataattattagatgtttaagagaagaaatgaaataggcaattggtagaagggtctagagttcacgggagagatgagatacagaaccataaatttgagagttctcagcaaaaaagtagtatttaaacccatagactcaatggagtgatctggatgataactgtagagataaagaaaagccttagattagttgatcccttaaatatcttctctaagtttgttgcaggctatcttttccaaaacctgcaaagttagctatgcaagttgaaactaaaccattggataaactcgtgatatagattaattatacaaaaaatgtattgtattcctattattggaggtccagtatgtcccaaatgagaaatttcttactatcttgtccattccatgagtataggaaaatatggtctatgtggatttctaaatataggaaagtctgccatgattggcttcctctgactcaatctcgaaaaagctgaaaagcaggagattgcttggtacttaaggattaaaaggaacctttcatgttaacgtacaaaatttgaatttcatcctttgagtgacttttccctaaaatggagtccttactatgtaagcaagggcaactgtaagctcctttgttgctctgcagacaaccgtgtgggcaactgctacctgaagtttggacctcgaggagatgggagtctgtcttgcaacaccgagatcggggtgggcgtcagtcgctcttcatgctgctgctctctgggaaaggcctggggaaacccctgtgagacatgcccccctgtcaatagcagtaagtacaaagctgaagaagaggaagaaaaccaactggtatctaaagatttgttgccattttattcctgagctgggagtgaggagtgtttagtgaggacaaaacaaaaaaactgaatttgaactactttcagtgatcactctgaaaccagccaagaatgttaaaggatttgaattcctctcttcctatgttttatcatgatatgttaaaaaaataatttttaactgtaatcatgtatgaatagtactaatatcagttcttcatgatgtcacagataaagtgcattcctgattcttctcaaaggttatttagttcagcttcataggtgtgttgtattcttgaagtcaattatagaatgccttaaattgaaacatctgatatgaacatgaaccaaagcctgttttctctagtcttaatttactagctaaaagagctgcaagggaattttttctttaattaaaaacaaatggttcgtgttattctactgtgtatgtgattaataaagtatgatcttttatgtaaaatatgtaactttaaatgtatttgaaagggcactaagaaaaatttggatacaccccttaggatgagtatattgagcctgtcatttgctgaatgcttgctcattgtctcagccacttggacacaggtatcaaacctcttatttttctattgttttgtagctgaatattacaccctgtgtcccggaggtgaaggcttcagacctaaccccatcacaatcattttagaaggtgagctaatcccattgtcacccagattcaaacaaggtaaagagttaattatagagaaaagctggcagaaaacctagggcagagcagccccgacaagataatttagtaaaattacagatggactttaattactaaaatgttaaactactacttttatcaagcagtaatgatccattgcagtgatttgacgtctgactgttctgcagagaaactctttcccattgtcctctaccttgaataatctccaacttaactttattcattttctcagataatggtaaaagttctgtgacaaagccaagaagatatttgagcagaataaacttgccatctaagtgtgcgttcatttggatgcatagaaatctgattcttacaagatcacacttttgaaagctctaatattaactcttatccttagtgaaggtgtttgttttaagtgcactgtctccctttttgtagacattgacgaatgccaggagttaccaggtctctgccagggtggaaactgcatcaacacttttgggagcttccagtgtgagtgcccacaaggctactacctcagcgaggatacccgcatctgtgaaggtgagatgaatttgatgcctaaaatgctcagtgctgtttaaaacaaaatggctgctgaggcctgagggaaaggcccatcctcacattctacaaaaggctcaattaagattggttcatagcttttttttttttcatatcaatgtagctaagttgtatgatgatagacaaattaatttatggctcgttgccataattcactgtatttttccaggagggttgattaaatataaattgggaaaatggggtagtgtgaaaacctaaaatattaagtaagttattagtgaaaatattgataagaattacattttacataggaaaaattggtaagctaaaatgtgaccattaacttaatattgatcagtaatttttaaatgttggactatatggtatgaagaagttcaaaggttatgcagctgccattcttgcttccatccccccactttatcacatggtatttcaattcttttaggggcctgtctcaccactaaactgggggcttctggagacaaggtccacatcttactcatcattacagccataagttctagcttacagtagaatctcaatattttaattgtgaaatgagtgaatgcttctaactgaacattaaacatgtagcgtaattatttccattataacttttcttttggaacatgtttgataaatgtatctggaagaaataggatgtaatgaggagaacaaccagcagctgcactgctttaagaatctctgaatagttactaatttgaaagaagctacaaagacaaaggctttcccaacctgcattcactttaaagttggcattaaaacttagcctaagtgacataggacaaaagcaggctttaaagaaattccaattgaagaatgcgaattgcaataaaaaaaaaaaaaatatatatatatatatatatatgtgccaaggaaattattttttgccactttagaataatttcttttgatgctttatattttttaatatggggatttttttcttttgaagaaagatgtatctgtgttatataaatgcatatttgggatattttctttatttctaagttttgcataaatggggatttagagaatcacctatgctttgttcagtcatctaagtaatataaattcattgaaaaaatagatttattaattaatagatattcttgcctactctagatattgatgagtgttttgcacatcctggtgtgtgtgggcctgggacctgctataacaccctgggaaattacacctgcatttgcccacctgagtacatgcaggtcaatggaggccacaactgcatgggtaggtaaagaactctgagattaattagagcacagttgttgacttcacacataaagcacttacgtctcagaattattgtttggaagtttggaagttcagtcttcgtgaattgagatatttcagagtcttgcaagctgctggcttagtatcaagtttttgacctttgggtatacatttaaatttttaaaagcatgagtctaatgtagaaaatttcctcaaatgttatatattcttaaatttttcatctccattcatatagtgtgaacattaatttacaaataaaagaacatttaaattttaatgctttatttttttaattaaataaatgattttgagagaaaaacaaatatgtattaacattgtctcccaagaaaattataagtgaaatcctttaaggataaaggagagatgttaatctaaaaatgatttatgtttaaggagttattttaagatagcttcaaatgactaaaaagggtttccgagttgtgttcatcaggaaagcttgatgtctacagctgtgtgggcttcattataaactactcgtggatacaaatggctagtttctttgtttttctttatatagacatgagaaaaagcttttgctaccgaagctataatggaaccacttgtgagaatgagttgcctttcaatgtgacaaaaaggatgtgctgctgcacatataatgtgggcaaagcctggaacaaaccttgtgaaccatgcccaactccaggaacaggtaagcacacggctcgtgcatctgctgactgccacatcagtgatacacgcatatatctaacagtatagtcaaagtcactgcatgctaaaactagagatgctcagttccaaaaattcccaagagcatcatatggttctgtttcccaagtgatcctctttgggattcaaacactaacttctgagacattatgttggataggcttgtgaatcctgaaaataagatccattgctgaagagttagagttgatagcattagtccatttaaactcattatcttaaactgtgcttgtcaattattgatttattcatcaaacaaatatttcttgagtaactactgtatgtcactgtgctagacatggaaagtataatatttggagaaaaactaaattcaataaggatttttttttagttcagccgtggaaaatatgcaaaaagtgttttttatgagcgaattttacataaaagcaacccattgtcataatgtgccttttacatcttcttcctcagacatcagtgaaatttttaggcaaaaaatagagcttgtcttcacttggtcatgtttttttcacaagacagtttcttttgaaagaaaaaatgaaagataatagagataagagcaaaaatgcttgtcttaaaattgctgtccatcaggctctcttttatgacctggagaatggcaacttttaataactatagatactaagagttgaaccagtaggccaaataagaaacagtgattatgcatttgttaccaaatattacttagggtatatgtatttaaatgttccatttaatgtattgatgaaattaaggagagaaatgatgaaaagcaacacataggcctttttcagtggctccaattcactggtcaaatggattttcttagccttatcttgccattattatgttccataaaattaaatagaaacattcctacaattctcaactttaaaactccatagttacaaatttaagatcattgatttggggaattaaaatggcactttctttgtgagaagaagcgaaaggcttggagttgagagacgtgtctgtatttaaatcaaaactcttaagatacttattgtggaacctcctgcagagtatgtatcctttctgaaactaatttctcatgtataaaataggaataataaataattacagtgactaattcatatgggtgcaatgacaattagggagattatacatataaattataatttgcagatttccagacaattagaaaccattaagttgagcatctgtggtctttctatctgttctcaatactcggtatatattgatggatgaaatatacaatatccctgacctgatagcacttggaatatagtatgcagtttaagttttatataatactgttttcaggagttttactcacttgtatagcagtgagcgtcagaagcatttttcatcttgcaaattagaattcttttaaatttccattgatttggttaattatgtgtaagaatacctcttatagtccctattttatttcataatgcattgtttttgatgactcaaatttcacattccaatagacacagtaaaaaaaaaaaagacaaaattcgcatctcattcattatacattgtttacctatttcccctctacaacattatttttgcatgtctatacctttgtgcaatctgtaattcctttttcaatttgtacttctctttttttttaatctttatgtattggatgttttttaaagctctgcatattaaaagaaaaagtatttaaatatctaaatggacattttgaatcttataatgatttacttgccttctgatatcagagcagtaaaaagttaatgagagtaatagaaataacaatgataataatggtaaagaatgcctagatccactcctagcagaagctggcattgctatcaaataaatataattgaaatcaaaatgtctggttgtgaataatgtaaaatatatttgtttgtgaaagtaatacaaaatgttattttgaaggaatttgagaaatttaagagtgcattgctttgtttatattttaaagctgactttaaaaccatatgtggaaatattcctggattcacctttgacattcacacaggaaaagctgttggtgagtttttccagattatgtttgttttaatacatatgtgtagcattctgtaaaaatctattctatgtttttaaaattcaagagtaccacaaaatataataatctgggatccaatctaatatagttagataagagagaaataacaggcttacagactctaaccaagtattaataatgatactccatcagcgtagtctggtgattgggttatggtagttatgtgactctctcgatatttgtcacatccaccaagctaaagcttcagttgtccttgtcatgcacattgtattacatgactctaaataatctaccttattttaacctttagttgctattttcttaagtacattttttaatttttggtgtatttttgcagtatccctttttactggtctaaatatgaatgtgcagacttatttttcatattaattaattccttctaaatgtacattgtgttgctcactctagcttccttcctcaaagatttgataagcaatataatttttttttttgagatggagttttgctcttgttgcccaggctggagtgcaatggcgcgatctcagctcactgtaacctctgtctcctaggttcaagtgattctcctgcctcagcctcctgagtagctgggattacaggcacccaccaccacacccggctaattttttgtatttttagtagagatggaagtttcaccatgttggtcaggctggtctagaactcctgacctcaggtgatccaccctcctcagcctcccaaagtgctgggattacaggcgtgagccaccacacctggcctaagcaatataattttaagtctccattatgaatatatgataaaataaaatacatacaatgatgaaaacatagctttttaaacaaatgaatagcagcacttagggtaacctgaagaaggggtttgattgcctagaaagttcatttgctatattgactctgaaattacttggtatattttatcagctacttagattttttccatcactgtttctattttctggtatatatgtttttataaaccaaaaaaattagctatactagtatataatagatttttgtgacactgaatatttgtactcatcccagggtacatgtagcattattcaaagttatatggtaagtatattaaacagaacaacatatatttgaccaaatctgttccatttcagacattgatgaatgtaaagagattccaggcatttgtgcaaatggtgtgtgcattaaccagattggcagtttccgctgtgaatgccctacaggattcagttacaatgacctgctgttggtttgtgaaggtaatctgaataaagtatgtcctttatccagtataatttggtatacatatatagcatttagatggtttctgatttttactatttcttctacaatttttcaagagttgatcatcaaagtgtgacgtgaatgtaatgctaatacaatactaaaaaggactctttaaaatggaattgttgctctttcagatatagatgagtgcagcaatggtgataatctctgccagcggaatgcagactgcatcaatagtcctggtagttaccgctgtgaatgtgccgcgggtttcaaactttcacccaatggggcctgtgtaggtaagaaagaggctgactcattctttggcactgagcacaagattccttagatttcctatcaaaaaatacttcaagaataatttgggaaagattttctcacttaacctgttcatttatagtgaacctatttcaccatatcttttagatgattttgttaagaaaatagatctcttcaatggatttccccaggattggacctaaaataaaataatatccttcagataccaataaacataaaaaaatttgcatgattaaaaaaagagggttggatactttgaagtcctgctcattttgattcagctgttgttatggttcattttcagcctgcctataataattaatagcagattagagaaacacaactgtgaaaaatgaagaaatcttaataaaaatcagatacatgtaacatttatttttttctgttttagatcgcaatgaatgtttagaaattcctaacgtttgcagtcatggcttgtgtgttgatctgcaaggaagttaccagtgcatctgccacaatggctttaaggcttctcaggaccagaccatgtgcatgggtaagaagggcatgtggctccagggagtgaagtggggctggggttccagaacagatcacagttccatcaagtgccatgagtaactactatgtctctgtcagaaacaatcttgcaaaaaattaactaggtcaaactatttaagtcttgattcaatataaaatttgcaagcagggacatactgcaatatataaaatttgcaagcagggacatactgcgatatgttcgtcagttcagtgattcacagctttttctccagaagatgttcacatggcttgacaagaaaaaaccctctgagccacttgggcttgtgtggaacttaccatagcacccgctgccctttactttcatgtttctactcaagacaccattttggaatgcaagagagtagtaagagtgacagcattaaacttaataaatttatacacatatgcacatacttttttaaaacaaattgttgaatagtgggatttatgtacatattttgtgttttatcccttaaaaatagctttaggagcaaatatagccaaactctttaaaaattcccagtagctaatgtaatgggtagccaagtggtaatagagcttagtgagtacttgctgagctgatgattaataggttttcaaagacagatgggctggatgccatgaagctgggactgagtataaccccttaagtctgatgtcagcagttggctctgcctctgctgaagagttttctttctgtgctttgcacttgaaaggggaaaattaaatttaaaacttggctacttgtaattagcattttctcagtgtagaaaaggctagggctgttcagctactcttgatattcaagatattatctatgtgaatattaaaatcagatttcagtactgcaggactggtttccttcatgacacatccatacaacagggaatacctggagtatgtctccaggttcatccattgcctcctaaagccctccctttggacttctcctataatggcagggaaaattctctaggtgatgtttatacaaaggaatatacaggatctggtcttatttgcatgaactccctaagaatgcttgtttatacatgcttcttcttgctgtactcccagagagagtatgatttaccaaaaaaaaatatgagatttatgattcagaatttcgtatggggaaaatctgtccactcataacaattcttccatgataaaagctagtcagattcttcagtaagacctcccttatacagagcttccttcctaaagaacaataccagcccccaccctttttttggtgtggtagagtttcagcagcctggaattcatagttggggagtctgctgtctcatatgatgaatgacctttctaaatattttcttaattcagtttttttgaaggctaatagtgaattctaataaacctcaatttggatttcattacttcatacaattaagtaaactaaagtttgtctttgtttttctgctcaaattaagggatttaaatttctgggtaagtgtttataatgccttttattatgaaagaaattgtttcagtattttagaagatcagttttatttacgattattaagcagacctgctcattaatacatctctactagggggatgctctcttaggctatgtctgagtattgtctgagtacagtcagtacctgttaaactgtactattttcttagaattttacaattttgattcttgtaattttgatttttccgtatctcttactcattttcctcaagtagatatgagtttctagtactgaatgaggaaaatctaagtaattccataagttaaacatataaaacggttaatagcccatttttttctagttaaaaattgaattttttgagcctatatttctttatagatgttgatgagtgcgagcggcatccatgtggaaatggaacttgtaaaaacaccgttggatcctataactgtctgtgctacccagggtttgaactcactcataataatgattgcctgggtaagtacttcattcagtcctttattgcttctatttcatttccacacaatgtgctgaaataaaaaacaaaactaaagaacaaaaaaaaattatattactaaaattgcaaatatgtgccaaaagatatataatttcattgactggtttctagttaactgaaaccatagtattggcctaaattgtcacaagacaatatactcttgaatccttttgtcaatcagccaatcatttcaggaaaaaaaggtcattcagatcacagtaaacatatttggactgatttatggtttagggtatttgtatttccttaatgagatcaaaaatagacccttcattgtctcaatgttattacaagtatttcatttaaatccattctggattatttacattcaagtaccagtagcctcctgcttacacctgtcatgacatttcattttccatcagcttttgaagccagaatgcctttccccacaaaaataatgaatggtgactaggtttctagataagccctcagaaatatctcctatgcgccatacaggactttagtctttggcccacagcaacacacaaatgtgaaatggaaacatagtgagtgggagagggtcctgaagtagttggaggagagaataagagaaatgacagcaaacgtttattccttgtttactgcatgccaggaactgcatgggtaatttacagcataatgtgttgtaattcgcatggccctgcaaggtatgtgaaagaacttaggttttctaccattgtgggactacatcagagctcatccccacgtcctcatttaacccaacataagttcctctctgttttctttatttttcaaaattccacaattgtgaaaaaaagtagagctaattggacattttattcaactgctgccttcttgactagtttcttagagcctttgtacagtcagggagaactaaaacttaaatgaaaacttaatacttaatgtcttttttctttcaattatgtttgatatcagcaattccagtgtttttaatatcattgattttccagtaataaataagctcatttatttgttctctgaatatgctcagcttagctccaggtaaagtatatgcaaattaggcaatcagattaaatcccacatatcctcctgcctgtgggaaaataaatatttttcagttagaaagaatggaaagcttcaccgtaaaccttgatttttatctggttctaaattcatgagttatattaatatcaaaaatgaaaaaaatgtatctttatggttgaaaaatagtaggactctatgggatcctattaattatatgatccttatgatatgtgccatttttctctgttgatgaggagttgtaatatgggatttcttataaatgcatgccaataagtatgtttttaagtagcgtcttgtgaaacaatatacatgttaagagctctttctgaaaaacatactcctgtttgcttacagacatagatgagtgcagttccttttttggtcaggtgtgcagaaatggacgttgttttaatgaaattggttctttcaagtgtctatgtaacgaaggttatgaacttaccccagatggcaaaaactgtataggtaagtatttaaataataagcagtctttgtggtgttatgttttgtaaaatgatgatatgtgcctccctcctttcacttaagaactcattaatatttcatttaatcatcagagcacatgaccaagataagctatgatggaaaattttagtataaggtatcaacaatgggaatgtctcataggcagtgtttttactggggacagagcttgaggctgtccatgtcttaagaaaagtaagcaaagacaacaaataaagaaaattagccacttgccaaataagaaatatccaagatgtcagaagagtatctttggtaatatttgttcatggtgacccagtagatcagaggacccgagttgaattcatgttaatatcatttggcagacagataaatctatgtaacaattatctcatgcttaaattattttttctcttctttttctctaaagacactaatgagtgtgtcgcccttcccggctcttgctctcctggtacctgtcagaatttggagggatccttcagatgcatctgtcccccagggtatgaagtaaaaagcgagaactgcattggtaagagtaacatttattctgaggcccactagtagttcagtatagtaagacatggtaaagactctggaaacatactaagtgccaaccactgcaagcatgctgacctaaggaattaaacatatagctgcctacatctgttttactgaaccatcagaaatgatggtgagaataaaaaacttagggatgtaggattttttcattaccagaaatctaatgctagtcaaagaattttcagcatatgctaattaatcttttttccaaatgtcagcagcgactttcagtgaatttaaagagtgtctacaaaaattgtaatctttggcacccagttttaaaacagctattaaaggtgtctagggtcttagaaatgtgaagcagaaaaatctcgacaatgctgttgagacattctttttcttgggaaggcctcatgtcaaagcagcaaatattaatccatttgtcataacagatgtttttctgttgaaacccttccagcacacacgaacactgtaaccacatcaaaagtgtgtcccagaattgcctagtggacatgatgaagtccgaccttttttacagttcactttatttcacttttatacaaattattttttacagccttgttgaaattcagaagcaccagcattttagtgtggtttttctaacgtgaaaagatgctaaggatattttctgcctttgaattatccaattctatcgcccttggcaagattctacctaaagatatgtcattctactgttcatatttaagggagttaaatagggcagaaggaagtagtttacttcatagaatttaattattcttcagaccacataattagataccatgggtatcccctagtcattctgattttctgatttgtatagttcattataagactagtgtttttaatacttaaaaaataataaacaataatactagaatcatctcagtgagaagtttcttgaaaagtttaaggggggaggagccaagatggccaaataggaacagctccggtctacagctcccagcatgagtgacggagaagacgggtgatttctgcatttccatctgaggtgctgggttcatcttactagggagtgccagacagtgggcgcaggtcagtgggtgcatgcactgtgcacgagccaaagcagggcgaggcattgcctcactcgggaagcgcaaggggtcagggagttccctttcctagtcaaagaaagtggtgacagacggcacctggagaatcgggtcacttccacccgaatactgcggttttccgacgggcttaaaaaacggcgcaccaggagattatatcccgcacatggctcggagggtcctatgcccatggagtctcactgattgctagcacagcagtctgagatcaaactgcaaggcggcagcgaggctgggggaggggcgcccaccattgcccaggcttgcttaggtaaacaaagcagcccggaagctcgaactgtttggagcccaccacagctcaaggaggcctgcctgcctctgtaggctccacctctgggggcagggcacagacaaacaaaaagacagcagtaacctctgcagacttaaatgtccctgtctgacagctttgaagagagcagtggttctcccagcacgcagctggagatctgagaacgggcagactgcctcctcaagtgggtccctgacccctgacccccgagcagcctaactgggaggcaccccccagcaggggcagactgacacctcacacggcccagtactccaacagacctgcagctgagggtcctgtctgttagaaggaaaactaacagaaaggacatccacaccaaaagcccatctgtacatcaccatcatcaaagaccaaaagtagataaaaccacaaagatggggaaaaaacagagcagaaaaactagaaactctaaaaagcagagcgcctctcctcctccaaaggaacgcagttcctcaccagcaacagaacaaaactggacggagaataactttgacgagctgagagaagaaggcttcagacgatcaaattactccgagctatgggaggacactcaaaccaaaggcaaagaacttgaaaactttgaaaaaaatttagatgaatgtataactagaataaccaatagagagaagtgcttaaaggagctgatggagctgaaaaccaaggctcgagaactacgtgaagaatgcagaagcctcaggagctgacgcgatcaactggaagaaagggtatcagcgatggaagatgaaatgaatgaaatgaagtgagaagggaagtttagagaaaaaagaataaaaagaaatgagcaaagcctccaagaaatatgggactatgtgaaaagaccaaatctacgtctgattggtgtacctgaaagtgacggggagaatggaaccaagttggaaaacactctgcaggatgttatccaggagaacttccccaatctagcaaggcaggccaacattcagattcaggaaatacagagaacgccacaaagatactcctcgagaagagcaacaccaagacacataattgtcagattcaccaaagttgaaatgaaggaaaaaatgttaagggcagccagagagaaaggtcaggttaccctcaaagggaagcccatcagactaacagcggatctctcggcagaaactctacaagccagaagagagtggcggccaatattcaacattcttaaagaaaagaattttcaacccagaatttcatatccagccaaactaagcttcataagtgaaggagaaataaaatactttacagacaagcaaatgctgagagattttgtcaccaccaggcctgccctaaaagagctcctgaaggaagtgctaaacatggaaaggaacaaccggtaccagccgctgcaaaatcatgccaaaatgtaaagaccatcgagactaggaagaaactgcatcaactaacgagcaaaataaccagctaacgtcataatgacaggatcaaattcacacataacaatattaactttaaatgtaaatagactaaatgctccaattaaaagacacagactggcaaattggataaagactcaagacccatcagtgtgctgtattcaggaaacccatctcacgggcagagacacacataggctcaaaataaaaggatggaggaagatctaccgagcaaatggaaaacaaaaaaaggcaggggttgcaatcctagtctctgataaaacagcctttaaaccaacaaagatcaaaagagacaaagaaggccattacttaatggtaagggatcaattcaacaagaagagtgaactgtcctaaatatatatgcacccaatacaggagcacccagattcataaagcaagtcctgagtgacctacaaagagacttagactcccacacattaataatgggagactttaacaccccactgtcaacattagacagatcaacgagacagaaggtcaacaagcatacccaggaattgaactcagctctgcaccaagcggacctaatagacatctacagaactctccaccccaaatcaacagaatacacatttttttcagcaccacaccacacctattccaaaattgaccacatacttggaagtaaagctctcctcagaaatgtaaaagaacagaaattataacaaactatctctcagaccacagtgcaatcaaactagaactcaggattaagaatctcactcaaaaccgctcaactacatggaaactgaacaacctgctcctgaatgactactgggtacataacgaaatgaaggcagaaataaagatgttatttgaaaccagcgagaacaaagacacaacataccagaatctctgggacacattcaaagcagtgtgtagagggaaatttacagcactaaatgctcacaagagaaagcaggaaagttccaaaattgacaccctaacatcacaattaaaagaactagaaaagcaagagcaaacacattcaaaagctagcagaaggcaagaaataactaaaatcagagcagaactgaaggaaatagagacacaaaaaacccttcaaaaaattaacgaatccaggagctggtttttggaaaggatcaacaaaattgatagaccactagcaagactaataaagaataaaagagagaagaatcaaatagatgcaataaaaaatgataaaggggatatcaccatcgatcccacagaaatacaaactaccatcagagaatactacaaacacctctacacaaataaactagaaaatctagaagaaatggataaattccttgacacatacactctcccaagactaaaccaggaagaagttgaatctctgaatagaccaataacaggttctgaaattgtggcaataatcaatagcttaccaaccaaaaagagtccaggaccagatggattcacagccgaattctaccagaggtacaaggaggaactggtaccattccttctgaaactattccaatcaatagaaaaagagggaatcctccctaactcatgttatgaggccagcatcatcctgataccaaagccgggcagagacacaaccaaaaaagagaattttagaccaatatccttgatgaacattgatgcaaaaatcctcaataaaatactggcaaaccaaatccagcagcacatcaaaaagcttatccaccatgatcaagtgggcttcatccctgggatgcaaggctggttcaatatatgcaaatcaacaaatgtaatccagcatataaacagaaccaaaaacaaaaaccacatgattatctcaaaagatgcagaaaaggcctttgacaaaattcaacagtgcttcatgctaaaaactctcaataaattaggtattgatgggacgtatctcaaaatagtaagagctatctatgacaaacccacagccaatatcatactgaatgggcaaaaactggaagcattccctttgaaaactggcacaagacagggatgccctctctcaccactcctattcaacatagtgttggaagttctggccagggcaatcaggcaggagaaggaaataaagggtattcaattaggaaaagaggaagtcaaattgtccctgtttgcagacgacatgattgtatatctagaaaaccccattgtctcagcccaaaatctccttaagctgataagcaacttcagcaaagtctcaggatacaaaatcaatgtacaaaaatcacaagcattcttatacaccaacaacagacaaacagagagccaaatcatgagtgaactcccattcacaattgcttcaaagagaataaaatacctaggaatccaacttacaagggatgtgaaggacctcttcaaggagaactacaaaccactactcaaggaaataaaagaggatacaaacaagtggaagaacattccatgctcatgggtaggaagaatcaatattgtgaaaatggccatactgcccaaggtaatttacagattcaatgccatccccatgaagctaccaatgcctttcttcacagaattggaaaaaactactttaaagttcatatggaaccaaaaaagagcccgcatcaccaaggcaatcctgagccaaaagaacaaagctggaggcatcacactacctgacttcaaactatactacaaggctacagtaaccaaaacagcatggtactggtaccaaaacagagatatagatcaatggaacagaacagagccctcagaaataacgccgcatatctacaactatctgatctttgacaaacctgagaaaaacaagcaatggggaaaggattccctatttaataaatggtgctgggaaaactggctagccatatgtagaaagctgaaactagatcccttccttacaccttatacaaaaatcaatccaagatggattaaagacttaaacgttagacctaaaaccataaaaaccctagaagaaaacctaggcattaccattcaggacataggcatgggcaaggacttcatgtccaaaacaccaaaagcaatggcaacaaaagacaaaattgacaaatgggatctaattaaactaaagagcttctgcacagcaaaagaaactaccatcagagtgaacaggcaacctacaaaatgggagaaaattttcgcaacctactctgacaaagggctaatatccagaatctacaatgaactcaaacaaattgacaagaaaaaaacaaacaaccccatcaaaaagtgggcaaaggacatgaacagacacttctcaaaagaagacatttatgcagccaaaaaacacatgaaaaaatgctcaccatcactggccatcagagaaatgcaaatcaaaaccacaatgagataccatctcacaccagttagaatggcaatcattaaaaagtcaggaaacaacaggtgctggggaggatgtggagaaataggaacacttttacactgttggtgggactgtaaactagttcaaccgttgtggaagtcagtgtggcgattcctcagggatctagaactagaagtaccatttgacccagccatcccattactgggtatatacccaaaggactataaatcatgctgctgtaaagacacatgcacacgtatgtttattgcggcattattcacaatagcaaagacttggaaccaacccaaatgtccaacaatgatagactggattaagaaaatgtggcacatatacaccatggaatactctgcagccataaaaaatgatgagttcatgtcctttgtaaggacatggatgaaattggaaatcatcattctcagtaaactatcgcaagaacaaaaaaccaaacaccgcatattctcactcataggtgggaattgaacaatgagaacacatggacacaggaaggggaacatcacactctggggactgtggtggggtcgggggaggagggagggatagcattgggagatatacctaatgctagatgacgagttagtgggtgcagcgcaccagcatggcacatgtatacatatgtaactaacctgcacattgtgcacatgtaccctaaaacttaaagtataataattaattaattaattaaaaaaaagaaaagtttaagatcctgttgttcttccattttctttgctcatgctcaatcttgattcttctttgtctctgtgatccttctctttatggaatgctaataaaagtagtgtgtcagccactaggagggaaatagaaatacatatgcctccttgtattaggcagtcttggctacctttcctcttaatgaaagtatggatagcttttatttcattaagatatcatatattattatttattaagtttcagaaatatttcgttttccttcatctatcgttagcaatgacactagtttgcatctctgaaaaaatggttttaatttattactttttttttttgagacggagtctcgctctgtcactcaggctggagtgcagtggcattatcttggctcactgcaacccccacctcctgggttcaagtgattctcctgcctcagcctcccaagtagctggtattacaggtgcccaccaccacgcctggctaatttttgtacttatagtagagacggtgtttcaccatgttggccaggctggtctcgaactcctgacctcaagtgatccactggcctcggcctcccaaagtgtgaaaaaatggtttttaattaacttacttcactgtaagattttcttcagactagtatcttttctaccaacttttcccagatgacattctaacatgaccacacacacacatacacagacatagatatgtgtacacataccctgcacagatataaattcattcctacattcagtgggtatgacagtgaacatttggcacctttctaggtgctagaaatacaggaacatcatctttgctttggggtaacttactacctaaggggagagacctattttgtaaataaacctgttttgtgaagacatccttataatacaatgtgacagacattgtactggaggtctgttcaggagatgggagcaccgcaggaggttagggatcattatggtagttgtgagagggtggcagttcaagaaagcctgtcacagaggattgatgattgtctaggtcactcttaaatgttggataggattttactgatcaaccaaagaaagagaacagaagaggctatttggaaacataggcagcatgagcacgacaaggagcatagaatggctggctcagaagattgaactcaggcctgcggtcagcgtggagccattgcaggagttgttgtgtttgttttttttgttgttggtggtggtggcggtggtgttggtttctgcagttttttgttgttttatagaagggatgtgatgactcttttgttaaacttctaccaacataaattgagaacttgtgtgtgccagataccgtgctaggagctaaaggtgcaacagcgagccagacagacatgtcatgtcctcatggagcttacgttctaatgtgcctgaaaagtagtattttttcatgtgattaaaacattccattaaataagtacttcccacaaaaaaaacgacgaaaaatcactagtcaggcaggcatgcttatttattttaaggaagcgttctggggaaagggggaaatgataacactgtcaaaatatgtctcagccctccatttccataggcacagattttcaaatgtaatcagatggacgttttagaaaggcagccctggtggcaatgtgacaagaagaagacattcaggagatgtagacatcagttgagagactggtggcaaatgatgatggctgtggaagtactgaggaggtagaaatggctgccacattctgcttgcatgtggagtgaaaaaaggagagaaataggggtgacatggggatcacaatttggattactgagagagagttatcagggagaaggggaccagttcatagaacatttggccacatggagcctgcaatgcccatgagacatggagttgttcatgtcaggtaggcaggtagacatacatacacccctaaagatcaaagacaggaaggtggacatggacttgggactctctggcacatggttggttgaaattacaacttttgacttctgaagcaataatagtttatttttatgaataagttaaacatacaacgtaatatctcttgtctgaaatatcagctggctagtggacagtgatagtatggacaattgtttattttcaagtgttgaatggctaataaatactccccctgttctgcagatataaatgaatgtgatgaagatcccaacatttgtctttttggttcctgtactaatactccagggggcttccagtgcctctgcccccctggctttgtactatctgataatggacggagatgctttggtaagatttggcatgacttcactgtcacagttcacgcttagaaactttaaagctgaattgtaaaccatcatgctggtattagtcctaacaaaatacatgtctatgctaaaatacatctgcaagttaaaaatttaggtctcaaacataagcaatgaacaatttttaaggtactttgaattattgccactgtttctacatttttataaatttttttactaaaagaaaaattcttattctgatttatcagaatgactatgttaattttgttgttgtcatagcttttttgtttgttggtgtatgtgatgcttttgatgtgatgtaacttactgaaagttaccttgattgtttttcttagactatcatgcaacagtgaaaaaagagactctgtgtggaaatcactttgatactgagcatgatttctcgaattttcttagcacattataaaaatattttaagcatattaaataattaaataattttatagccaggtcagtctaaattggcaaatgaaatcagcaatcgaagatttccagacctgccttaactgctgatctagtctgcatcccgtgttctacaatgagaaatgttctgtccaaacagtgttacaaaataattccatctgtaatgtttgcttttttgattagatactcgccagagcttctgcttcacaaattttgaaaatggaaagtgttctgtacccaaagctttcaacaccacaaaagcaaaatgctgctgtagtaagatgccaggagagggctggggggacccctgtgagctgtgccccaaagacgatgaaggtaagagcaatgacatcatcagacagcactttgtgtaccagtttttgaatgtttgccagagtgggtttaaccatgtaatttaagaatattttgagagtgaaatcatctccttgcatataagttttgatggttcattgaacaacctagcctgagaaacttctttcagcttttgaataagacatgtctaagcacaggtggagttacccttttatttcattccccacctccaaggttagtattacttgctttcaaaagtacgaatttgagaggtccaaggcaggagaaagaagggaatggaaattatattccaggttgctccaggagtcccatgtgggcattgtatcacaggctgtggctctcagaatgttacattaaattctgagaagctgagtcagcacaatggccctttacaggaaaagatcaatagcctcaggtctcattggcacccataaattataggataattcccagcaaactccagctggcttggcctctgggttagggatggcttctgagtgtgatgggcagggaagttctctttagctgctcagctttaaatgagcaaacagaaagaaccaggagcactgagcaggtggcaccctagaaggtggccctcactaaatatgcttttgaaataaatcataaaaataaaagagtcttgttatagacagctttgtaatggaaacataattaagtgtaatttcatgtatattgttcatcctttcttaagttctttgataatttcaagtcttcaataatggagaatttgtatttttctttgtagttgcatttcaggatttgtgtccatatggccatggaactgtccctagtcttcatgatacacgtgaaggtacgctttgatatattttattcctatattcttatttaatacacacgtattattttacatttattttataactcatgctaactttactatgtaacatatagtatattgtatttaatggatgtatataacccttattttgtatcatatacattatacatatatcataagattatatcgtgatatatgaaatacatatttctctgacaaaagaagtatttacaagtctgtgttgaatagacatacacagtactggcatatctttttatttttattttatttatttatttatttattttgaggtggagtctcactctgttgcccgctggaatgcagtggtgcgatccagctgactgcaacctccacttcctgggttcaagtgattctcctgcctcagtctccccaagtagctgggactacaggtgtgcgccaccatgcctggctaatttttttttgtatttttagtagagatggggtttcgccatgttgcccaggctggtctcaagctcctgacctcaggtgatccacccacctcggcctcccaaagtgctgggatttataagcatgagccactgcgcctggccggcatatctttttatatgaggaaattcacatgcagttctatattttagatgtcaatgagtgtcttgagagcccaggcatttgttcaaatggtcaatgtatcaacaccgacggatcttttcgctgtgaatgtccaatgggctacaaccttgactacactggagtacgctgtgtgggtgagtgttggctccacattacagaattttaaagttctattttacttctcatattcagtaaaaggtctctcaggtaccctgggtgatggggggatttacaaatccaggataaatagctagtagtggcaccttcttcaccagtcttacattttccagtcagacctgatttatgtgaagatggagagagttaacaacctctgtcttcaaccaaacatacaaaatcttatgtgtcctagagacttacaattgccaaaatctctcattggataagaaatccattttactttatgcccttccatgcctgctcttgaagcagaggaccacattcttcttctggatttgtcatctttagggcgagtattgctgcctgggggccagagcattgcacattgatccttcagaccctctgcactacatagctgccagccagccaaggcccaagggatgccagggttacatgtgcccttctcagatcctggaaatgggtgagggccaagcatgggtcttcctgggcattctcctgttaaactaaaacatctttgtggcagtttcttattcttctttttcagatactgatgagtgttcaatcggcaatccgtgtggaaatggtacatgcaccaatgttattgggagttttgaatgcaattgcaatgaaggctttgagccagggcccatgatgaattgtgaaggcaagtgatctttgtcttaaatattatttcttcttgacatagaaagtgttttttaatgtctcaatatttatttatattgcttctgatattctgctggtgagcatacggtggggttttttgttttttgggttttttgtttggttggttggtttttagttttcctttagtacagttaaaatagctgctgtaaagcccttgtctgatcattccagcatctgggtcatctcagggttggcatctcttgattgtctattcccttgaaatggagtcacagtttcctgccttttcagtatattggttaatgttggatttatactctggatattgtgaatgatatgcttcgaaatcagttatattactctgaagaatattgatgtatttgtcttagcagacagtcaactctggtaggcacaatagcagaccctcaggcctcagaagggcggtggctcatctgtcagttctttaaaccttactcactagcattcttgattttgccccacacatgcatagtacagtcatgccacttgagctgactagatgaaaaacaaatagtatttctccttccctggcattctttcctgggttccctttctttagcagacttggttgccctaagattccctcccctccttcctctggatggaatctcagaaagtttcttctggagagttagctaccagatgacagcactgccaggccatggtcatctggagggtaatttcagaaaaatagaagccaaatcaatgtgaaattactccctactggttgtttgctctgagtttcagctcaccactaaaaacttcaggtactttttatattctttccggagtttatagctgttatttttaaagatgagtttgttaggtactaaattctgcgtaccagatgtgtaagttctactattctattgctttgtgtatgaccgccaagtaaatgacatcaacatttagttacacaaataattagaactctaggctgagcacattcctgtccattcctttggtcagatatcaacgaatgtgcccagaacccactgctgtgtgctttccgctgcatgaacacttttgggtcctatgaatgcacgtgcccgattggctatgccctcagggaagatcaaaagatgtgcaaaggtaaggcctcagactcgggagtagttcgaactttatttgtcatgctggagatacatcttaatgattttatagttctcaactaatttcttctagagctttacagaaatatatatatgacagcattttgctagtagatttccatacctagataacaagacacatgatggtatttttgtaaaatcaagtccgagataagatgggttgagaagcccactattctcacactcttggattcttattaaggcaaagattgcccttccctaaacttcttatcactatgagcagtgctgaaacttacacatctggaatatagccaacagctgacaatggctgggcttctcctttctctgtcccaccataaaattacatgttaagtgtcagaagaccacacctgtgacttaaaagtactaaactacagcttgctccagataatttttaatttttattttttgttctagatctggatgaatgtgctgaagggttacacgactgtgaatctaggggcatgatgtgtaagaatctaatcggcaccttcatgtgcatctgccctcctggaatggcccgaaggcccgatggagaaggctgtgtaggtaagcggtaagggaaggtgtctgcttatgtaatgcctccactcccagcctcattaatggcactactcccacatcatcttaactgcaagccaactctttttccagctgtgttaaggcagtgatacagctagctttcttccatctcagggtctctgctaatataataggttctggattgtggcatttatgcctgctcaagaatacatgcccttttgatttttcatattttaaagaaaattgtaaataaaactatatgtgttctgtaggtacatatgtaaccaagtaaatatatagaaaaacattgaaaaaggtaaaccctaattcatagaaggaattactgctagggaagacatcgagattagaagtaactagtctgaggtgattttagctgtatctgtcaattttaattattttacaaaagagtgagtttctgaactattctgaattacatgtgtcatataaaaaattatatatacaacaaattataattggattttttagtttcttttcatttgttagatatttcattcaaatatagtacttaataaagttaaaaatagacgtacataggaggtgtagttatgcagtgattctttcaaaaacactattcttccaagatctgttatcccagaagattaacctaaactcctaagtcatatgtgttcctccaaatctagcacagggcaaaatgctaataaccatgtatggaagaaaggaaatcagcattcttaatcatcgtgtcttcttactgtacatgaaatttcttttcattcatttctcttttaatttatttgaatgaaaacaatgtatgtatgtgctatgtttaatcagattggctaaaatacttaaaaatgtgttttaatttttatgcatggaaatttcttatttttataactagctgaattttatattatactatctttattacatttaaagatatgttgttgggaaagagggagtaagcactgtgatcagattaagaacacaggtttctggtcatggatctgccataaatgatctggatgacttgcaagtgattcaattctctgttcttcagttccttcatctgcatacagtgagaaacttagtctgcatgattgataggagtggtgggggtgggtgttgggaagggtgcatctgctctagctctaaaattctatcatcctctgaacttactttttcaaagaaaagaccaagagcagcattctacatttgtattcttttcgttgttaaacagcactacaaaagatacaggttctgaaacttttctgatcttcaagcttttcattataccatgctgatagctgaaatgtctgcaaaatttttttgatcatcacaaaactctttgtagaacactttcatgcaaacaatgtgttttcacaactagaaattccagtttaaaaacagtaaaaatattattacaaagaaaaagtatttacaaaagtcaggatgaaaaataaagccacaaaaaaaatcaataaaaatgccaatgcatgaaattggaatcaaacttacccaaaaaagtcgattgcaacggaaactaaaagtattacagttaagggaattaaagttatacaggaaatctaagacctctttaatgaaaaccataaacctaatcagagacggaaacttgactatgcaatatattatgcctcagtaattatttcttaaacaaataaatgaatcaagaaatctgataagtagaacatttttttaccaagatcattaaattttcttctttagactttggcagactgtcccaattttttaaagtttatccaacaatctttgattagaagatcagggacataagcaaatgagaaaagtatggagtgtttttgtagagacccatttctacactgcagtgtgaaaataggtagatgcaaaggagaaaatactgggatgctatttaattatcaacaaactagtcttctagacatggagactgccggaggtgaggcaggaagaggagaagcagcaactatcagagattctaaggctttaagaactttatcagagccacacgactccctaaattacctgaaagcccgagtgtagtgcctcaagggtagagagcatggcagatttggtgagaggatgttcatacaacaaacatgaattgaaactacacattaggcccactttaggacccgtgaccagctacactatttttcagccagtagctgaactggagaaaattgttcaaagatgagtaattacacaagaccagtgtagctgaagcttgtgcaggagagtggcatgaagtgggtctaaaggtaggcaaataccatggaaaagaatttggttttatgctaaaagtgttacggcagagtgactcagagtatgggccctggggatggactatgaatgttagcaatctaggttcatgtgtgctagctctgtgaccctgggcaagttggcttaaatatgtgcctcagattcctcatgtaaaaacaaataggaattttgagcacactttcataggattattgggagggttaaattaaaaaattcacatgaaacccttagtacaatgcttggcatagagtaaaatttcaattaagtattagttgttatttcctattttacacatttttaaagatatctggctgccttataggtaatggatttgaaggaggtggtagcagaaacaagggtttcatttaggtgactgtcttaaacatccagacgagagaaaaaggaggctcagattagggccaccatagtgtggaaaaggagtggacagattcagaaaatgtattggaaataatcaacagattggatttctgatggattgattgaatatgtataaaagataagtcccaggatttttgcttgagtgactaaagtaaattagcttagtataataatttacttgatgctactgttaactgatatggaaaagattggaagaaacaggtttcgttggggacacagaagaataaaagttctgttttggtcatgctcagtgtcagatatgttctagctttccaagtgggaatatcaagtcagcagacatatttatgagccatagatgtaaattgctagcaaatcgatagtgtttgaaaaattatgggattgactgagaacaccaagagagagatcctggagagtaggaggagcagggctccttcccaggacactggactctggttgttccaatatttagagagactaaaaatattaggagactaagaaagagtagccagcaagataggaagttctccatgtccgtgtgatgtcctgagaactaaagtggccgcttttgtatgatgctactaagatgtagagtaacatagagttgtaattagatttggtgacttcttcaggaggtttcagtggagcacacacattaaggaaacaatcagtgatgaggaagtggaatttatcgccatggatcattcttccagaaattttgttctgaaagtgaatcaatacatgtggcagtagccacaggggtaataggtgaataagagagttttttgtattgttttaagatgaaagttactagagaatttatgctgagggaatgattccttgaaaagggagtattgtgaaatctgggaaggcaatctagagtaccggtgcaagagctggccttggagaaaaaacaaagatagtttagctgttggaagaagacaaaaggttgaaagtgagggcatagcccagtggttcataggggagagatgtctgatgtgtctgagtgtgtaatgtcattttagaaagtgagagtgtgaagatactaagaagtatagtaggattgttgacggaggatcatgtacccatttgagatttgagtcttgagtcttgagtctcattgaaatgaagcctgttttcctctaggctgtcatgctgcactggattggacatagagtaggtagaagtaggggagcatcggacaagagtgatggacaatggaaaggtcgataattgacaatcctgctgcagcccacaaattgtcaaagggtagaaagtacaatgctggaaatcaacattatttaggtagagcaacatcactccaagatacaccctattaaagttacaaatttcaacagaaaaaagaatcaggcaactttttttcaacctcttctcagtaattctttatgccaatgtcaataaagcaaaattaatctaagaatttgaagcacaaattatgtactacagaagaaactgtattatacataatcaaacttggaagaactcaggcagtatatcctgagttcttccaagaacgcttttagttcaaaagccctttttgaaaaaaaataattcagacaaatcaaatacaattcaaaatcagggtgaatgacattaaggataggattagaccaaggcaacagaccttgcaccctcagattctagaaataataaactaaaaaaactttttaattcataactcattacttttgtatatacctttaaatttctgaagtaagtgtttttttctaaaaaaggaaaaaaataatcacaggaggcacatcatggtgaatttcaaaacactaagaagaaaatgaaaatccttaaaacttccagagagaaaaaccagatttcttacaaatgaacagtaacactggtttaaaaaataataataaaggagctgtattttgaaagcattctaagggaaaataattttgaactaaaatgctatactcaatcaagtatgaaaacaaaagaagacatggtcagaaatctgttttagaatacttatagccctcttaaataattacctgccgggcacggtggctcgcacctgtaatcccagcactttgggaggccgaggcaggcggatcacgaggtcaggagattgagactatcctggctaacatggtgaaaccctgtctctactaaaaataaaaataaaaaaattagctgggcgtggtggcgggcgcctgtagtcccagctactcaggaggctgaggcaggagaatggcgtgaacccaggaggcagagcttgcaatgagccaagattgcaccactgcactcctgcctggtcgacagagcgagactctgtctcaaataaataaataaataaataatcaccaaactacatacactaatttttttaaattaattgaagtggaagaaataatataagtggaccaatggtgagccaagaaaccagtaagcctcattaatttaaacagatgctgatggcacactaaaaatctaacaaaccaaaacttctagataacatcaacatggcaggtggttcagggagagagcagagataagtaaatttatgcaaaggtgcttactatggccgagagctttcaaaacagatacttcttggcattgatagaaaattattcattaagaatgtgtgttgaagttgttcagtggtttccactgtaagaattgaaagaagactgtgacttccaaatatgagttcatagggaaaaggagggcataggaagagggcaatcccacagtaaatataaaacaatataaaatgtcaggtgagactctaaacatatcagtaatcatgacagatataagtggtttaaactgctggttaaaagataaatgtgtttttaagaattctgctaggttctctttaatagaattgtagtaccaaaattgaaatctgagataggttgaaaataaaaatattcaaggcaaatactaataaaagcaaagtgcatgcaaatataaatgtcagtaaatttttaaaaattttaagtataaagatgaaaggagccatttatcaaaaagatgtaattgtcatgcgctctcttatgctcctaacaacacagctttgaaagaaacctcaaacaaaatttacaaaatatcaaaaaagcacaaaaagtaaggatatagagaattttagtgaaaacaattttgttgaagtaggtttatttatcaccaaccaaaagagcagtattacttaaactgcctctcccattaactaccctcacagaccatagttgttcctgtgattttactcaaaaccaatttagcagcttgtcctttattcctggcctgtgaggcttttactgtactcatcacccatacccaacacccaccatccctctccccacacctttctctaatatcacagaaactgacattcttttccccagagttcccatccttgcctggtgtctcagggcaattctattccttttggaggccaattttcaattctatatattaacactatcccttctctgcagaggataaagaaaagaaagaagaagacaacattatcttaagaaagaacccaccaagaaggatgaagtaaagctaaaaataaattaatattcacacatgaccatttttaatctcatcatattagtattttggcaaagaagtgttaaataagatataacccattagaagatagcttgtaaactataatttgacagttttctcattattcatattgtttgtttttctaaagatgaaaatgaatgcaggaccaagccaggaatctgtgaaaatggacgttgtgttaacattattggaagctatagatgtgagtgtaatgaaggattccagtcaagttcttcaggcactgaatgccttggtaagttgacatccaaatatattatacttggtagataaaacatctgttcatgatgtcatcacagaagagctccacatatatattcttgtctgctaaacaaatcccccaatctcaataatccacatgcttcttcttaaagatgcacatctattaaaatgatatatttgtacatgtgtgtgttatatgcacatctatgtgtaatgtaaataacaatcttaaatagtctttccaaaattaagattaattaagttctttggaaaatttggctttagtaaaacttacatcagaggatgatttaattccaaaagaaaatatttgcaatatgaggtaagctctgccacaattaatgcaaaataaatgccatatttcaaaaatgcagggaaggttactttttatattgtggtacagaaaaaaatgttttataaaacctttttatgggaaatatacatctcagacattatattttattttaatgttaaaatgcatacattataaatcattgtagttaattatggcagctgcaaaaagtgtgctgtagtaaaattcaaggtaaacaaagaaataagagcgctaagctgtttgactcatcacttgatttaacataaaaagagtatttcaactatatcacatttttttctgaatgacgtcatatgcttcaaattccaagaaatttttgatcaaaaaaacattttttgtttattgttatctctaatctatacctttactaactaacatcagtcttttaggaaataggaaaagtaacctacatataaagtgtaattttctgttcattttattaacagtttggctaggattgtttataaaactgtattaaagatttaattggcttttaaatctgaaaaaaataattttatttatatttttataaaatctactcagtccaagtgtttgaacagtctttcagatgtagaaaatatgagatatcagattgaataagtaccaagctcataaaatatagtctagagtttgctttccagaaactaatcctggcactcatttgtttaaaggaaaataatttaatttgattttcctttcacttgtattctacagaaatggtaggtcactatcatttagttggcaatggattggaggaaaaaatctatctatttctaaagtatagtatcactttttgtcaaatttaatagactgtagtctgtagtgaaagaatatgctatgaacttaactgccagcaaaacttaaataattaagacattaagctgtcttaattattcctaaggaggaaattcttgactgccctgcttaatttgaaagccaggataatgaaatgtcagttccgcatccttaactctttctactttgccatttcagacaatcgacagggtctctgctttgcagaggtactgcagacaatatgtcaaatggcatccagtagtcgcaatctcgtcactaagtcagaatgctgctgtgatggtgggcgaggctggggccaccagtgcgagctttgcccacttcctggaactgcccagtacaaaaagatatgtcctcatggcccaggatatacaactgatggaagaggtaaggagttgaggaaatttattcatataatcaacacattaaattttatgaattcagataaatgtgaaggaaaagtgaaaaattgatacaatcaaaagagtagctaaaatgtttataccttgatatttatatttgatgtgtgttttcatatatatgtatatagaaagaataatctttgctaatgctttagagattttaggagttaatcttcgtatcagacctaaggggtagaatgtattattcccattttaacagatgaggaaaatgaagcacaaagctaaggtaacaataagtaattttcccaagatcacacactttttaagggatggactttgagggggtagctttctagattccccccaaaatcattcatgcttagattgcaaaatgggtagtcttaaacagggctttcaccagagtctccctttatcccctcccatcacttgagattatttttccatcacatccatgttgctgttcacctgaatgatgaacaggtgctccagtgctattaggaatgtttgcagttagttatgtcatctccatttcttcatttctctttgattctaaccagttttacccttgcatatatgttaactcctgattgtttttgttgttttggtccacagatattgatgaatgtaaggtaatgccaaacctctgcaccaatggtcagtgcatcaataccatgggctcattccgatgcttctgcaaggttggctacaccacagacatcagtggaacctcttgtataggtaacgatgggcacctctatatccaggggtttgggggctaatcagctactgtttcctgcaagtcactcattatcagtagagtgtctttattatggagctttggaatatatattttattaaaatgttgccatcctctcaataatgtgcttcttaatcacacagcacttggcctttgtccagtaatgtgggatgcttaaaggagcctcagtaaagagagtttaaaagaacttgtgccacatccatgtgtcaaaaacagagaaactcttaagtttctgattctcaggttgtaaacctgagaaacaaaaatcacaaatacatactttcaacattttatattttaatttaaaatttaaagtgcacatttgtttgtcactctttgactgaaggaaaagggctttttcttatgaatatgtgtgtttgtgtatattaagagaatgttttccatgtttctctgctattattttgcataaagtataccaagtaagcattacctaaataaaatttccagctgcggagcagtctcagtacagaatccttctatcattttacaatttatttttcttattcggttttttattgtctcactcacacctatatatgacagtcgtggggcagaaaggacttagacttttgtcgggtctttccaaagtattcaacttcatttttattaaagaaaaaattttttttctcctttatatttcattagcttacttgatattctatcaaattacctatgtcaataacaagcacacttggcattaaaaggttaagaaaacccaactgacttctttgaaacagaagagcatgagtaatagagaataggccattaatcataagcattcagcattctgtgggcatcaacgccgtatgttatatggaggaaatggagattgtctgctatctcagagtccgagtaggaaagagatggcatatttcaaggaggacaattcaaggagggtctaacaaaaagactgtctatacacgtgtgagcagtgtgcacaaaagccaggaggcgtagtgctgtgtgctggggctgtactacccctgggccaaaagaaaagagtcagaagttattggaacctagaaaaagaaagttgtgctcagaggactgccttgagaggacctctgacagctgctccagtgactcagccagcctgagcctatcttgcagggagggagttgaggaaataagggccagacagaagacagagggcaagggagagcctccggatggagtctgtagagctccatctcttgggcctgagagcagagtggaccagggtgaggactgaatctgaaggggaaagtggaaggtttccagcaccatctgtgatcccacaagatgcttaaaggagcctcagtaaagagagtttaaaagaacttgtgccacatccatgggtcaaaaacagagaaactcttattaagtttatgattctcaggttgtaaaccaaagtatattaatctaaagaatgtagtaattttggacccagacagttgtctagacatcataatatttacccaagatccatagattgatttacaaagtaaacccgcatgttactttagaaaaaatccttctgtgcatcatttctctctggctatattccactttaagttgaacaggaaaaacaaaaagaatgaagtgagaatatggaaggaggaaagagtctggttgtttcttttaaccagtaatttaatcttcacatcacttttacttagaccttgatgaatgctcccagtccccgaaaccatgcaactacatctgcaagaacactgaggggagttatcagtgttcatgtccgagggggtatgtcctgcaagaggatggaaagacatgcaaaggtgagtgaagagtctctgacaatcgtgaccctagtctgtatcttttctttcaaatttaaatattagattatcaggaattatgccatgtgcatcaccttcattaaaaggtcccatcctagtggccatgttattgctcatagaaaaactctaccaatatgctcattgcaggaagcagagaggattaaaacccaagttaaaacagtttgcttcttatagaaaactgcataaattttaaaaaataaaataaaacaaaagttttggtatgggaagagatcgaaacaaatcactgaaataagatatttgttgttgttgcttatctaagcttttatttctctaagctacctttattacaggtttactgtggaaaagtgaaaatggataggtaaatttaaattttttgcttaggtagtatcaaaagtaattatttatcaagctaaattagatcattaaaatagtttcaatactatactcatatatttgattttatagtaagcctcatcagaatgaaattaatggactgagcaaatttttaaaatgtagattattctcagtaaaatgaggttttatttccaaggcatatcaaaaaaaaaaaaaataatagcaagcaccgcttggacctgtttagtgaactgaacattgtttatgttcagttgtacattgtttatgagtatgactaaagactccatatcaaaaaaaaatgagtatgactaaagcgttttttaagctgtaaaataataaattagtcttgcctacatcttatgtggtatatttattttaaatatagtttccaaattaagttttagtatagccaaaatcaaattttgagtttttaattagtagggtccaaatatcaataccatttgtgactagaattacaggtgttgtattttgcttcctctaatattaatgcccgtgttttcatctgaatgtggagactcttagtgtttctgttcggaccttcatcagtttctagattctgtttcatttttatttaatccttcctttaataggaatcagtaatcagccatgtactatactgcattcaatgcaagaattgtaacctttggatagtagctttgagaacagttcatggaaactgctatgattctgccattcagtttcttatgttatatattgccttaattgtcctatcatcctagcccgtaatatttattctgcttaaatatgtaaaaagaaactgtttgccatatgcctatggaaatctacgaagcttccagcaaaaatctagacaaaatgcttctaatggagcatgtgcatctcctgtggcttcacaagaaaggaaacatagccagatagtctactgtgattttcactggcttctctctaatttcagaccttgatgaatgtcaaacaaagcagcataactgccagttcctctgtgtcaacaccctgggggggtttacctgtaaatgtccacctggtttcacacagcatcacactgcttgtatcggtaagacaaagttacaaatgggaaattttacaaacttctagtagatgcataaaaattatatttaaaattataaacagaagaatgtcctggtatttatgttcagtaaccaataccccataatttgtggtctaaagaagttgctaataagatagatattttcaagaacaatatccaaagggaaaaaaaaggcctttttagtccaagcacctgcacagtagccatatttcaagcagtgcctttatatcacattcttaatgcaaccatggtgttcagacaaaatatgattaaaggctcactgtaatttagaacatgttaacaaacatattgagcttttattttagaagacacatgttaaggaactttagtcagtgtgccttcaatcactccaaaatatgctcaaatctcaaacctcttaaaatacactttttcttaccacttttgtctttaatatgacagtgaattttggtataaattttcccaaaatgccattttcacatcatgaaacttaggttttcatacattgctttttacttcccatgaaacgtaagacatgttatgattggaaagtttgacgctctgcttcttgatgctttgccagacaacaacgaatgtgggtctcaaccttcgctttgtggagcaaagggaatctgtcaaaacactccaggcagtttcagctgtgaatgccaaagagggttctctcttgatgccaccggactgaactgtgaaggttagttgatttgctcaaaaattcttaatctaataacagtaaaccatatatatttttaacttccaagacaaattggtataatctgaaaaaaagaaaaaaaagtattgaacaaaataggacccagcaacttattcctggtcataaatttctatgtatcactttggggacagagggaaacctaaatgcagtgaaacaaaaattctgtgattacgaattgacttttaaagtaactgttgactaatcatggatctgagaaagaattgaattgaaaaagaattctgtgcctaatatggtttgcggtagtgtacaagcataccagaaaaaaataataattggccttttgttccatgattcttaaatgtataagaattaaatataaaaagaatctgtcatcagagagaattgaacaaatgtactgaacacgctaaggtgaaatgatggctgtttctgttttttacgagtcaagctcccgcttcactccttcactttcttacagtggaccttggtctcctctgcaataactatttcctgtaaaatccaagggaacatttaagtggaaacaaaataagaacatgcttgcagttaagaaaatttcatctagttcttcactatttatattgcaagtggcagtgtatgacaagaaaaatgtattaggattagtgtcttataaacacccatgccagagattatgagactatatttatttcccttacattcttatatcgtattgcaatttatagttttcttgattttaatcacccttttaacattaactattcttagaaatatatgatttggatttctagaaatatatgttaagtatttaatttgctctctgtaaggcttgtggggcttttatatgtatctcattttcagcaaagaaaaattcagtttttaaaatgtcaattttaatattttatctttcaaatcgttgagacgttgaaagtattcttaacctacagctgtttgccacatgcgagttcagctcgtgaccatccccataagataccatttattaattatccatgtaaatttgttacacccctcagacatgccaattttattttactctttatggatagatttcaaatattcggttgtcattccaaaaaagcatacataaataaagaaattattccacatgtataataataccacatcttgtctaaaaataacatatttaaatacttaagagggatttgcatctaattaatcttgaatggtaataaaaatttttacgtgcaatataattgtactttttaggtatctctgtaatgcttctatcctcccaaaaatgaggattgtatctcagtcactttcaaacttactggactatgcaatgcaaatatattttatatatatatatatatatatatatgatttaccaaataaatcataccatttgcagttaattagttcaaaatgtacaacatttgtggttgctatggttgacttgctgaaattgagatgttatttagagcactgacatgccgtggtctggtggagagcagaagaatgagctggtctcttatctcagaactgttccctgcaccaccactgactaataaccatgtgacctggaaaaatgacagcctctctatgtgtcatgtcttgtttgtttgtttgttcccatgataacagttaccccaggtttcgtttggagtgcatttaaaaatagtagaagaaaggtgacataaaggttttgccgggcttgtttttgcagatgttgatgaatgtgatgggaaccacaggtgccaacacggctgccagaacatcctgggtggctacagatgtggctgcccccaaggctacatccagcactaccagtggaatcagtgtgtcggtgagtgctcttttcttccatcgcacttgcttttctcacctgaaagtgtctctgaataagatgaacaaattgtgagggttgagatttcagtatagcctttgaattttagactttaaacccagtccttaagactgatgcatggggactcattctgctagtgtgtatgtttgaaaatatctattaaaaaaaaagtttgtttttaagtaccgggaagttaacttaactagaggttacttcattttaaatatctgctaagtaattttaagtttctgaagatgatgtcaagaatcatcatctttgtttgcgaaggtcagccacttttttgtctgtaatttaatatatttagatttcccatccattcccctcatacgaatctaaaggagttcacatcaacttaatgaggacagtccatgtgtgctctcctgtcacatagatttaataaaggatgggaagtgttttaaggttgaaaaagtacctacttacagcaaatgctgttggcagctctagacagaagtgtttgtaaaataaaatacgtggctctcagctctgttccttgcattgataatagtcgctgaaattctccttttaaggagtgattgatcaaagagaacattattctctacttggatagccaggtgacttacttagcatatgcctaatttcttggctccttttgaatgcgcttcacagacactccaaccaacacattttgatgctaggtgctggcataactgagcagaaaggggcactgtggtcctgcagagaaatatcaggatgcttcctgtttctgtgtagtaattcaaattacttcacaggttattcacatattgaattattgtgatccactaaataaattagtctgattttatcctttgtggtcttctcaaaagaaatttctagtgacagctaagtgaattaagaacaaaaaatcaagataaatttcagtggagggaaaatcatgccaggtcaaagacagatgctttaccacaccacgaatatacactcataggagtgtagaaatgcagaaaccaataagtgatcaaaagttaaagacaagacagtttcaaaaaattatttaaattaccaattaggcagttattcaaaataactttataaatttaattcacttttttttcctcttcatagaaaaaaactgttgtagaactccttatgcccagatttattgattcataaacaaaggcaaagtgtatggcacactctttagaatatcagaaacagtattttttacatagctattaaaataatgtaaaacattctgtaggttgcctattcactctgatgatagtttcttttgctatgcagaagctctttagcttaattagatcccatttgtcaattttggcttttgttgcaatttcttttgacgttttcgtcatgaagtctttgcccatgcctgtgtcctgaatgatgatattgccgacgttttcttcagggattttttatttttttaggacggactctcgccctgttgcccaggctgaagtgcagtggcatgatcttggctcactacaacctccgcctcctgggttcaagtgattttcctgcctcagcctcctgagtagctgggattacaggagtctgccaccatgcccggctcattttttgtatttttagtagaaacggggtttcaccatgttggccaaggctggtcttgaactcctgacctcaggtgatccacccgcctcagcctcccaaagtgctgggattacaagcatgagccaccatgcccagcctcttctagggttttttatggtttagggttttaagtctttaatccatattgagttaatttttgtgtaaggtgtaaggaaggggtccagttttagttttctgcacatggctagccagctttcccagcaccatttactgaataggagatcctttccccattgcttgtttttgtcaggtttgtcaaagatcagatggttgtagatgtgtggttttatttctgaggtctctgttctgtgccattggtctatatgtctgctctggtaccagcaccatgttgttttggttactgtagccttgttgtatactttgaagacaggtagcatgaggcctccagctttgttccttttgcttaggattatcttggctatacacgctcttctttggttccatatgaaatttatggtagtttgatgggaatagcattgaatctataaattactttgggcagtatggccattttcacaatgttgattctttctatccatgaggatggaatgtttttccattcatttgtgtcctctcttatttccttgggcagtggtttgtagttctccttgaaaagattcttcatacctcgtttgctgtattcttacgtattttattctctttgtagcaattgtgaatgagagttcattcattgtttgactctctgcttgtctattgttggtgtataggaatgcttgtgattcttgcacattgattttgtatcctgaggcttcgctgaagttgcttatcagcttgagttttggggctgagacaatggtttgttgggtttttgttttttttttggggtggagtctcactctgtcgcccaggccggagtgcagtggcacgatctcagctcgctgcaacttccacctcctccctgcaacttccacctcctccctagtagctaggattacaggcgcctgccaccatgcctggttaattattattagtttattattattattattattattactattattattattattattattgtatttttagtagagacggggtttcaccatgttggccaggctggtttcgaactcctggcctcaagtgatccacccgccttggcctcccaaagtgctagaattacaggcatgagccactgcgcctggtcagatgatggggttttctaagtagagaatcatgatatctgcaaacagataaaatttgacatcctctcttcctatttgaataccctttatttcttctcttgcctgattgccctggccagaatttccaatactatgttgaataggagtgataagagaaggcattcttatcttataccagttttcaaagggaatgcttccagcttctgcccattcaatatgatattgactgtgggtttgtcataaatagctcttattattttgagatacattccatcaatatctagtttattaagtttttaacatgaagagatgttgagttttatcaaaggctttttctgcatctattgagataatcatgtggtttttgtctttggttctgcttatttgatggattgtgtttattgatttgcatatgttgaaccagccttgcatcaaagggatgaagccgactttatcatggtggataagttttttgatgtgctgctggattcagtttgccactattttattgaggattttcgcatcgatgttcgtcagggatattggcctgaaatttcctttttttgttgtgtttctgccaggttttggtatcaggatgatgctaccttcataaaatgagtcagggagtagtccctacttttcaattgtttggaatagtttcagaaggaatggtaccagctcctcttggtacctctggtagaattctgctgagaatccatctggtcctgggcttttttttggttggtaggctattaattactgcctcaaatttagaacttgttattggtctattcagggattcgacttcttcctggtttagtcttggtagggtgtatgtgtccaggaatttatccatttcttctagatttcttagtttatttgcatagagatgtttatagtattctctgatggtagtttgtatttctgtgtgatcagtggtgatatcacctttatcatttttttattgtgtctatttgattcttctctgttctttattagtctagctagtggtgtattttgttaattttttcaaaaagccagctcctggattcattgattttttggagggtttttcatgtctctatctctttcaattctgctctgatcttagttatttcttgtcgtctgttagcttttgaattagcttgctcttgcttctctagctcttttaactgtgatgttagagtgttgacttgagatctttctagctttctgacatgggcatttagcgctataaatttcccctaaacagtgctttagctgtgtctcagagattctggtacgttgtctgtttgttctcattggtttcaaagaactaaagagcttctgcacagcaaaagaaactatcatcagagtgaacaagcaacctacagaatggaagaaaatgtttgcaatctacccatctgacacaggtctaatatccagaatctgcaaggaacttaaacaagtttgtgggaaaaatacaaaaaccctatcaaaaagtgggaaaaggatgtgaacagacacttctcaaaaaaaaacatttatgtggccaacaaacatatgaaaaaaagctcacatcactgattattagagaaatgcaaatcaaaaccaccatgagataccatctcatgccagttagaatggctattattaaaaagtcaagaaacaatagatgctggtgagactgtggagaaataggaaaacttttacactgttggtgggaatggaaattagttcaaccattgttgaagacagtgtggtgattccacagggatctagaaccagaaataccatttgacccagcaatcccattactggatatatacccacaggaatatagatcattctactataaagacacatgcacacgtatgtttactgcagcactatttacaatagcaaagtcttggaaccaacccaaatgcccatgatagactggataaagaaaatgtggtacatatacaccatggaatactatgcagccataaaaaggaatgagagcatgtcctttgcagggacatggatgaagctggaaatcatcatccgcagcaaactaacacaggaacagaaaaccaaacaccacatgttctcatcataagtgagagctgaacaacgagaacacatagacgcagggaaaggaagggaataagcacatgctggggcctgttgggggttggggggcgaggggaggtaacctagaagatgagtcagtaggtgcagcacagcaccatggcacacttggctatgtaacaaacctgcacattctgcacatgtatcccagaacttaaagtaaaatttaaataaataaataaatataataataatataaaacaattttattatattacaatatttataaaatatgaagcccaccactttatttagtaaataccatggacttgttggttaattccatagaccttaatccaaaagaatgattctctatcaaacagaattttttttaaggagaacaaaagtagaaataggaaaatgcatggagtgccaatttaatttcaaagtgtttcagtttcctgaagtttttgtttctgaacacctagcacaaaacgagctgcacaggtttttactaaatgtggaagctctatctaaaatagtctgacttaaaatcaagatggtgtggtgtatcccagttcccctttatgagatcctggggtgagcactttgacaaggcagtcacccccaaaggagctcgcaatggagtccagccagaagccggtttgccttctaatcaggagaaactccatgagcagaggaataaatggtttaagatgagtccaaaactaaaaatacatgagcagatatccctaattgcaggtattaatttgtaagcttattctactaaaatgagtacctctaagcagcaggtgcctgggtacgacacatcagggatttatttcaaaagattctagattcttctgggcagggttgaggaatccagcttgtctctaataaaattgctgactttcttcccttgaattcatgtaacgccattagatttttaactcaaacatatggcagaaattgggtgaaataccccttcaggaaactaataaaagcaacaagttagcaaaagaattaggacaaaacgcaaattgaaaagccaccaacattttttatctgtcactacttgtgtgaatatcttcagccattcatatgattgatgggggaatacagaaggaagcatttcagacagatttcccccggaatcctcgtcagtggtcaacactgttagtcaatgcatcagacagtttaaacaggcaaaactgtaaacctacgatgttactaaacctgctaccaattgaagaagaatgaaagttctttgaaagtgttaatattgaaaaaagctttcagttcaaactaacactttaggaagttttctgccagttgtcacaaagaatttacaacgttctggtagatagagtgtacagatgtagggaacattctcaactatttgtaagcattagaattattcaaatacaattattcaaaattggaaatatgtaaatactaacatttgcatatgaagaaaaattatgtcttcatatatgaagactttgtgttttagtaacttccagttgcttctgtagcctgttcacaataattcacacatagttgagtgaggcttgaatcagttcaaagtatgtgtcagacaggaacatatttatttaagtctataaattttaatcatgatatacatttatagaatataaatatgaggtatatcatggtgcttgcaaaaatgttacatatttttaaatattcttgtaagtgatatgtttaaatataatttattcagttaattatttttgcctggtaatttttcttcctaacacaatgtctaatggtatattcatggcaggatcattttattaaattgtaatctaatttagattccctgttaggagagaaacactgcataggaatgtcagatctaattataaaagcagatgaggctttatggcagaattccaagtctcttgtatatagaaataaaatagcagttatagttacatcttatgtagccaagttactgagaatttatttatcgtatctacgttcttcccctgccataaaggctaagaattttcacatattagataatcagcatcttttatattcagtgattaagacacctacatttagtggtctcctttaattctgagactatcagaatcatgatacaaaaatgttcctaataatatctaccctttcagtaacttctgtcctgtacttaatgaagtttaattcctgtctgggaggcctcttcactgagagcccatgtgcatcttccaaatctcactgagctgctgcagatccctcgcttccccactaggtactatgtcctctgtgcacacccacttgcacatgggcctgtttccccacatgggctgaaatatatacttgtcacatattaggtaaacagacactctttgctccacatggagtcacaagaattgaaagaattccatggaacagatgtgatttgttcccagggtgaaatttggattataaaaaaagcccaaagaagtcaagccacatgctgtatatcaaccagacagttaaggcaaacttataatctccaaagttgaaagcataatcagactttgattttgtaaaaatgataatagtaactgaaagtataacctataattatcctgctaccaggtatttatagtataatgttagtcattaagcgagtaaaagctatagctggctgatggctggatgcaaacctgcctcagaaagcacagtctgcacccaatgggttctcaagcattttaaactgaactaggttgttcgttcaactgatttaactaaatagtgttgttttccatcgttttcatttagggtttataaatttttttatgctttctcctcctgtataatgaaggtttggggaattgctgggggaatggatacaaatacttatagggacttttttaattgatatatcataaacttctctcttttaaagtgtacatgtaaatgggttttgtagattctcacaaaggtatgcagtcatcaatactaccagtttccgaacattctcatcacctccaaaagaaacaccatacccaagagcggtcatttcccatttcttcctcccgacaggccccggcaactaattttctctctatctctaaggatttgcccgagatataagcttttgaagtaaccttctgttaagagaatagaagagttattcactaggcaaactgcaaatatctgttcccaagggctgcagacatatttagaaacagtacaaacagaaaagagcaaagcaagggttttttaaagccacaatttaggggaatttttttcattcacgtgctttgcaaatcagtcgtcagaataaaataaaatactgtgttagagttatttctgccataaaatcacaggcacttgagactccagacttgttcacgtttttgctcttgcctgcttccccgtgtaagagtttctttcttcgtttcactagatgagaatgaatgctccaatcccaatgcctgtggctctgcttcctgctacaacaccctggggagttacaagtgcgcctgcccctcggggttctccttcgaccagttctccagtgcctgccacgacgtgaatgagtgctcgtcctccaagaacccctgcaattacggctgctctaacacggaggggggctacctctgtggctgcccccctgggtattacagagtgggacaagggtaaggcggccttcagcctcagcacatagaggaatacatggttcctgagtgagttcaggccaccccccactgcagggaagagtacagtgtctaaaagccaaaccgcaaaagcattgattagaactcttcgggtatgcagataaataccaagaaagcacacacggactgtgctcagggtatagcattacttcctttgtgatgagcataaaacttgaacttgtatgtaaatatcactctttgctcctcttattaagggcctgaattgattcaatttgacccaaggccagagacaaacagatgcttaaaaatgcggctcacacgttgccatggatacctgggctgtgaggtagaagtggaaatggccttgccacaggttcttctacaaattctggaaggtgctagcatagtgatcactgaggaaggagtttgtccctttctttgctcatgtggctttcctatcgcacagagagaggatggtgcctagttggtgtggtgtcattcagcacgggcctgacccacaagacaggcttccctccaactaggcgcactgtctcaagttccatgggctgtggcagaggtgctggccatttgcattcttccaggaaggccgtggtgctcagtaacacagaagatgggcatttagaggtcagtccaggttgccttctttgaaaggagcagtgtgcaaggcagggactaaaaggcatggaccaagtctgtccaacaatggtgtatgataatagttaaaacaaaaggcttggtctacacaaaggtcatttagagccaattcattgactcactaaccaaaatataagttcagaaatctcagtttttaaagcagggagctttgttgcaagcagcaaatacaggcttcaggcccctgaaacaatggaacctgtcttagcattctctttggaaattcataccttacttttaccttctggagttaattatgctcagtacttcagtctaactaagattgaaaattgggaaagcatggggctcaccctcagaagaattttgctgtttcaaaataagggaaaagtttatctattgtgtgttaaagaattataggggattgtggctcatccctgcaatcccagtactttgggagtccgaggtaggagaatcgcttgaaggcagaagttggagaccagctagggcaacatagcaagaccctatctctacaaaacatgaaaattaaaaaaaattagttggatgtggtggtgtgtgccggttgtccctgctaatttggaggctgaggcatgaggagctcttgagcccagaagtttgaggctgcagtgagcaagatcgtgccactgtactccagcttgggaaacagagcaagaccctgtctctaaaagaaaaataaaagagttgcaaagaatattagggttttatgtttatgagtttagtgtttgctctgttggtttcgtgtttctgaagagtctgctctaccactggaaaactatggtcaagtcagtgataaagtctaacaatactttgctttttgcaaatagccactgtgtctcaggaatgggatttaacaaggggcagtacctgtcactggatacagaggtcgatgaggaaaatgctctgtccccagaagcatgctacgagtgcaaaatcaacggctattctaagaaagacagcaggcagaagagaagtattcatgaacctgatcccactgctgtgagtatatcccactctgtgttgccacaaaattttatccctacggagtcatgtatacagtgcagttcacgtcgttttcagcctcactgaagttaatcataccttgaatttaatggataaattaatggacccagtatggaaaagacaagtaaattaaagtgattgaattattagatcaaaacacaaagcttgggagaaaagactttaagattcacagtttcagagcattttctcttgttgtagtttttgatttatgtgggagggtatgtccatctcgggaagagctatttttacatgattcaaaaaatgaaattatttttaatttgttcagttctgttttataaatgtatagcatacaaggctgattttaattttcactagggaaaccaagtaggtctcatattctttgttttatttttaagacagttgttccttcattaagaagttttgtcttccaaatcacttgtattctttaaggaactgaagttggaaattgcgagccactgatatttcctttccctaattgcattttggcagtgtttaaaggggtgggctgcagactacctggttttgaacgtaactccctggccctccctatctgttacctctgttacatagtttgtgtttatttaacttctctcaacctcagttttttcacctgtaagatgggaataataatacctctgaaggctgatggaagggttaattgaattgaaacatgtgaactgcctggaacaatgcctgacatatatatcacatgtgttcagttcctatgaatgattaatatctcatatctagagatcttgatgattttcccaaagatctgagacagtatgaggtcgtcactcaccactctctgcagttaatatgactgagaaattaccccaccaaaaaacctaatcaacaactggctggctgtgtgaattggacaacttgcttcagttttttgggcctcagaatctttgtctatatgacctgacttgtctagccaaaaagttcatgatgctattttataataataaataagccagtgttacatttaccttaagtagactaagatacccaactgatgtttgacagttgagatattcatcaagttcccaaactacaaatccagaagttctgcttataaactttcccattggggtactaggacataattctgcctgaacactgatgggcacttctgggtcaccactgccaagtcctcacttaacagatgcccaatcaaagcattgtggtttttatcctatcttactttgatatatttgtgctcctcccaaccctctgagcaaaagtcagacttggtttatctgggccctgccccactggcttttaccaaagatgctggtttgaactggagccctgagaactctgcagatcactcactctgtgtacctctgatagctcccagtaaactcactcatcattcacttaccttacaaatcaaagcccagctttcagacagaagattcccctgggcgcattccctgctgatgcccaacagcagtacttcttattttgactccagaaaaaaaaaaatcattacctaaattttagtttttaaaaattattaattagcacaatatttcataaactcatcaaaaaaaacttgaaatgggaacactctgtaagcccagtcctgtacctttaattaccttgttaaggctgagtgagaagtcctaaagatttacagggtattctcgatggaattggccttttcttccaactgacaaaaatgtacaatagcctctttcacagccactgctggtaaggagagtgcagaaagcgggagtgggaagccacagcctgtcctcgtgaccaaagcccctgcagctgatctctttctagtcctctgcttgtgctgtagaagcttgtcccaaatcatttcctgttcttcctccaggttgaacagatcagcctagagagtgtcgacatggacagccccgtcaacatgaagttcaacctctcccacctcggctctaaggagcacatcctggaactaaggcccgccatccagcccctcaacaaccacatccgttatgtcatctctcaagggaacgatgacagcgtcttccgcatccaccaaaggaatgggctcagctacttgcacacggccaagaagaagctcatgcccggcacatacacactggaaatcactagcatccctctctacaagaagaaggagcttaagaaactggaagagagcaatgaggatgactacctcctaggggagcttggggaggctctcagaatgaggctgcagattcagctctattaacccttcacagacttgggcccaggctcaaatcctagcacagccagtctgcagaagcatttgaaaagtcaaggactaattttaaagaggaaaaataataataactcttgtttctttcctccctgtcttagactttgaatgttgaccctcacagggagggataatttagactctggtatggccaaagatttgagcacaaaggcaaccgtggttactgtattttttatataacttcattttaaaatatattaaaagaaacctaaatgttcaagatatcagcatatggcactaaatgcacaaaaataatgtgagctttttttttttttcctgttagcagtctgtaacactttgggtattttgctatagttgctaattaaaaaaatatagatgtttatttatttttaatgcagtaatatatggagaaatgaacaaactatgtaaacaaaaagggaaactcacttgtttttctttagatttataaatttgagctattttttttagaggtgctttttaaaaatccaatagatacaagagatgtttcctttggttttctgccagtcatccagctgatacacacctgatgattttaaagaaagccacacagagctgaatgggcagtgtaatcaataatttaaaagacatgaatgtcattagatcctttataacgtagatcgaagccaaagcagctcatttgtgacaacatttcatatcaccagacacaccaggcaacagaagttgaagcacaaccactgtagcaaaataccttgactgcttgtgagaccattagcattgcaggccaaaccgtactgtatttccttctcataacctcaaggaaccatatgtgctacccacaacacctcattcttacccagggtgcgctgcgtcctcatggtactgtaggcagctgaagaaccgccgttcccttgaaagggaacacctggcattctgtggtgtttcgtgctgtcttaaataatggtgcatttattatgttcaagttatttcaggattgccatatgtgcaaacaaatcatgcaatgcagccaaggaatatatgttgttgttgttgttttaaacccattttttttttagaattttcattaatactgtagttatacaccatatgcctcattttatcatagcctattgtgtatgaaagatgtttgtacaatgaattgatgtttagtttgctttagtcatttaaaaagatattgtaccaggatgtgctattaagagcacgtatccattattcttctcaacccaagaacctgtttcctggaccagtgaccaaacctcatatgtgaaatggccaaagcacatgcaggctcctggttgttcctctcaaacctgtgctgaccaaagattagtaaccagttatacccagtattttgaggttttattgtttttttaataactaaaaagaaaaaaggaacagtgtaaatttgtaatcaagagtttgtgaggaaaaacttatggtttttggttttgtttgtttttgtaggtctgtgtatcaaatatgacacttttcttgcaataaagcttattttggggtatttttctgactgaaaattttatgagaccacaacgcctgttgtatttgcgggaggggctgggggctttgtctatgggaacctgtattgaagtaataatagagagccagacacacaggaaaataaaggaatgctggcaaatctgtgaagcaaagtcaacatgtgttcaactgatgattatgatttgaagttacattcaaatagaaggacataaagtcatttacttatgcataaattctaagcttcctgggacccatctttctggaaacttcaaagaatttcttcacttcatgctaatgcccccataaagtatccatgaggaagtgaaacattcttttagagaatcttacttctctaaggtagaaatttcctgaacccaagtttttaagcaaaggtaatagcgggcataccccaggccaaaaggcattttcaaaaataatctaaaccttatctcttaaaatggtatacagtttattcactggagaagtggatagatttaacaaagtatttagcatgaactcccttttgatacactgccaaaacaggcacagaaatgtttccaagactcttagagattaatttaatacatggtttaagaatttatgcgcttaaattttttatccaaggaataagtaaacaaggaaatattgtgactgatcttagtgctgttctttgccaatcagaaattagctgcatggagtaagaaaagtatttgcctcaaggcgttctttaaaacttaacatgcatattcagtttcatctggcatctattattggtacagcatgagtattgtaatatgaaattacctggaaccaaatttgactctagccttgaaagttgagcaacaacatttaatttacctttaactggctcttaaagaagtttgagaatccacatctttaggtgctttacgtagaagataaaaaatgatgaggggtttaagagaagaatgaagtagaaggaaatgaccactgcaagacactccttccaggaggaaatgtctcaggtacctttggtagctttgttgccatttttttactgtgaacactgacaaaatcagaatgaatttgtctgtctcataacgaactgctaatgacattttctgcactattttgtcattcccatgaatgtcccatttgctccagaaactaccttggctaagttatagaaaaccttgcaggagagaaaggtgtgatgtaagcccaaacacataaaccaaatccactgggcatatgtattagttaataagtaataatttggtctttagctgacatgaattctgtttctacttgtatttaaatttggagctttaaaaaatgtagctctatttagtaccttttgctttcgctacttgtagtagataaaagttggatatttttgcacgtgaacattgaatgaaattcagggacaaaacgtttagagttacactaaattcaaacatcttcctttttgcattatctaggaatactaaacaggataattcatacagtctttctcttttaaatactttagggttttattttgcattaattgccttcctggttcagagaataaacgtgtggggttgaggatgggaaatacactaaaaattatagagcatcagtctactagagtcctacaaacctttaggggaacaaggtaattcatatattaattgaagcatatgaatttgctgttatttggccatgtttaacctacaaaatggcaattgtatgtggttcaatttaatagttcagaaatacattcctcgagaattgactggaaatctgaatacatcttttctcttcaaaagacagtaacccattcactccttgctatgccattgttggctcatttgtactcctagtttacaatagtccacaagaacataatttattcaaacaaccactttctttcaagctccaaaacactggaaagagtctaaatcacacacctttgcgacctcaatggtattatggaagctgttcaaagacaaagacaagtccattgggaaaggttggaatacagcacaatgttttgtgtttttttgtttttgtttttccttttaaaaactaaaggaaaaacttgaggaacttttacttcttgagagagacgaaaagttggagattcattgctacccaacaggaagtaagggtgtcaaccatgtctgcaatctcatcccagcctccatttttttttaaaacacgtttgctttctcaaatagatacaaagccatggttttcttgatcaataagaagtacatgtttctgatctcacctccttcaaaattatttcagtgtacagagcagtggagtcctaaaatacaatgtgacgaaagttctctgaaaaggaatttgaagaaaagagactttataccagtgaacagtttgcaaactgagaaaatatagtttcagtgtgaaacaaaggtgtgttccagaaaacaaagagaagattcagattttagagcaaaaggtcatgcccaggttcccaatcaggttcatttatgcaaatgaagtattcaaaattgcttagttctgactggttgacacagttgagtcctgatttgtcaatatagctgagccctgattggcggtggggacaggtgagctctgaatggttggtttccaacccccaaaccagaagtctctgtcagatgcttctttcaaagggttgatgggggcagggtttctggccacaggttattttggcacctacaaggtatcctgtctgtgtcagatgttttgctaagctaaattaaatgatgggtgttcattaaatgtctagatcatttccaggcaagatgtaattccctgtatgccctggctgacagaaagcatggattacccatggattccccatgactaactgaagtgagttaaaacagaaccaggcagctgtggctgggtgaaggactggtcatgtactttgtgttcttagaaagatgtaaatgtatcacaggacctccctgtctacaatcaagccaaaccagtttccgttgtaggtgccaagataaactgtggccagacacttggtccctcctggccctttgacaaaagcatctgacagagacttctggttttgagcttggaaaccaaccaatcagagctcatctaccctggccaatcagggctcagctgtattgaccaatcaggactcaattgtgttgaccagtcagaacaagtttgaatacttcatttgcaaaaatggtcctcactgggaacctgagtaggaccttttgctatatcaaatctgaagcttctctttgtgctctggaaccaccttcatgttacaccaaaagctgcatcttcccagtttgcagattgttactggaataaagtatctcctccaaattccttttcagagaatttttattcatatcattcaattcaattcaatcattcaattcacccactcaggcagtattatcttgtagttaaaagaaaaaactttcaaatcagtcagacctgaatttcaattccgtctccttggacaagttacgtaacttttctgagacctggtttctttcctaggatgatctttccttacactgtggctgagaggattgaatgagatagtacaggcaacgccattagcatagggcccaagcagatagcacacattcagtaactgtcagctgctcttcttcctccttctactcctcttactatcatcactattagaagaatgagctcacatatccacacaaagctcctttctaagcatggcctggaactactgctttctcatggaattgtaggaacaaatccagataaatggcaaccaggaaaattttctaagtgctctgaacctttagaagtcctggtgtggtcatgagcgtttatcgtctccacatcactctgcccttaacagaattgtgggcgacagcccggaaaggtcaagctacaaatgcagcgggagccctcccgtctatagacctccaggaaaccaaccaataaggagaatatgggcatctgatcatccctttgaggtgatttagtgctgttgaatgtcagcactagaaaggcctttagagagccggcacagtggctcatgcctgtaatcccagcactttgggaggccagcgcaggtggatcacttgaggccagtcattcaagaccagcctggtcaacatggtgaaacctcatcgttactaaaaatacaaaaaattagccaggaatgatggcaggtgcctgtaatcccagctactcaggaggctaaggcaagagaatcgcttcaacctgggaagcggaggttgcagtgagctgagatcacaccactacactccagcctgggcaacagagtaagactccatctcacaagcaaaaaagaaaggcctttagaagtccaatcctgtttataagtttaaaagtggggaaagtaaggcccagagttgtaacatagttcattgcaaagctagtttctatcgaggtgaggcgagaaccctggttgcctagttgcagtctggttctattcatatttctactacgtggtaggcctatttggatctcttctaaaccctaagatataggccagttcccatggttttggctcatcttgaatccaaaaatattttccaagcacgatccaagcactgctttttgttttgtctctcccactgtctgtgtaactgctcccaatcttataaaccagagatttgtgtatgcactgaaatgccaaaatattggcggctacatagtagaccccaccccaatcctgtacttctgtaaatacatattacagccctggctctcaaagggttaaatgttttatttaaaccagaccttcaaaactttaaaaacacttacacatttgttttactaagaatgcttaaggaaagtacactagttgcttgtgttgcttaattgtcattttttttccttttcctgagagccttaaaaaagatattactagattaagttggcttactttcgaaatagccaagaaccaacagctcccattagtcactcccattagggctgcagcttaaatgtcaggatgtagtatagacattttccaaaagaaaacaggaaaatgctttacatgatttttagagcaagctatggggaaagttaacattagtagcctttgccagacaactactgctacacgtgtgagttccattgatgaaataacagtagaagctgtgaatggccagttcctaaaaatgtgccaaaaaaaaaagtaggcttttggtctgtttaagctgcctgggtttccaccctaaggccacccccttccttccactctacctgacctcagcttccctacactgatggaacctgctcctgtaggagtggatttagagcctcaggcttgtgcatttgtgatcttcaggcctaaggcagggtcctaagacccatgaccatgtactagaacctgggacttcaccctgttatgaacctgtaaacttcacagagccaaggccagaaaatactccatgaatgaatgaagggagggagaggattctgactctctgcagagtggagacttatggaccagcacaggaaattggaccttgtccaaggagtgggtggtatcatagtcatgattttactggaaaccctcagaacaggtttctggagatcatcatggaggtatcttcccgtcttctaggaggactttcttgatttattctgcttttctccacttttctagagagccccttaggtctcccccagggtgagagcagattgaagaagctgttgaggcaagctggctgcaatcttgacttgtcccattaggatatccttgatccaaacctggactgaggttcatgctgcttctgtagaagtctgggtttgggaactggtacagtaatttttcttcgaagagacattacacagttcttatttctggaacaacttgattaaatgagcatctgttgggtattacacagacctaaaatgattttccctccaaaaccttacaaataattcaaagaaacaagcaagacagccacaaagaaacaagataaccacatgttataagatggtgtgtgcttaagggccatagtggatgtctcagacaaatggcccagactcttggaaaaggagtggtcagtgaaatgcagacttgtgggagatttcctggaaatgctgggacttgagctggatcttgtagaatgagacagtttgggatacgtggcaaagagtaagaaggaatttcccaaaagatagaatagcatgaacaaaatgttgtaagtcataatgtgaatggtatattggaacacaaagaagagttaaatccatgggtctgccgggtgcagtggctcacacctgtaatcccagcaatttgggacaccaaggcgggtggatcacttgagactaggagctccagactagcccagccaacatagcaaaacccatctctaataaaaacataaaaattagccaggcgtggtggcacacgcctgtaatcccagctactcaggaggctgaggcaggagaatcacttgaacctgggaggcagaggttgcagtgagccaagatggtaccaccgcactccagcctggacaacagagccagaccctatctcaaaaaacaaaacaaaacccatgggccttaactgatggtaccatgaaggaaaaagatgattaggaagggtaaggcccaggtatgaaggacactgaaggacatcctaagccatttagactttatcctgtagtccgtagctaatgacgaatcattggtgtatggctgagaattgattaagaaaagacgatctagaaccaaggcctggcaacttcccacatctagaaatacaaaaggagatttgtcacaacttctgagagagagagaaagtaaagaagtagtagtaaaatcagaagacagtggtgatgtcaaggatgcctagatagaaaggtattagtctgttcttgtattgctataaagaaatacctgagactgagtaatttataaagaaaagacatttaattggtttatggttctgcaggctgtataggaagcatagtggcttctggggaggcctcaggaaactttcaatcatggctgaagggatagcaagcatgtgttacatggccggagcagagcaggaggaagagagagaggaggggaggtgccacacctattttttttcttttttttcgagacagagtctcactctgttgcccagaccagagcacagtgatgtgatctcggctcaccacaacctccgcctcccaggttcaagtgatcctcctgcctaagcctcccgagtagctgggattacaggcatgtgccactgcaaaaggccaatttttgtatttttagtagaaatggggtttcaccacgttggccaggccacacacttttaaataagcatatctactgagaactctatcacaagaacggcaggagggggatggtgctaaaccattagaaaccatccccatgatccagtcacctcccaccaggccccacctccagcattggggattacgtttcaacatgagatttgggtggggacacagatccaaaccacataagaaggcatttggggaaagcatcttgaaaattttttgctagtaaaatgaaatctcctttcccaaccatatctatttctcacgcccccccaatcttcatctcttccttcactttagtcactttgttgcgagcaatgacagaacagtgtacatgattcttgcccataaattaacatgaggggtagcatgggaaaggagggaaaaagtgtagcctttggggcaaagaaacaatagggtttctatcctggatgccactcaattgctgtgtggtattagtcaagttatgttcgattttaagtattttttttttaacaacataccaccagttttgttttgggtaattactcaccaccattacataaagtcatactaggacttaagagtttctgctctcctgggttggatttctgtatccctgaaatttgaattttgagcagaataatacaagagcagataacagatcttgcattcatccaagcagcaccctaatcaaactatgagtcagttcttgcaatctagaccccagaagctgacccattccatcttctttctaagcctgatttttcagtttttacaaaattatctgagctatcccacatccttggaatcaattacttttattgtcaaaataagttgttgcttacatccaaaaaactctaaacaatatctatcctacattaggattgttttgaggtttagaaatacaggatactctggcggggtgcagtggctcacgcctgtaatcccagcactttgggaggccaagaagggcggattacctgctgtcaggagttcgagaccagcctgggccacatggagaaaccctgtttcttctaaaaatacagaattagcctggcatggtggtgcatgcctgtaatccagctactcaggaggctaaggcaggagaattgcttgaacctaggaggcggaggttgtggtgagccgagatcacgccattgcactccagcttgggcaacaggagtgaaactccatctaaaaaaaacaaaaaaacccaaaacaaaacaaaacaaaaacaaaaacaaaacaaaaacaaaaaaacaagaaatatagaatacgcccaccctcccaacatggggcctagaatatagcgtcatacaacagactgatagcttctctattgatgtcacgaaggagccctgaattttccccagtcccgtctcctgtgtcccctattacggtgaataactaagccaggatcgttctgcagttcacaagaattttgtcacctttatttattatttcttgcatcctccccaactctagtttgggaaggatggagttaggaaaggctgcgctggacttggtcccaggagaggtaaaccatagcctggcctcttgtttctggagcacatgctggagaaaggtggtctgttctgccagggagcttgctctttacatttcacaaaggacctaggaaaacagccgagagaggaaccactcattagccccaaggattacgcccaacagtcccaagaagggtcaaaatagcccagctaagtaggagaaaaataaatcaaatgctgtagctttatgtcagccacttgaattagttggatttctttccatgctatcatcctttgctcttcctgcaataccctgctaaaccattccatgggctgattgagtacatgcatgtgaagctttatgtggaataaataattacacaagacatttttggaagaataaatgcatttggcctaggaaaaccaattcgcatcttaaagagccagcttctccaaatgccagttctgtcagctaaccttctccagcaacctggcggtttaattcttcacccttgtctccttggccacactacacacgaatggttttcagagtagggaaaaaatgctttccggtgtctgttttaaatttgtttctatctactttatgtgtctaactttgtcctcgtatttgttttacagcaaaaacaaaatagaggaaagatatcaaccatatccccaaaagtttatacaagttactttttgctgttggtaataaaagcaattctgttttatagcatagatcctgtccataaactacaaacatccacttccctcacttccttcaaatctctttcgagggctgatgaagggatagccagtgacattgtgaaggtccctcagggtccttctaatagcaggcatttctatacagtctatctgtgggaccacagaggctgtgaggaatctaatcgcccactcagtctttgaaagagggaaatgaaaacacactttgatcagagaaagccaggatgaggagatgtttcccttagcccagtcctgattccatctgttagctgctgctaccttacaagccctaaaacaagtcatgcctcctcatataacatatataccggaatatgagacaacctcaagtattttcccaattgagacta

SEQ ID NO: 17 - DNA, 10150 bp, Homo sapiens
atggggagaagacggaggctgtgtctccagctctacttcctgtggctgggctgtgtggtgctctgggcgcagggcacggccggccagcctcagcctcctccgcccaagccgccccggccccagccgccgccgcaacaggttcggtccgctacagcaggctctgaaggcgggtttctagcgcccgagtatcgcgaggagggtgccgcagtggccagccgcgtccgccggcgaggacagcaggacgtgctccgagggcccaacgtgtgcggctccagattccactcctactgctgccctggatggaagacgctccctggaggaaaccagtgcattgtcccgatttgtagaaatagttgtggagatggattttgttcccgtcctaacatgtgtacttgttccagtgggcaaatatcatcaacctgtggatcaaaatcaattcagcagtgcagtgtgagatgcatgaatggtgggacctgtgcagatgaccactgccagtgccagaaaggatatattggaacttattgtggacaacctgtctgtgaaaatggatgtcagaatggtggacgttgcatcggacccaaccgctgtgcttgtgtttatgggttcactggtccacagtgtgaaagagattacaggacaggcccgtgtttcactcaggtcaacaaccagatgtgccaagggcagctgacaggcattgtctgcacgaagactctgtgctgtgccaccattggacgggcgtggggccatccctgtgagatgtgtccagcccagcctcagccctgccgacggggtttcatccccaacatccgcactggagcttgccaagatgttgatgaatgccaggctatcccagggatatgccaaggaggaaactgtatcaatacagtgggctcttttgaatgcagatgccctgctggtcacaaacagagtgaaactactcagaaatgtgaagacattgatgagtgcagcatcattcctgggatatgtgaaactggtgaatgttccaacaccgtgggaagctatttttgtgtttgtccacgtggatatgtaacctcaacagatggctctcgatgcatcgatcagagaacaggcatgtgtttctcgggcctggtgaatggccgctgtgcacaagagctcccggggagaatgacgaaaatgcagtgctgctgtgagcctggccgctgctggggcatcggaaccattcctgaagcctgtcctgtcagaggttctgaggaatatcgcagactttgcatggatggacttccaatgggaggaattccagggagtgctggttccagacctggaggcactgggggaaatggctttgccccaagtggcaatggcaatggctatggcccaggagggacaggcttcatccccatccctggaggcaatggcttttctcctggcgttgggggagccggtgtgggggccgggggacagggacctatcatcactggactaacaattctgaaccagacaatagatatctgtaagcatcatgctaacctttgtttaaatggacgctgtataccaactgtctcaagctaccgatgtgaatgcaacatgggttataagcaggatgcaaatggagattgtatagatgttgatgaatgcacatcaaatccctgcactaatggagattgtgttaacacacctggttcctattattgtaaatgtcatgctggattccagaggactcctaccaagcaagcatgcattgatattgatgagtgcatccagaatggggttctttgtaaaaacggtcgatgcgtgaacacagatggaagtttccagtgcatttgcaatgccggctttgaattaactacagatggaaaaaactgtgttgatcatgatgaatgtacaactaccaacatgtgtttgaatggaatgtgcatcaatgaagatggcagcttcaagtgcatctgcaaaccaggatttgtcttggctccaaatgggcgttactgtactgatgttgatgaatgccagaccccaggaatctgcatgaatgggcactgcatcaacagtgaagggtccttccgctgtgactgtcccccaggcctggctgtgggcatggatggacgtgtgtgtgttgatactcacatgcgcagtacctgctatggaggaatcaagaaaggagtgtgtgtgcgtcctttccccggtgcagtgaccaagtccgaatgctgctgtgccaatccagactatggttttggagaaccctgccagccatgccctgcaaaaaattcagctgaattccacggcctttgtagtagtggagtaggtatcactgtggatggaagagatatcaatgaatgtgctttggatcctgatatatgtgccaatgggatttgtgaaaacttacgtggtagttaccgttgtaattgcaacagtggctatgaaccagatgcctctggaagaaactgtattgacattgatgaatgtttagtaaacagactgctttgtgataacggattgtgccgaaacacgccaggaagttacagctgtacgtgcccaccagggtatgtgttcaggactgagacagagacctgtgaagatataaatgaatgtgaaagcaacccatgtgtcaatggggcctgcagaaacaaccttggatctttcaattgtgaatgttcgcccggcagcaaactcagctccacaggattgatctgtattgacagcctgaaggggacctgttggctcaacatccaggacagccgctgtgaggtgaatattaatggagccactctgaaatctgaatgctgtgccaccctcggagccgcctgggggagcccctgtgagcggtgtgaactagatacagcttgcccaagagggcttgccaggattaaaggtgttacgtgtgaagatgttaatgagtgtgaggtgttccctggcatttgtccaaatggacgctgtgtcaacagtaagggatcttttcattgcgagtgccctgaaggccttacgttggatgggactggccgtgtatgtttggatattcgcatggagcagtgttacttgaagtgggatgaagatgaatgcatccaccccgttcctggaaagttccgcatggatgcctgctgctgtgctgtcggggcggcttggggcaccgagtgtgaggagtgccccaaacctggcaccaaggaatacgagacgctgtgcccccgcggggctggctttgctaaccgaggggatgttcttactgggcggccattttacaaagacatcaatgaatgcaaagcatttcctgggatgtgcacttatgggaagtgcagaaatacaatcggaagcttcaaatgccgttgcaatagtggctttgctctagacatggaggaaagaaactgcacggacatcgacgagtgcaggatttctcctgacctctgtggcagtggaatctgcgtcaatacaccgggcagctttgagtgcgagtgcttcgaaggctatgaaagtggcttcatgatgatgaagaactgcatggacattgacgaatgtgaacgtaaccctctcctttgtaggggtggcacctgtgtgaacactgagggcagctttcagtgtgactgcccactgggacacgagctgtcaccatcccgtgaggactgtgtggatattaatgaatgctccctgagtgacaatctctgcagaaatggaaaatgtgtgaacatgattggaacctatcagtgctcttgcaatcctggatatcaggctacgccagaccgccagggctgtacagatattgatgaatgtatgataatgaacggaggctgtgacacccagtgcacaaattcagagggaagctacgaatgcagctgcagtgagggttatgccctgatgccagatgggagatcgtgtgcagacattgatgaatgtgaaaacaatcctgatatctgtgatggcggccagtgtaccaacattcctggagagtatcgctgcctctgctatgatggcttcatggcttccatggacatgaaaacatgcattgatgtcaatgaatgtgacctaaattcaaatatctgcatgtttggggaatgtgagaacacaaagggatccttcatttgccactgtcagctgggttactcagtgaagaaggggaccacaggatgtacagatgtggatgagtgtgaaattggtgctcataactgcgacatgcatgcctcatgtctgaatatcccaggaagcttcaagtgtagctgcagagaaggctggattggaaacggcatcaagtgtattgatctggacgaatgttctaatggaacccaccagtgtagcatcaatgctcagtgtgtaaataccccgggctcataccgctgtgcctgctccgaaggtttcactggtgatggctttacctgctcagatgttgatgagtgtgcagaaaacataaacctctgtgagaacggacagtgccttaatgtcccgggtgcatatcgctgcgagtgtgagatgggcttcactccagcctcagacagcagatcctgccaagatattgatgaatgctccttccaaaacatttgtgtctttggaacatgtaataacctgcctggaatgtttcattgcatctgcgatgatggttatgaattggacagaacaggagggaactgtacagatattgatgagtgtgcagatcctataaactgtgtcaatggcctatgtgtcaacacgcctggtcgctatgagtgtaactgcccacccgattttcagttgaacccaactggtgtgggttgtgttgacaaccgtgtgggcaactgctacctgaagtttggacctcgaggagatgggagtctgtcttgcaacaccgagatcggggtgggcgtcagtcgctcttcatgctgctgctctctgggaaaggcctggggaaacccctgtgagacatgcccccctgtcaatagcactgaatattacaccctgtgtcccggaggtgaaggcttcagacctaaccccatcacaatcattttagaagacattgacgaatgccaggagttaccaggtctctgccagggtggaaactgcatcaacacttttgggagcttccagtgtgagtgcccacaaggctactacctcagcgaggatacccgcatctgtgaagatattgatgagtgttttgcacatcctggtgtgtgtgggcctgggacctgctataacaccctgggaaattacacctgcatttgcccacctgagtacatgcaggtcaatggaggccacaactgcatggacatgagaaaaagcttttgctaccgaagctataatggaaccacttgtgagaatgagttgcctttcaatgtgacaaaaaggatgtgctgctgcacatataatgtgggcaaagcctggaacaaaccttgtgaaccatgcccaactccaggaacagctgactttaaaaccatatgtggaaatattcctggattcacctttgacattcacacaggaaaagctgttgacattgatgaatgtaaagagattccaggcatttgtgcaaatggtgtgtgcattaaccagattggcagtttccgctgtgaatgccctacaggattcagttacaatgacctgctgttggtttgtgaagatatagatgagtgcagcaatggtgataatctctgccagcggaatgcagactgcatcaatagtcctggtagttaccgctgtgaatgtgccgcgggtttcaaactttcacccaatggggcctgtgtagatcgcaatgaatgtttagaaattcctaacgtttgcagtcatggcttgtgtgttgatctgcaaggaagttaccagtgcatctgccacaatggctttaaggcttctcaggaccagaccatgtgcatggatgttgatgagtgcgagcggcatccatgtggaaatggaacttgtaaaaacaccgttggatcctataactgtctgtgctacccagggtttgaactcactcataataatgattgcctggacatagatgagtgcagttccttttttggtcaggtgtgcagaaatggacgttgttttaatgaaattggttctttcaagtgtctatgtaacgaaggttatgaacttaccccagatggcaaaaactgtatagacactaatgagtgtgtcgcccttcccggctcttgctctcctggtacctgtcagaatttggagggatccttcagatgcatctgtcccccagggtatgaagtaaaaagcgagaactgcattgatataaatgaatgtgatgaagatcccaacatttgtctttttggttcctgtactaatactccagggggcttccagtgcctctgcccccctggctttgtactatctgataatggacggagatgctttgatactcgccagagcttctgcttcacaaattttgaaaatggaaagtgttctgtacccaaagctttcaacaccacaaaagcaaaatgctgctgtagtaagatgccaggagagggctggggggacccctgtgagctgtgccccaaagacgatgaagttgcatttcaggatttgtgtccatatggccatggaactgtccctagtcttcatgatacacgtgaagatgtcaatgagtgtcttgagagcccaggcatttgttcaaatggtcaatgtatcaacaccgacggatcttttcgctgtgaatgtccaatgggctacaaccttgactacactggagtacgctgtgtggatactgatgagtgttcaatcggcaatccgtgtggaaatggtacatgcaccaatgttattgggagttttgaatgcaattgcaatgaaggctttgagccagggcccatgatgaattatatcaacgaatgtgcccagaacccactgctgtgtgctttccgctgcatgaacacttttgggtcctatgaatgcacgtgcccgattggctatgccctcagggaagatcaaaagatgtgcaaagatctggatgaatgtgctgaagggttacacgactgtgaatctaggggcatgatgtgtaagaatctaatcggcaccttcatgtgcatctgccctcctggaatggcccgaaggcccgatggagaaggctgtgtagatgaaaatgaatgcaggaccaagccaggaatctgtgaaaatggacgttgtgttaacattattggaagctatagatgtgagtgtaatgaaggattccagtcaagttcttcaggcactgaatgccttgacaatcgacagggtctctgctttgcagaggtactgcagacaatatgtcaaatggcatccagtagtcgcaatctcgtcactaagtcagaatgctgctgtgatggtgggcgaggctggggccaccagtgcgagctttgcccacttcctggaactgcccagtacaaaaagatatgtcctcatggcccaggatatacaactgatggaagagatattgatgaatgtaaggtaatgccaaacctctgcaccaatggtcagtgcatcaataccatgggctcattccgatgcttctgcaaggttggctacaccacagacatcagtggaacctcttgtatagaccttgatgaatgctcccagtccccgaaaccatgcaactacatctgcaagaacactgaggggagttatcagtgttcatgtccgagggggtatgtcctgcaagaggatggaaagacatgcaaagaccttgatgaatgtcaaacaaagcagcataactgccagttcctctgtgtcaacaccctgggggggtttacctgtaaatgtccacctggtttcacacagcatcacactgcttgtatcgacaacaacgaatgtgggtctcaaccttcgctttgtggagcaaagggaatctgtcaaaacactccaggcagtttcagctgtgaatgccaaagagggttctctcttgatgccaccggactgaactgtgaagatgttgatgaatgtgatgggaaccacaggtgccaacacggctgccagaacatcctgggtggctacagatgtggctgcccccaaggctacatccagcactaccagtggaatcagtgtgtcgatgagaatgaatgctccaatcccaatgcctgtggctctgcttcctgctacaacaccctggggagttacaagtgcgcctgcccctcggggttctccttcgaccagttctccagtgcctgccacgacgtgaatgagtgctcgtcctccaagaacccctgcaattacggctgctctaacacggaggggggctacctctgtggctgcccccctgggtattacagagtgggacaaggccactgtgtctcaggaatgggatttaacaaggggcagtacctgtcactggatacagaggtcgatgaggaaaatgctctgtccccagaagcatgctacgagtgcaaaatcaacggctattctaagaaagacagcaggcagaagagaagtattcatgaacctgatcccactgctgttgaacagatcagcctagagagtgtcgacatggacagccccgtcaacatgaagttcaacctctcccacctcggctctaaggagcacatcctggaactaaggcccgccatccagcccctcaacaaccacatccgttatgtcatctctcaagggaacgatgacagcgtcttccgcatccaccaaaggaatgggctcagctacttgcacacggccaagaagaagctcatgcccggcacatacacactggaaatcactagcatccctctctacaagaagaaggagcttaagaaactggaagagagcaatgaggatgactacctcctaggggagcttggggaggctctcagaatgaggctgcagattcagctctattaacccttcacagacttgggcccaggctcaaatcctagcacagccagtctgcagaagcatttgaaaagtcaaggactaattttaaagaggaaaaataataataactcttgtttctttcctccctgtcttagactttgaatgttgaccctcacagggagggataatttagactctggtatggccaaagatttgagcacaaaggcaaccgtggttactgtattttttatataacttcattttaaaatatattaaaagaaacctaaatgttcaagatatcagcatatggcactaaatgcacaaaaataatgtgagctttttttttttttcctgttagcagtctgtaacactttgggtattttgctatagttgctaattaaaaaaatatagatgtttatttatttttaatgcagtaatatatggagaaatgaacaaactatgtaaacaaaaagggaaactcacttgtttttctttagatttataaatttgagctattttttttagaggtgctttttaaaaatccaatagatacaagagatgtttcctttggttttctgccagtcatccagctgatacacacctgatgattttaaagaaagccacacagagctgaatgggcagtgtaatcaataatttaaaagacatgaatgtcattagatcctttataacgtagatcgaagccaaagcagctcatttgtgacaacatttcatatcaccagacacaccaggcaacagaagttgaagcacaaccactgtagcaaaataccttgactgcttgtgagaccattagcattgcaggccaaaccgtactgtatttccttctcataacctcaaggaaccatatgtgctacccacaacacctcattcttacccagggtgcgctgcgtcctcatggtactgtaggcagctgaagaaccgccgttcccttgaaagggaacacctggcattctgtggtgtttcgtgctgtcttaaataatggtgcatttattatgttcaagttatttcaggattgccatatgtgcaaacaaatcatgcaatgcagccaaggaatatatgttgttgttgttgttttaaacccattttttttttagaattttcattaatactgtagttatacaccatatgcctcattttatcatagcctattgtgtatgaaagatgtttgtacaatgaattgatgtttagtttgctttagtcatttaaaaagatattgtaccaggatgtgctattaagagcacgtatccattattcttctcaacccaagaacctgtttcctggaccagtgaccaaacctcatatgtgaaatggccaaagcacatgcaggctcctggttgttcctctcaaacctgtgctgaccaaagattagtaaccagttatacccagtattttgaggttttattgtttttttaataactaaaaagaa

SEQ ID NO: 18 - protein, 2910 aa, Homo sapiens [sequence omitted]

SEQ ID NO: 19 - DNA, 34988 bp, Mus musculus
  misc_feature (1)...(34988): n = A,T,C or G
ttttcttagcacttacctttgatagcccatgacttctgggagctcatcagaacagcaatgaagaaaaatcttaacaccagggctccaattgtggccattttcttcttgggtgtttggtgggttcagaagcgatcgcagactgaggcagaattaacaagaactaaaagggattaaaatccaaagcactcaacttttaaccaatcagaaaaatgtttcagactgacacatctgttgctaggaaagggttccttgcaaccaggtcctatttagtatccgagtttccacttaacatttcaagaaataattttcctcaagaagaaatttttccacttattaacaaaaaaataataaaggctgtagacaaacaggacaaaaatttcaagagattgggaatgttggttgtaaaatacacaatcttctgtcccaatctaagttctatctgaaacacatcagtgaggctagaataaattaaaaatcgctaatatgaaaaatggggatttgtacctctgagtgtgaaggctgggaagactgctttcaagggacattgaattatctaaagagaaacggaacaagcaggtgatggagaatgcccggattctggtaacagaatgtcattcagggatctccttattgctggatgcatctccttttgcagtgggctagacaccaacatggtcagttcagcccaaggttccagggccactggaaaatattgttttctgatggcattggaaaataaactgagtcccaaagctccaaagaccagagagagttggggcacctctggaagatgggtagcgatcactagaaaccatgggctgtatggggtcctcctatatttgtcatggcctagagaggatctctagccagattgtgacctgaaggtgaatctgggcttggatgtggaggccactactaaagaatagcttgggcacacccttagcctaggtcaatgggcagtggaagctctcctcctgtcttataaggattaaaggcttgaaccaaaagtgtattttgagattctccatagatgttcctgaaaattaggaggttttacatgtcttgtttctggaaacactgtataatactccgaaaaatatttgcttacagacagaaagggctaaaagccaaagagaagccgccaagcagctaggtttcccacctggggctgaattagtgccttggtgaatcttcaacatagtaacacaacaaagacgctgatggaccaggagggccgccatcctcctgactgctgatggtccgatcatgccaggggctaagtaaggcatctgatatcaacccccagatcactaacaggatcatcccggggtcaagaggctgatgcaacaattctgtggtgcatgctggcctcctttttcagagccaaatcaagccaacacaatttttgcacctatcttttgctagcttcttaatgccatgctcttggcaagtgtatggtaagtttaaggtacctctaaatacacagtgctacttagcaacttatgatgctgccgagttcctgtctgctgattggttctgctcctgaaattattaaactagacttcagagaatgactttcagttccccttctctgtgatggggagaagtctctggcacactgttcgtggtttcctgttctcccaaagtatagcttcctgtgtgtctgaggggatttctgaagccacctgaataatgtatccttggtgacattaaaccgtggtgagctactgtcatgggtcctccagaaaacagaattgaatatgttacaagaagtatagcttaaggctggcagagcactggtcagggtcgacttttaatctaaagtggtcagtggcctctgggaagtcccgctgatgtcatagtttcatcaaagcccacaggacacaagggaacatcatctgctgaggacgtcaccaatgcctgcttgccaatgttcaagcctgtgacagcttgctcaccacatgacacaggtccattttctctctgccacccaaaccacacagcttgtatccacactcaaaactgtgtgttcagggtgggagaactgagcctcagaggcaaatgggagtattctaaagattactgaattatacgaacatgactatcatctatatccatattctttaccggtcatctgacttcattctcccacagctccgtgaccatgagtgcatccacactggacccagatcagttctggggcttcagtgcattttacgtttgtttgatccaagttcttccattttagcttcccttctccctctcccccgaatgctgagctgctcagtatcatatccccatctgttcttttgctctagattgccatgactgtggaggtctttcatttttctgtgtaaattttaggattgatttctatagctctgtgaagaatgccattgttattctaacagagacgacactgagccactaaattccctataatagaacaacattttgacaatattagttcttccaaacaatgaatgtggaaagtgttttcctttctgtctcttcttcagtttctttttcttttcatttaattaatttatttgaatattaggaattaaatttagggcctcatctcacaccagggaaatgccccactattgaatgataagcccaatataaaactgtataatcctgagacagggatctcatctaggctggcttaggactttctccgaagcccttgtcaactttgaacttgtgatttccatctggctgaggcacaattacagggcaccagcaaacctggtttcctcttctttttaatcggtacatttgtgtgtgtgtgtgtgtttgtgtgtgtgtgtgtatttaagtttgcagagaattgtggctattgagctcctttcacaatttcctccttaggaaatctgttgatggtgtgtgggaaagctattggtttcagctgttggttggttttgtgtcctacctcgttacgaattacttggttaattcagtaactcctccactgaagccgttagacagctggaatattcacacctgagttatctatctactggtaacatttcagctaactctgagagaagagctgaccactttttgaggtgtgctttaatagagccgggaaaggaaacatgacagcagctttaaggttaacaaagagcctctccctgtcgctctatgttcccaaccacaaacaaagctttggccttaggattcctctggggtccttaggagagttgacataattggtgacagcagctaatttttttcttcttcccccatacccaggcgctgaattgagtatgctattaaaaaaaagttaatttgattgaatgatggattgagcaatattaggctttggagagcagctcttcagaccttatccaaattgtgcctccttgaaacactagcatcttgtcttgacaattccgccatctactggtcattggtggaacttcaccattggcttgcatttcgcagagatggagccacaaggggaagggacccaataggtgggacccaataggtgggtttcaaggatacaaaggctgggactagtagtacccagtaagctttatttattttttttctcaacactaggatgctcctcttattcccagagtgacatgaacctaaacatctgaaatgttgaaggtcgcacctccctgctttcttcctctgggagagcatcttcttcacacagggctgcagcaatcagctttgaaaaaggggattggctgattcccgttagacgatattcaacctgaagctcctggtttaggctggaagtttcagcgtcagtggaagaggacaaatagcctgactgaccctgactggacaagtcaaacgcccagggctcctgaaggctcttatctcacaggatggtgtgtctgaaaattacaagcagctgggcatgagttcatatttgtaggaacagaaattaagcattggtttggagtctagttctctgtgatcctagagagtttaaagaattggcgcaaaccctgtgttccccttgattccccatatgtagctccttgtttgtatctgcggcaaaatcaactttatcactttcagaaaacaataactggtgagtgattcagacttgtaagttctcttaaagtcaacttgaaagtaaattaagattttaagtgaaaaattaaacattcagaggatctggtttgtcagaacctttttggattttaggaccatggtggaacagaccgtagtccctgagcaagaccgtagtccccgaacagagcaccatgaaaaccctcaaagtggcagcaggcctctccttccctgccccagtctaggaccaccgcggtaaaatgatgcacaggagccatgggctcctgttaaattggtggctccacaacatctcagcctgcagccctcacgggagctgtccatggcggtgcatctcctttcctgcctcagtgggggctgatcctcaggagctgtccacagtggcggcacctttcctgcctcagcctacagcctcggtgaaacacggaaggagctgatccgcaggatctgtccacagtggtagctcccttccagtcccataccctccccaacagacccacaaagatggcgcctcagcaaacgccagctgcagccgggaagaatttttcaccttaacccatgaatctgatgcaggggaaagggagtggggtgaaaaaaaaccccactaatccctgacattctccccccccccaagctcaggacttgaaatcccaccaatcttctctctggagatttctgtcctgaaaagcaccgccccctcagaaaccctatataagcactgcccttttgctcagttctctgaccagttcactcccagagcagcgggcagtcatccctggattcatccctccataccctggatcctccaataaatctcattcatgagattgtttacctggtgtgactcccatcggaaaaagccaagaagaaaagaagcaatgaagagaaaaagcgaagagaatttgatggcctgaggctcctgagctcctcagctcagctggggagaccctcccctgggagctgcaatgcctctgctgaggagacttcctctcagagctgtgtggttcctgtggtctcctgtctcaggatgcccttccactgggacaccttcttccctcagagctgtgtggaccctgggctcctgaagtccaggataccccccatccccatccaagcagaagcacttacactgaccatgcaaagagttctgtgggtgacagactgatgccagggctaagaactgcccagtctgaaacttaaacatctggaagtgttgagtatcactgacctcacattcacacacacactgctgcttcctctccaccttttcctattttcccttcctctctctctctcctccctctctatatcccttctcttcccttcctcttcccctctccctgccccaactactgatttctttagacttttagctctccttaactttaagggacttcaagtggtaaatctctgctgaaaggtctttctatgaaagccagattggccaagaattcctgggctgtcacaggtgctctgctcctgtgatgtcatgacttctctgttcatgtgatgtcatggatgctctgcttcttgtgagtgcctgttcatctcaccctaccttttcacttcttgtgcagctcatgacccatgaatgaggactctcaaattcagaacttagtgttcccacctctgctaacctgactaaggtattcccccacagatcaaccccacctatgcaatccttcctggggaattgaagtggaaacttaaggattatttggaaagtgttggatggtgttttgctagagcaaacatgtgaaggaacatttcgctgaattgacataagtgaaaggatgttctgttaaagcaagcatgtgaaaggatacgtgatgaaggagtcttcgctaatgacatattggtctgccttacattgcgtagttgagctgcatttgtcaggacttcatagagagaaatgcaccaaaaaacttctggtgacgtgctgtagtttcttgtcacttcttcggacttggactgattggcagagtgatgccagctgagacagatgcatgtgctgaggtcaagacccatggaagaaacgtggtttggagggtataaatagaacttggcagacagtggtggaggcagagcttggcttgcttatagagttagctatgtaatgcttttggggtctctcatcttcactttgctgagagagatgaagccaaggacttttcctggcatccctctgggtccctcctgctgacttgtgctgaagttgaggcccgctgtctctgctaggcagtgcaactggtgctgattcatgtttgctatccagactctaccaaactgactactggtgtatccaagaagtgtttgtaagtggatcgagctgccactgctaacctgtgcctgacaacacagatgggatttgctccaaagaaccatttctaaacaggtccacttcccccatattctttattttccactgccccctggtgggtaatgggctagaagggaggggttaaagcatttaagaaccatcattaaaaatagactttgaaaaaaattagttacagggagtcccttctcaggagactctacactgagtcaaggtgacaactaaaactaaccattacaaagcccggagatggtggtccacacctttaatcccagcactcagaaggcagtagcaagtggatctctgagttcaagaccagcctggtctacagagtgagttccatgacagccagggatacacagtgaaaccctgtctcaaacaaaacaaaaaacaaaacaacaaaaaaaaacaaaataaaataagcaaaaaaaaaaaaagaaaaagaaagaaagaaaagaaagaaagaaaagaaagaaagaaagaaagaaagaaagaaaagaaagaaaagaaaaggaaaagaaaataaccatcacagacagggaacaatccttctattctgagggagaaatagcccttgtatccttcttaatatctagtcctcccatcccgcacttgggaccttgtctagactcactgccttcgtcaagaccagtagcttcaagctagatggagcaggattccctaatcctgagagggaagaatcagggaaaagcaccttgcatgctgtgctgttacactgttaccttgcatgctgtgctgttacactgttaccttgcatgctgtgctgttacactgttaccttgcatgctgtgctgtttgttacactgttaccttgcatgctgtgctgtttgttacactgttaccttgcatgctttgctgtttgttacactgttaccttgcatgctttgctgtttgttacacgttaccttgcatgctgtgctgttacactgttgccttgcatgctgtgctgttacactgttgccttgcatgctgtgctgttacactgttaccttgcatgctgtgctgttacactgttaccttgcatgctgtgctgttacactgttgccttgcatgctgtgctgttacactgttgccttgcatgctgtgctgttacactgttaccttgcatgctgtgctgttacactgttaccttgcatgctgtgctgttacaccgttaccttgcatgctgtgctgttacattgttgccttgcatgctgtgctgttacactgttgccttgcatgctgtgctgttacactgttgccttgcatgctgtgctgttacaccgttaccttgcatgctgtgctgttacaccgttaccttgcatgctgtgctgttacactgttaccttgcatgctgtgctgttacactgttgccttgcatgctgtgctgttacactgttaccttgcatgctgtgctgttacaccgttaccttgcatgctgtgctgttacattgttgccttgcatgctgtgctgttacactgttgccttgcatgctgtgctgttacactgttgccttgcatgctgtgctgttacgctcttacaatgaagaacaaacattcttctaaataagtttaaaactgctcttcccagctcttgaaagtggatctggagacccctcaatagtgtgaaagagaatttaggggatccccaagaaggactgaagaaagaagagcacataacaggggtgtccaaggccctccattactagccatgctcattgtacccacacgctatatcagaaagcttattacatttcttgggtgaagcctttgttttccagtaaaagagaaagaacaaagaaaaaacacacaggcaccttggcctgatgttctggtcttggacagggaacatcccctcctagacttggttttctactcagtagggtgaaggttgagtatctgatagacagtcatgctctgcactctgagggtccacagactccgtgttgtgagagagcttggccctagatggggaatcatagaagttcagcaagctgaaggacaggacaaagtagccatgatttaggccactgccagatgtcaggtcacctacctgctggacagggcatggagcagggtccagcctgcgtgctggtgttctgaagagataagggtcaacattatcactgtgcctagaaggctagatgaatcagaacagagcccaaagtccacctgccttccttctgagtttcacttttgagcagaaggtaaatgtgctgctctgactggagcctcattttagactgaccctcggggactcaactctgcctacagattgacaccattcaaatcttccttcacgcaaactggtgacgcttccactttccttgcctgctccatcaccagtcactatgctctcctgtccttagacacctgctatgtgaatgaaggacacacttgtgactgggtgagaccaacagcctccatttcaccctaaaggaaagagcaacaggtgagtggcttggagagtctctcatgaaggatggacatgggagtgggggtggggtggggaggagtcaactaagatgaggaagtaggtagagccagcatcctgtcaggaaatggttcttacttcctgttgatctccactgcacattttttagagagtagtgttttgagacagactcccactctatagccaatgccggcttccaacaaatggcaatcctcctgcctcagccttctgggtgctgagattatagtgagctaccacaacaagctgagtttttcctctttttaacatcattgtctctttagctcaggactgatttttctttccaatcaaaaaacttccttcagctcaggttggtctcaaaccagacattgtcttgcctcatcctcttcagtatctgcctcctggtgtatggaatttcaatctcaggattcacgagaggtagaggaaggacttcaaggtcatccttggctgtgttgcaagttagaagccaactggactaagtgagacctgagggggagcctaagggataacgtacagtgtaactccatcgtgagagctcaaatgtgagtgagtgagtcagctgtgatcaacaactgaaaagaacggggccaggccatgatctgatgatgacaggtttggtgctagttgtctattaagatagcatagccatcagaagtcctagtttgcttgctattgctgtgataaatatcaagaccaaaagcaacctaggaaagaaagggttaatttcatcttacagctggcagaccactatgaagggaaatcaaggcaggaacccaagcagtaacctggaggcagacactgaggcagagaccatggagcaacactgcttgccctctgtgacttgctcagcttgtttttttacatcatgcaagcccacctgcccaggggtggcactgcccgcagtgggctgggtcctttcccatcaatcgttaattaagaaaaattcccccacagatttgctcataggccaatctgatggaggcagttcctcagttaggatcccttttctcagatgactctagcttctgtcgagttaacaaaacaaaacaaacaaaaaccaatgcagaaactgcaaggcatggtgggtaatcacagctgtactttcttctatgtttgctccagggaggatggtggattgcccacggtatagtctatctggcgtggctgcctccttcctcttcgtcctgctgactataaagcacccaggtagggtcccttcctacccaccccatccccacttgctgtcatgcccctcagttctaaaatgcacagtctcaaacccaacctgacagtgcagtacaaaggggtgcgggctcacactggcctttccacccctcccccacctccccatcccctggctttggaaagcttcttgacttagttgctcatctcttgggtgcgagtgacaactttaggcggcactggaagtcacctggaaagcgcaactggaatccatagctggagcatgctcagttttcacacaatactcaactctgcggggaagaccacacacgtaaatcccaccagccaaagacacaagatctctaagtatcggagagaattttgagcagtatcttaaatctgagttaagagtacccttatgactacttttattttattagcttttaatgttgcgtgtgtgtgtgtgtgtgagtgtgtgtgtgtgtgtgtgtgtgtgtaggacagtgtatggggggggggtgcaccctgcagcttgcatatgagggtcagaagacaatttgccttagctggttcttctccccaccatgtaaatcctgggacttgaaccctggtcttcaggcttgattgcaagtgcttttccctgctaagcttccactcgctcctcctccctacacagggttttgggtctacccaggctggcctctaactcacctggtagccaagatgaccttgacctcctgatctttcctgcctccacctccccagggccgggactacagaagaagaatgggtacccacgacatgaaattctcaaacatcacagcacacagaattgtcaaacacatctttgatttttcagatatcaaagaacatgacttaagatttgatcagaagactcaaactttctaggcaagccttgcctctaacccaccatgagacacttttgtgaaacctacatttgctatttactggactcttgccttctctgggaggaaaggaaaaaaccaatcagcaccgtccctgggatgagtgacccaggaaggtagaaggacccagtggcttcgctatttacctaaactcaaaatgactccaaaatcaagataaagtccccatggaaacatcaactcacatattaatttatctgggaatgaaccccagagatgtggttgcttttggtatcttaaagatggatggtttaagcctgcaaaactcagggctggagaggtggctcagttaagagtacagaaaactcttccagagagccaagttcagttcccagcatctactgccgatggctcacaaccacttgtaagccagctccagggaacatgatcttcttttctggtctgcacacacatgtgtgtacccacacaaatgtgcatagttaaaaataaaacactttaaagaaaaaaacaaatccagatccccaaagctcattaactgtggaattgcctcccaagtggtgacatatattcacgctcaaaattttaaattttagaacacataccgtttatttttaaccagaaaatgtgcaccccttccatgttttaattctctgaaacattgacattaaatactttcctgctttctgttaacaagttccagcaccttggctacttgaagcgagcatcctggttctctggcttgcctctctgtttcctctttcactgttttgtagatgacttcagagtggtcggtcctaacctcccaatcctggctaaagtcggggaagatgccctgctaacgtgtcagctcctccccaagaggaccacggcacacatggaggtgaggtggtaccgctccgaccctgacatgccagtgattatgtaccgggatggagctgaggtgactgggctaccgatggaggggtacggaggccgggcagagtggatggaggacagcactgaagagggcagtgtggctctgaagattcgccaggtccagccaagtgacgatggccagtactggtgccgcttccaggagggggactactggagagagacaagcgtgctactccaagtggctggtgaatatctgcccaggggcccaggggcacagaggaacaggggcacaggggcacaaggggcacaggggcacaggggcacaggggcacaaggggggatggatccacttacctttgggaactgtatcacctcttgaaaaatcctttttcaaccaccgaaggaggacatttctttttttttttttcttactcatttttaaaataagaattgtttgcttttatgtgtgtatggggatattctgcctgactgtgtgtctgtgcgccatgtatgtgctcagcgtccatggaggccagaagagggtcagatcccctggaactggagttacagatagttgtgaactatcacgtgggtgctgggaacaaaacccaggtcctccagaagagcgaacagtactcttaaccactgagccacctccccagtcctcctcctcctcctcctccaccaccacctcctcctcctcctctttcttttttcttcgagacagggtttctctgtatagccctggatgtcctggaactcactttgtacaccaggctggccttgaacacagaaatctgcctgcctctgcctcccgagtgctgggattaaaggcgtgagccaccacgcccggcttattaagtccttgagaatttcatacaatgtattttaatcatatccttcctctccccccaacccctcccaaactccacccccttctctacccttacaatcatggctcccccaccccaccccatctcttccttctatccagtgctaattgtaccatccacacattcaagtgtgtgaccatctgctgagcttgctcaacctaccatgggctacacaccttaaggaaaattgactccttgctcccagcccatccccagctcctggcatctatcagtcatcaatatcttctcagctgggcatgggattcatgcccatctccccatctatgctgagaatttgtcagcttgaggtcttgtgcacgctatcacaaccactctacatgcaggaggggaggtcaggcaaacccagttgcttcaccagggaatgattctctggggacactggccactctggccaatgcagtttttaccaccaccttttgaaaaatccattagcatgcattccttgtgcaaagtgatggatcttgtgatgcttttgttaagtttatcatggtcctttaccatatttacccatgccttctcctgtcacctcccatcatccccttctgcttaataccatggtctccagctccatccattttctgtgaataacttcttttaattctttttgagtgaataaagtgggttctagaaagatggctcagcaattaagaccccatgtactcttccggaggagccagttttgattcccggcacccacacagtagctcacactatttgtaactccaattccaggggattcaatgtcatctttggactccacaggcacaagacacacatgatgcagatgcacacgcaaaacacccacacacataaaataaaatttagcacaccatggtcacttggctatccagtcatctgtgaatgcatatcggggctgaccctacaacatgggcactgggaagggttctttcttcatgaatgaatgtgagcttaaattcccttgggtgtttttccagaagtggagcaatgggtgttatatatcagctctgattttagggggctttttgtttgtttgtttggttggttggttgggttttgtttgattttttagggggggggttcctttttgagaaacatccacacagatgttttaattgttcccattagtacgttcaattggctcaaaagaatggacgtgagaatctgtgtattgctaagctgcaggtagagctggacactgattcatgacactcagagacattgaaatttaagtcaaatgttatctgtgggtgcaagtgaaaggcttattcatctgttttctcagccagtgatataaacagctgtgatgttttaaaaaaggcactctatggtttacacaaattagtctaaaatagatttccccacttcaagaaaggtacagtaatttctcaaccattttactgcataccaaaattgcaactgcccacgaatctaacaaaccacggaagaaatgaaaatagcccataaatgtgatgtctgagttaataataaatgtctcatttaaactagagttctgatatcatccaaaaacagcagacaaggagcctactacagagaacatgagaagcaaagttgagggcagagatgtcatcatgattaaattaggacatagacattcctcctgaataaattagggcacagacaacctcatgaataaatcacaccacatcttcaaagtaccagagtcacaaagcaaactgtgtcatgtttccctcctctccctttcatctactgagtctgaagatgctaatgtttaaagatacaaataaaacagccagaactccatttgactgggaaggaactctggtaacattgtctgcttcccaggctgtgggctcccacctcctccctatgaaggactaccccaggtctcggttcgatctgtggactctgggattcaaagatgtgcgctttctctctctctctctctctctctctctctctctctctctctctctctctctctctctctctccagctctaggatcttccccaaatatccatgtggagggacttggagaaggagaggtccaacttgtatgcacgtcccgaggctggttccctgagcctgaggtgcactgggaaggcatctggggagaaaagttgatgagtttctctgagaatcatgtgccaggtgaagatgggctattctatgtggaagacacactgatggtcaggaatgacagtgtagagaccatttcctgcttcatctacagccatggcctcagagagacccaggaggccaccatcgctctgtcaggtcagtgctttggctcaggcaccacagatctcaggggttccaggggctgctcagcagcaactcttctttttctttaatcatatttatgtaatatgttcaaatttataaacattcatggtatttcagtaatcttcaagtttatattttactccactgtgttaattttgctacacagatgttaaacacattggagatataataaaaatagtcctttaactgagacgtcttcttgtggtgtgccagttgcttccaagaaccaatcatgtgcttagtcagaatgggatggtttctttgacagcttcttagttatagtcttgtcaataagtagtaacaaaaacaataatcaaaacacacaatacaatagttacaggtatgtttcctatgttgttagaagttagagcagagagggagagttgcacttaatgattcttagagcccagaaagtcctcatgctcagtgataaagctccacttaccatctagtatctatcacctatctcctacatatctaatctatcaatcatctgtctgctgtttatccatctatcaaccatttatcaattacacatcactacagttacaattaactatccatcgtcatgtgtctaatccaccatctagctgtcacatatctatctaccaatcaacatcatctatctaatcatctaccattgatcaatcatctatctataatatatcatcatatatcaatcacctgtctttctaaatatctatcatctacctatctgtcatctatccatccattcatccaattatctgtgtatccatccaattatctatcatctgtctatctctttgtcttatctatctgaaatagacatttgtatttcttttgagaccgtctcagtctatactccaagctggtctcaaactcactgcaatcctcctggctgagcctcctatgggttgttactatgttactataggcatgaaccaaccagctagactttgctgcttatgtgaggagaattgcctttaaacattttaaattgaactgagaattttaggacactctgtgtttggatgtattgctggtgtaagcaaaggatgcattaaagagttaaaagtaaatgttgtgttaatgttaattcaatatcatacagcccctgtttagaatactaagtaatacttgtttatgactttatatttcatacttagcacttatttataaaaaataatacatatgttttactagtgcttaatatcagcagaaacaaaatggattgacggtgatagaaccaacctttttgttgagaaaaagtaagatctatgtcatcaggtggtccatgggaagaattttctgtttttcatactttttaaataaattgagttcttgaataaaaagtgaagctcacctttatttctggaaagtttctttactttcctttagaccaaatcccttaagatatttttcttttttttttctccagagaggctccagaccgaactgggtgagtgggacctgcgtgcacgcccatgcatgagggcagagcattgagagcaccggggacacctcacgatcctcgtgagaatgggaggaaatgccaaggcacatcctcaaaaacttcctttggggattggccaggggaggctttttcaatttctgttgctacacacccacctggcactcaggtttagcccatgatcacagggtagcacaaaccgattgtgtaaagtctgcccatttagtgatggcctctttatcttattctgagaattttagcagtaaaatcattcccttattggcgtgtagcctggcctttaattaatgtttccttcagactagcaaggctcttctttaaattgcatgcagactacaagccccaccttcctccaaggagggaccctgggcctctaacctcccctgggatgctcgtgggttccaaacctcacaggatgtccatgttagtagagtgattttctctgtgttgattcatctatgtctggtgtatttaacagcttccgttagcgtaatcggacattcccagcccagccctgttcaagtcggagagaacatagaattaacttgtcacctctcacctcaaacggatgctcagaacttagaggtgaggtggctccgatcccgctattaccctgcagtccacgtgtatgcaaatggcacccacgtggctggagagcagatggtagaatacaaagggaggacttcattggtgactgatgccatccacgagggaaaactgaccctgcaaattcacaatgccagaacttcggatgaagggcagtaccggtgcctttttggaaaagatggtgtctaccaggaggcccgtgtggatgtgcaggtgatgggtaaggataccaggtggatcttttggcttctccagcttcctaacactgtggcacgctggttcctgggagatttctctgacacccaaaatattctccgtgctcattcattttcaagtttatattgaacttttggtgtagcaaccaccataaacacttcaagagcacaaccttgggtacacagatttgaggtttttaaataaatacttctttactaattccctgagaatttcaaaccatctgctttgataatattcaccacccaacttcccatcctctttttacaaaattaataacccatggactcctatttccgctgtccacatacttgtgagtgcagagccatctactggagcaaggtcaacctgccaggagccacatccttaaagagaactgactctcatgtcccctgaatcatcaactgtccatagctccttaggtaggagagggctcagagccccttccaagctggaacattgaccagcttgatctagtgcaggtcttgcatagacaaccacagctgctgtggtgcagtggccctgtcctattcagacactttcagtacggttcccatcccccaaactctgactcttacaatagtaccacttccttcttccatggcggtcacttagccatggggggacaatgatatagacatctcatttgtgactgaatcccccattcaatctctgcactttgaccagatgtgagtttctgtcttagccactacccactgcaagagaaacttctctgatgaggtctgagagctgtgctaatctatgggtacaaagagaaaagaatttgatactatgtccatttagcaaaatagtagtagtaaggtctcccttcaccactgtgagttcttggccagactgacagcactaggcaggcctttcctgtggtttaaatgtttaagtgcagaacaatcaggaaggtgggactctcaagcactccgtaaagtgacattctgagaatattccccatgattttacacaaaccttgttatttcacagtgctgctaagattctgggaaataattggtttccaggaattgtagtaatttgaagactcagctagatctaccacatgcacagaatctgtaaagactgacagtcttggtgtgcttgnnnnnnnnnnnnnnnnnnnnnnnnnnnnnnnnnnnnnnnnnnnnnnnnnnnnnnnnnnnnnnnnnnnnnnnnnnnnnnnnnnnnnnnnnnnnnnnnnnnnnnnnnnnnnnnnnnnnnnnnnnnnnnnnnnnnnnnnnnnnnnnnnnnnnnnnnnnnnnnnnnnnnnnnnnnnnnnnnnnnnnnnnnnnnnnnnnnnnnnnnnnnnnnnnnnnnnnnnnnnnnnnnnnnnnnnnnnnnnnnnnnnnnnnnnnnnnnnnnnnnnnnnnnnnnnnnnnnnnnnnnnnnnnnnnnnnnnnnnnnnnnnnnnnnnnnnnnnnnnnnnnnnnnnnnnnnnnnnnnnnnnnnnnnnnnnnnnnnnnnnnnnnnnnnnnnnnnnnnnnnnnnnnnnnnnnnnnnnnnnnnnnnnnnnnnnnnnnnnnnnnnnnnnnnnnnnnnnnnnnnnnnnnnnnnnnnnnnnnnnnnnnnnnnnnnnnnnnnnnnnnnnnnnnnnnnnnnnnnnnnnnnnnnnnnnnnnnnnnnnnnnnnnnnnnnnnnnnnnnnnnnnnnnnnnnnnnnnnnnnnnnnnnnnnnnnnnnnnnnnnnnnnnnnnnnnnnnnnnnncacactcaacctattgctgctgtcccttctgctccctcttccctcctcctcctccttctgccatttctcctcttcctcctcttcttcttcctcctccatttcctcctcctttatcttcttactcttttcttcttttcctcttcctattttattttcttctccatggtggagtatttttaaaataaatcttttaaaaataaatatttgtctcttgcaaagtttgtcttcaggtaacctaaggacaacatttctctgaatttcttctctctctgtctctgtctctctgtttctgtctctctgtctctgtctctgtctctgcctgtgtgtgtgtgtgtgtgtgtgtgtgtattttactctatctacaaactcccccttgttgtcaaaacaattctggcatgtctttttccctctgatgtaaattttattctgcactagaaattaattttcctcaaagccctggcagttatgtttggcagactttatgtttaccaccgtagttactccagtaatctgtggtggagtgatataatgggaaggagagaaggaaatggggtggggcaccagcagacataagcttacctgcttcccttggcacctgactttcaggaagactgagccaacgggttcctggagagacccagccctcaggctgctcctgtgagaaaagccatctcgatgttttgctcatctcatgacctcctggggtttgcatttcagactccaagatagctttgctatggatgaccctgcctgttgtggtgctgcctctggccatggctatcgacctgatcaaggtgaaacggtggcggcggaccaatggtgagtgggtgaacagggcggacaggcccgaagtcattcttcagcagctgatgaggcctggcttactcatgtattcaaagctcagcgctgagtgagcttcgagtttacagcaatggggttaaaagacagtaacatgaggactagagagactgctcagtgtttgaaatgtgaggacctagatttgcatcactctggtcatttccctcagcctcgtctagcctggtggggaagtacaagatgtcatgacacctcagcataggaggatcagagaagccagaaagcagtcaggggagggctggggagatggctcaggagttgagtacttgctgctcttgtggaggatctgggttcagtttctagcgcttagctgggggctcacaaccatctgtaactccagtatcagggggttgacatttccttatggtcttagcaaacagaaaacataccagggttcacagacattcatctatgcaggcaaaacattcctacacataaaataataaaaagtaaatagatttaaaaaaaaaagttggaagaggagacaaagaaggacagggagaaagaataacaaatgatgagaaagttcggtgacaactgtgtaagaaaatgccacggtggaatctgccccaagtgtgctaactacttggagctggtgaggtggcttaggggttgagagcaccggttgcacttgcagaggacccaggttcgattcccagcacccacattgcaactcacaattgtctgtgactccagtcacaggagagttgtgcagcctcaggcttcctatatctaccttgccaatacccagccatgaccttatgctctcaatcattatcccaccacactgccaagcaggaacactcttgatcttctaatgtttcagtcacgtaaactaaaccctatctagtccccaacctccggggttccatctctctatcagtctacaaattacttagtcacgtgcttccttggaaactcagggcgccacatcttccagttaccacagagctgccccctgaagctctcgttggtccctcagcccccaagtgccattctgtgttcctacatggcccaggccttaggccatgccctatcacccaaggctgtggacacaggtgactaatcctgtgtccactgctggtgtcttatgtagctgtcatggatgaacgacccctctcaccaaaacatgaacaggagactgaggcagagcattgatgacagtaaacccaaccgtggtgttagatggggtgggggcgggggtgaggggcttgctgatacaatgttttcctttgccctgaaaagaaagacaagcctgtcagacagcaagacatggcataggtagggacaccctttctgccacaagggcagaaagataaccccaccccccaagttctttcttgactgtttctataatagtaaaacctaatttcctaatttaaaaagcacttttcaggccaaaagtctagtgtttatattgtttattatgcaaagatgtagcttgcctcttctcttactgtcttagtcagggtttctattcctgcacaaacatcatgaccaagaagcaagttggggaggaaagggtttattcagcttacaattccatactgctgtttatcaccaaggaagtcaggactggaactcaaacaggtcaggaagcaggagctgatacagaggccatggagggatgttctttactggcttgcttcccctggcttgacagaacccaagactaccagcccagagatggtcccacccacaaggggcccttcccccttgatcactaattgagaaaatgccttacagttggatctcatggaggcacttcctcaactgaagctcctttctctgtgatagctccagctgtgtcaagttgacacaaaaccagccagtacacttacctagacccaccaacttacgttcactgaaaatcgtgtggtcattttttcacacccggtaacttttctctaggctgcaccctactgtgtatttttttctaggggtcatgggcctcagggcttgctggttttccatctcagtcctacacccagccggaagcccatgaacaccactccatctgacttcagttatctgcgaccctttcctctctcctcatccttgacactctgtaaccccctcttcttctgtttttccttccagaacaaacacacagcagcaatcaggaaaataacaagaatgacgaaaaccacaggcggcgacttccttctgatgagaggctcagatgaaaatgcaccccgcaagcccaacgcaccccatttcctgaacaccccatccctcctcccatcttttcccctcaataagctgcactgacataggagtgctttcacttgctgctctccaaaggttcttcatggaccctgtccgtacctgatgcaaccatcacgcacagttgggagcacctcgacctgagccaacccataatagtcttgatccctctctcacagtgatggcatcttctctccctttgtctctttctgctatccctcaatctagggactatcccttgcctgtgcacagcatctttatctcatcaccttctggacccaccgtgaggatggaagaacttagacctgcagagaaatgtcactcatctgagtcctggatgggnnnnnnnnnnnnnnnnnnnntctagtgcagaataaaatttacatcagagggaaaaagacatgccagaattgttttgacaacaagggggagtttgtagatagagtaaaatacacacacacacacacacacacacacaggcagagacagagacagagacagagagacagaaacagagagacagagacagagagagaagaaattcagagaaatgttgtccttaggttacctgaagacaaactttgcaagagacaaatatttatttttaaaagatttattttaaaaatactccaccatggagaagaaaataaaataggaagaggaaaagaagaaaagagtaagaagataaaggaggaggaaatggaggaggaagaagaagaggaggaagaggagaaatggcagaaggaggaggaggagggaagagggagcagaagggacagcagcaataggttgagtgtggggtgcacacctgtaatcccagagcttgtgacgcagaggcaggaggatccgaagtcccaggctagcctgaatacatgaaacctctcaaagaaaaacacaacaaaacaacaacaacaacaacaaaaccaacaaaaacaaaaaaacatagagcccaagccatttgatacttggttcccaagccagaggaaggtatgcagtcaccaacctgagagagggaaacgggctgttttctcctggcccagagggaggctgatggagcaggtcacattcaccatggagccgtttgtgaccagcagaagtgtctccacctggaacagctcctggctcccttgctgaaaggcctcggaaaacgatggcattgtctttccatctctgtccctccactgcacatggggccgtgggaaccacccatcagacgtacacctcagctgcatgcctccatctttcaagacctccctggtgatccgtggggtggaacccaccgctggggacagagaccaaggaagccgatggagcctccacacatgtgtgtggtcagcaacatcccccgggggtgggggtggggtgagggcagcttggggaggacagagctctgggccaatggcctcccacgggagctgggactggctacaagatttcttgttttgtttttctatctttgttgnnnnnnnnnnnnnnnnnnnntgcccatcccccaaactctgactcttacaatagtaccacttccttcttccatggcggtcacttagccatggggggacaatgatatagacatctcatttgtgactgaatcccccattcaatctctgcactttgaccagatgtgagtttctgtcttagccactacccactgcaagagaaacttctctgatgagttctgagagctgtgctaatctatgggtacaaagagaaaagaatttgatactatgtccatttagcaaaatagtagtagtaaggtctcccttcaccactgtgagttcttggccagactggcagcactaggcaggcctttcctgtggtttaaatgtttaagtgcagaacaatcaggaaggtgggactctcaagcactccgtaaagtgacattctgagaatattccccatgattttacacaaaccttgttatttcacagtgctgctaagattctgggaaataattggtttccaggaattgtagtaatttgaagactcagctagatctaccacatgcacagaatctgtaaagactgacagtcttggtgtgcttgaagaggggcagacaaacatcacccttagaaacagctctccgacatcagcaaatgtttttaaggacataggcctaagtcttggatagccttcatatttcccttataccaagtcccagtctaaattaacagacaggagcatgacacgcctagaggaccatctgttacagggctttcttcctctattttgagaagcctctcttactcagcatcttccatgtcgtccaagtctcatgtttaatcaaaattacttcgttgtcaaggtcaggagggaaaagggaattgaggttacaaaaaagttagatttgaaaatgtattttttaacttgtagtctatcctagaagactgcaacaaagatagaaaaacaaaacaagaaatcttgtagccagtcccagctcccgtgggaggccattggcccagagctctgtcctccccaagctgccctcaccccacccccacccccgggggaagttgctgaccacacacatgtgtggaggctccatcagcttccttggtctctgtccccagcggtgggttccaccccacggatcaccagggaggtcttgaaagatggaggcatgcagctgaggtgtacgtctgatgggtggttcccacggccccatgtgcagtggagggacagagatggaaagacaatgccatcgttttccgaggcctttcagcaagggagccaggagctgttccaggtggagacacttctgctggtcacaaacggctccatggtgaatgtgacctgctccatcagcctccctctgggccaggagaaaacagcccgtttccctctctcaggttggtgactgcataccttcctctggcttgggaaccaaatatcaaatggcttgggctctatgttttttgttttgttttgtttttctttgagaggtttcatgtattcaggctagcctaggacttcagattctcctgcctctgcgtcacaagctctgggattacaggtgtgcaccccacactcagcctattgctgctgtcccttctgctccctcttcccctcctcctcctccttctgccatttctcctcttcttcctcttcttattcctcctccatttcctcctcctttctcttcttactcttttcttcttttcctcttcctattttattttcttctccatggtggagtatttttaaaataaatcttttaaaaataaatatttgtctcttgcaaagtttgtcttcaggtaacctaaggacaacatttctctgaatttcttctctctctctctctctctctctctctctctctctctctctctctctgtctctgtctctgtctctctctgtctctctctgtgtgtgtgtgtgtgtgttctattttactctatctacaaactcccccttgttgccaaaataattctgatatgtctctttccctctgatgtgaattttattctgcactagaaattaattttcctcaaagccctggcagttatgtctggcagactttatgttttaccacagtagttactccaacgatctgtggtggagtgatgtaatgggaaggagggaaggaaatggggtggggcaccagcagacctaagcttgcctgcttcccttggcacctgactttcaggaagactgagccaacgggttcctggagagacccagccctcaggctgctcctgtgagaaaagccatctcgatgttctcctcatctcatgacctactggggtttgcatttcagactccaagatagctttgttatggatgaccctgcctgttgtggtgctgcctctcgccatggctatcgacctgatcaaggtgaaacggcggcgacggaccaatggtgagtgggtgaacagggcggacaggcccgaagtcattcttcagcagctgatgaggcctggcttactcctgttatcaaagctcagcgctgagtgagcttcgagtttacagcaatggggttaaaagacagtaatgtggggactagagagactgctcagtgtttgaaatgtgaggacctagatttgcatcactctggtctccctcggcctcgtctagcctggtggggaagtacaagatgtcatgacacctctgcataggaggatcagaggagccagaaagcagtcaggggagggctggggagatggctcaggagttgagtacttgctgctcttgtggaggatctgagttcagtttctagtgcatacctgggggctcacaaccatctgtaactccagtatcagggggttgacatttccttacggtcttagcaaacagcaaatataccctggttcacagacattcatctatgcaggcaaaacattcctacacataaaataataaaaagtaaatagatttaaaataaagttggaagaggagacaaagaaggacagggagaaagaataacaaatgacaagaaagttcggtaacaactgtgtaagagaatgccacagtggaatcttccccaagtgtgctaactacttggagctggcaatgtggctcaggggttgagagcaccagttgcacttgcagaggacccaggttcgattcccagcacccacattgcaactcacaattgtctgtgactccagtcacaggagagttgtgcagcctcaggcttcctgtatctaccttgccaatacccagccatgaccttatgctctcaatcattatcccaccacactgccaagcaggaacactctgatcttctaatgtttcagtcacgtaaactaaaccctatctagtccccaacctccggggttccatctctctatcagtctacaaattacttagtcacgtgcttccttggaaactcagggcgccacatcttccagttaccacagagctgccccctgaagctctcgttggtccctcagcccccaagtgccattctgtgttcctacatggcccaggctttaggccatgccctatcacccaaggctgtggacacaggtgactaatccctgtgtccactgctggtgtgcttatgtagctgtcatggatgaacgacccctctcaccaaaacacgaacaggagactgaggcannnnnnnnnnnnnnnnnnnnnnnnnnnnnnnnnnnnnnnnnnnnnnnnnnnnnnnnnnnnnnnnnnnnnnnnnnnnnnnnnnnnnnnnnnnnnnnnnnnnnnnnnnnnnnnnnnnnnnnnnnnnnnnnnnnnnnnnnnnnnnnnnnnnnnnnnnnnnnnnnnnnnnnnnnnnnnnnnnnnnnnnnnnnnnnnnnnnnnnnnnnnnnnnnnnnnnnnnnnnnnnnnnnnnnncccaagctctttcttgactgtttctataatagtaaaacctaatttcctaatttaaaaagcacttttcaggccaaaagtctagtgtttatattgtttattattcaaagatgtagcttgcctcttctcttactgtcttagtcagggtttctattcctgcacaaacatcatgaccaagaagcaagttggggaggaaagggtttattcagcttacaattccatactgctgtttatcaccaaggaagtcaggactggaactcaaacaggtcaggaagcaggagctgatacagaggccatggagggatgttctttactggcttgcttcccctggcttgctcagcctgctctcttatagaacccaggataccagcccagagatggtcccacccacaagggcccctttccccttgatcactaattgagaaaatgcctcacagttggatctcatggaggcatttcctcaactgaagctcctttctctgtgataactccagctgtgtcaagttgacacaaaactagctagtacacttacctagacccaccaacttacgttcactgaaaatcctgtggtcattttttcacacccggtaacttttctctaggctgcacgctactgtgtattttttttttttttctaggggttgtgggcctcagggcttgctggttttccatctcagtcctacacccagccggaagcccatgaacaccactccatctgacttcagttatctgcgaccctttcctctcccctcatccttgacattctgtaaccccctcttcttctgtttttccttccagaacaaacacacagcagcaatcaggaaaataacaagaatgacgaaaaccacaggcggcgacttccttctgacgagaggctcagatgaaaatgcaccccgcaagcccaatgcaccccatttcctgaacaccccatccctcctcctatcttttcccctcaataagctgcactgacataggagtggtttcacttgctgctctccaaaggttcttcatggactctgtccgtacctgatgcaaccatcacgcacagttgggagcacctcgacctgagccaacccacaatagtcttgatccctccctcacagtgatggcatcttctctccctttgtctctttctgctgtccctcaatctagggactatcccttgcctgtgcacaacatctttatctcatcaccttctggacccaccgtgaggatggaagaacttagacctgcaaagaaatgtcactcatctgagtcctggatgggtttttctagaaatgcccaatccagtagcactagagggacaaagcaggtggtaggagagggtttctttcctccgtcctcaagagaaaggactaactgtgattcacggttacaaaagacctgacacttgcactacaaatcagaccgggggtgggggaattgtagaaataactaagggggtaaaagcacttgctgttcttgcagaggacctgagtttcattcctagcacccatatggcaggtcataaccatctataactccagttctagggggtcagatgcccttttctagcctctgagggcaccaggcacacatgtggtacacagacatagatgtaggcaaaacacccatacatctaaaataaaaataatttttataaagaattagaccaaaatctctcatgtggtctctatccgagcatgtctgcagctggtttatgtaagaaccacagaaaggagacagaaaaaaaatgctaatgcttaaatccctcataatatatttcacacctatctatgccatgtactggtaccccaaagtacacaatatttccatgcctaaaacagggttttctacagtaacctcatcaaacaatctgtcttagttactgtccaattgacatgatgaaacaccatgaccgaggcaactttataaaggaaagcatttggtctggggcctatggttccagagagctagagtccataaccattatggctgaagggaatctggcagcaggcagccaggtgtggcactgaagcaataactgagaacttgtatctgacccacaaggattaaggcctaacttggaaccatgtagacttcaaacctcagtgactcacctgctcccacaaggccacacctcctaaccttcaccagggtccaccagctgggtctaagcattcaatcatatgagcctacgggggccattctcactcaagccaccacattcttgtcatccttttctaaatttgctttttgatccccactggagtttatgtgaacaataaaagcagccaagttgagtccatgggaaccttgctggcaacctattccttttctcttgctgtcaaacccatccttcacgtccttataagtggggtctgccagtggacccatggatctggtgcccacataaacagcagtgccaggatgcaggaaagacagaggaaggatgctgtaaccctgaataaaagacatgctgattttaactgcacatacaagttcacctttaagtctctcctgggctcactccctcattttttggatggaggaaacatcataaaacttgacattttaactaaaaattataatccctctaataacagttggcaccataccacgaccagttaaggaggataaagttctggacaacagcaaataatctatagctcaatccatcttcccagagctgcctgaggagcagctgctacacgctcttatgcaaaatgaaatgaatacgtacatgaacttggtcctaaataacatggcacagaccaacctaggaagcaagaaatagactttgaactcctgagagaacacagcatgggtgtccaaagtagaaacaaaactgagctagccataaaaaggaacctcaaagggtgcccagggaacggatggaagtgtgaatgtagatttaaccaaccaggctaagggagcagaagataagcacattatacaaccaatcaaccccttctaaaggtcggcctcaatctatactccgcggtcaatcacctggtaagggagagataatggcaagtgctgagataaccttgagaccagctctgagactattggagacctctgacctcttcctgaagtggaacaccccttcaccacccaatggatttggactcttcctgttagacaaatattcagtaaagaaaatgggtaaacagcatgggggaggggcagatgaacacaaagtcccaccccttagctgaggatcaattggcatctggtacctgctgggagaaggggagtcagtgttctttaatagtgtgatccctggcttattgaccatactgcagggtgggccccactcccaagagcagttgggcctgggaaagagaaagagagatgttgggtgagaagggggcgggggtgggggtagagctgggagaggtaggggaaggagaggggatatgatcaaagtaatcatatgaaaatctcaaataattaaaacattagttttaaaagggagatggctttaccatataaattgtatacttctctttcttttgagtcacagatgctgcaggtctatttagaatttgaaggcactgcaagtgcattggactagtctacattttcccttaaaataatcctctgtcctttcttacatttaaaatattttgctagtctatgccatcagtatgcttgtataacaaaatggttttcccatccctttttcattatttttttttttcagtgaaggactgggtgtggtggtaccaacctttaatcgggcagatctctgtgagtttgagggacagccagagctacgtatggagatcctttctcataaaaacaaactcagtccttcagtaaagactaatggggggggggggaagatgggcaaaaggaaccatgccaggaagcatcaactgaaatgcatcacttggagatgaggctggcctcaaatgagaggagagggtcgtgtgggaaaagctcatttgtctttagaggatgagtttaagtaaagacctttaaaaactctgggccaggtggtggtggacaccattaaccccagcactcagcaggcaaaggcaggcagatctctgtgactttgaggctaccctggtctccagagtgaggtccaggacagccagggctacacagagaaaccctgtctcagaaaaacaaaacaaaaaaaacggttctcactcaaagtacagcataataaatgcatcaatatattaagaccatttaggtcaaatccagcatccaagactttgactgtctccaaacacacctctccttttctttaacgtgtgctggttggtttagggaagatggagaaaatgtctccatcggattgtcctatagtcagtgtgtggagcatttccttgattaatgattgacatgggagggcccagcccactgtgggtggcaccgttcctaggcaggtgggtctgggttgtatataaaaactggctgagcaagccatgggagcaagccaataagcagccatccccgcacccctaatcctttgtggcccctgcttcagtttctgccttgagtttctcttctgatatcccatgacccgagtgtaaaacaaacccttcctctccaagattacttgtttcttttctttttcttttcttttcttttctttgcttttctttttcctttcctttcctttcctttcctttcctttcctttcctttcctttcctttcctttcctttcctttcctttccttcccttcccttcccttcccttcccttcccttcccttcccttcccttcccttcccttcccttcccttcccttcccttctcctttcctttcctctcttttcttttcttttcttttcttttcttttcttttcttttcttttcttttcttttcttttctttcttttcccatttcaacaaagccatagaaagcaaactagaacacaggtgcacaagaatccctccaaaacccaacaggatgtttacccctcctctaaaatgttcttcacattcagctactggcttcctcagagtcatctccttcccagaagaaatggttgcaagtctgctctcccctcagccacagtaacccttccctaactctgctcttcctttgaagtttccaagctccctcccacctactccatcccatcctgatacacccacacagcctctgagaaacaggagcaatacatcctggttctgtgtccctcacaccaaggttggggaccacacagcaggagagcatggtgtctgcgcccaccatgctctccaatgtgacctcaggggccattcactactgaggaatcagcgggatcaagccagaataaaaagtgtgtccggatgctctgcctggcaccttcagagtacatcatcattgtcgcagcagagccccagggaaattccattatcacagagttttacagtgtttgcacaagctgataggtcataggtttttacagcagacaggatagcctcatataaagcaaataatttattggttacaatggtggagtactcttggaagtggggtgagaagaaggcagggataccatgaaaacacattccctgtgaagatttatttgccctggtgtgcaaataaatcatttattagatgaggatttagaaatagccaaggtgtgtttgcagactcaccatgtgacttaatcctcctatgcagaagacagaaggtcggtgctccacatgcggtaggtttttgcctgagccccatggaagtggaagtgaaagtggggtagagaagaggtagaccagagggacggcctgcaaacacctggatccatgacaaggagattgtcaaggttagagggccatgtctaaggggctcatggtggtgctaaaaatgatctcctgtgactttcagacaactgtggtgtctttccccaaagaacaccagggtcctttgtcactcacacaaagaccccttgcctcccttttccagaaacagctttgacctgaacaaccatgttctgaggccattagtctgcccatgtctctaatcactccttgaaagaacatgttatctctcactgactgagagagagagagaggggagagaggaggcaacctggaagagacttagctcagcctccttgaattctcaccaacactttccagtatgacaaagggctgcctgtccactacccaccttcaggatccatgctgtaccccccccccccgcactccttccctcttgcccatcatccaggagagcttcggactgtctaaatgcttagagagatgaaggtttcttagaacctatcaccatctcagagagggagccagacagggtgaccctgccttgcctcccggcatgtctcctcctggataccagcaggtctctcctgtgaatcttgctccagatgcttcaggggtctgagggtccttgaagaagggttggatggacatttaaggattcagaaaactggaggcaagaagactcctccaggaaacttggggagtaatccttcaaatgaactaagacggaaggaaagaccatccagagactgccccacctgggtatccatcacatatacaaccaccaaacccagacactattgcatatgccagaaagactttgctgaccggaccctgatatagctgtctcttgtgaggctatgccaatgcctgacacacacagaagtggatgttcatagtcatctattagatggaacacaggacccccaatggaggagctagataaagtacccaaggagctgaaggagtctgaaatcctataggtggaacaacaatatgaactaaccagtacccacagagttgtgtctctagctgcatatgtagcagaagatggcctactcggccatcaatgggaagagaggcccctgggtcttgcaaactttatatgccccagtacagggtaatgccagggccaagaagtgggagtgggtgggtaggggagcagggcggggagagggtataggggactttcgggatagcatttgaaatgtaaatgaagaaaatatctaataaaaatgggggaaaaaaggtctcaaaactaaagacaaaataggattagaaaatagggcttcaatgcagacaatagagctgtagtaattacatggttacaaggtgcagccaagagctggggcaactgatttctttctttccaaactatgtgttccagttaggagccgactgtttgggttaatctcctgattgctttgcttatgcttaggattcaggatgagctacaggaccccttggttcctccgtttcctcatctgacagtgtactggatggtaacccatgtccttaattttttgagattacataaattaacatatgggaaacaagggtgtctatagcccatccatttagccaagtgcttgcaagctctatcacaatgtatctgatgctttgatacactgtcatctcctggctagtcctctattcacttaagaaagaattgaatagacagggacacagttcaactttcggattctcattcactcaggcctggagataccctccacagacattgattaaatctgcctcatccagatggggaatacacagcatgaacagcctcagctgggcccttccattgtagtgccaaggaagtgtttgatcctcaaaaaaaatagacag

SEQ ID NO: 20 - DNA, 1330 bp, Mus musculus
atggtggattgcccacggtatagtctatctggcgtggctgcctccttcctcttcgtcctgctgactataaagcacccagatgacttcagagtggtcggtcctaacctcccaatcctggctaaagtcggggaagatgccctgctaacgtgtcagctcctccccaagaggaccacggcacacatggaggtgaggtggtaccgctccgaccctgacatgccagtgattatgtaccgggatggagctgaggtgactgggctaccgatggaggggtacggaggccgggcagagtggatggaggacagcactgaagagggcagtgtggctctgaagattcgccaggtccagccaagtgacgatggccagtactggtgccgcttccaggagggggactactggagagagacaagcgtgctactccaagtggctggatcttccccaaatatccatgtggagggacttggagaaggagaggtccaacttgtatgcacgtcccgaggctggttccctgagcctgaggtgcactgggaaggcatctggggagaaaagttgatgagtttctctgagaatcatgtgccaggtgaagatgggctattctatgtggaagacacactgatggtcaggaatgacagtgtagagaccatttcctgcttcatctacagccatggcctcagagagacccaggaggccaccatcgctctgtcagcttccgttagcgtaatcggacattcccagcccagccctgttcaagtcggagagaacatagaattaacttgtcacctctcacctcaaacggatgctcagaacttagaggtgaggtggctccgatcccgctattaccctgcagtccacgtgtatgcaaatggcacccacgtggctggagagcagatggtagaatacaaagggaggacttcattggtgactgatgccatccacgagggaaaactgaccctgcaaattcacaatgccagaacttcggatgaagggcagtaccggtgcctttttggaaaagatggtgtctaccaggaggcccgtgtggatgtgcaggtgatggcggtgggttccaccccacggatcaccagggaggtcttgaaagatggaggcatgcagctgaggtgtacgtctgatgggtggttcccacggccccatgtgcagtggagggacagagatggaaagacaatgccatcgttttccgaggcctttcagcaagggagccaggagctgttccaggtggagacacttctgctggtcacaaacggctccatggtgaatgtgacctgctccatcagcctccctctgggccaggagaaaacagcccgtttccctctctcag

SEQ ID NO: 21 - protein, 444 aa, Mus musculus
  VARIANT (1)...(444): Xaa = Any Amino Acid
MVDCPRYSLSGVAASFLFVLLTIKHPDDFRVVGPNLPILAKVGEDALLTCQLLPKRTTAHMEVRWYRSDPDMPVIMYRDGAEVTGLPMEGYGGRAEWMEDSTEEGSVALKIRQVQPSDDGQYWCRFQEGDYWRETSVLLQVAGSSPNIHVEGLGEGEVQLVCTSRGWFPEPEVHWEGIWGEKLMSFSENHVPGEDGLFYVEDTLMVRNDSVETISCFIYSHGLRETQEATIALSASVSVIGHSQPSPVQVGENIELTCHLSPQTDAQNLEVRWLRSRYYPAVHVYANGTHVAGEQMVEYKGRTSLVTDAIHEGKLTLQIHNARTSDEGQYRCLFGKDGVYQEARVDVQVMAVGSTPRITREVLKDGGMQLRCTSDGWFPRPHVQWRDRDGKTMPSFSEAFQQGSQELFQVETLLLVTNGSMVNVTCSISLPLGQEKTARFPLSX

SEQ ID NO: 22 - DNA, 32373 bp, Homo sapiens
attcttcttccactcttcacagatcaggctacagtccacatctttaactgaactccttgtcactgacatgtgttagctccatgttgccaaatccaatggtcatctctaggatgtcattttattcatcatatcagaagcattttatgtagttaaccactactgcatcattgatgtattttcttgacttgttactaaacctcactgtcttgagattctcatcacacgagaataacagccagatctcagcctgccttgccaagtctcccatcttcccaacctctaaatgactgagggcccaggactcatctcttgcatttgtttcctatgcatcttcattccagaatctcccatggattcccacaactaagcacaattctttgttgaagtttctctaacttacattactagccttgacatgttgcccatagctttgaagcatgacttgaaaccaagctttgcatatttcttctgtcctttttcaaataagttttggctattgtagatcctttgtattttcatataaattttagaattgtctattgccacaaagaaacccagtgggaatattgatcaagatcgtgttgagaactgttatttcaaaaatatcaattcttcccaaatcaaaatatattatatctctttacacatttagaattttatcagtttctctcatcagtattttatagtttcacatcacacatctttcggttcagtttatgtctaagtattttatgtttttattgctgtcataatgaagtgatttttaaattttatatatgatattctgctgtggtgtatagaattacaatttgtttttgtattttaccattgttaaattcacacattctaggcattttcaatagctctcttagggttttatatataagcaatcaagctttccaggctgtaatgtttactgtttgccaaaaggagtctgaaattatgtgaaatctgctaggcttaaactaatttttaaaataataaaagttgaaagaaaaatccaggtcaatttaaaaaataaagaatattttaaaaatagtttcccatgcccaattttatgttaaaatacaaccagacatagttaaatgttttatatatggtcatgaaactaaattgtccccaattattttcatattccagttcatatcaatttcaatggctaggctatcctttggggtatagttttcctttcatcctgctaacccattaattatccttttctacgtgtccacaaatgtcagaggtgtttgagccggagcaactccatcttgaataggggctgggtacaatgaggctgagagctactgggctgcattcccaggaggttaaggcactttcagtcacaggatgagataggaggtctgcacaggatacaggtcatgaagaccttgctgataaaacaggttgcagttaagaaacgggccaaaacccaccaaaaccaacatggccacaagagtgacctctggtcatcctcactgctcattatatgctaattataaagtattagcatgctaaaagacactcccaccagcgccatgacagtttacagatgccatggcaacatccaaaattaccctatatggtctaaaaaggagagaagcccttagtccaggaattgcccaccaccttcccggaaaactcatgagtaatccaccccttatttagcttgtaatcaagaaatgctaaacctacatgaagtatgaacgattccttacattccattccatgcaccacatcctccctgaagattgtcttgattccttcatagttattgaattattataatattagtgcctatgttctctactctcaaaagtgcaaatgacattaataactgaacttataatattttctgctttgctaccttaagaatgagtgcctggtattgcgacgtgattacaacgaatttaagacaatgaagcagtcctctctccctatctccctcatatcctctctggctctctctctctctctgtccttctctcctcctctctttcccccgcattctcccagggtggttcagtggcagaattctgctgggacctttaagagagagaagcatattcagcagcagcagcagttttcctattcctgcccccatccgcggctttgaactgagtttaccacgaaatacaaaaacacaattttagaaagaaagatattggcagttaagatttgggaagtttctaaatgggactctcagtccttcccgccactctgaaatcgcggtgcagtagtaaaatcttggaggcggttcttgaacaaacctgtcatctactggccatgtgtggaactgcaacagcccggtggggaatgcacttcgcagagatggagatcctctcagaggccccaagaggaccaagtaaaagaacccaggatgaatggcaggctggatgggtgcaaatgcaggaggcttagtagatcggtatgattttctttgccttctttctcccaatatttggaagggtcccctatttccagtgtgagacatgcccggatatctctgtgagtgcagcttctttggggtcctgggaggagtgtgatggtattaacacattctgtacaccctctccccgcaattccccaagggggcatctgcattagttttggagtcaactgaggtgggcttcaccgaagcttacatctcttcctgggaactttagtcttataggctcccacctgcagtagaatcaattttaggtaatttcatcattttcaaaaaataatagatgatcattgtgattgtcttaaacttctgtaactctttcataaaagtaaatttaaaagtaaaaatttattttattttattttattttatttattttttgagacagagtctcactctgttgcccaggctggagtgcaatggcgcaatttcagctcactgcaacctccgcctcccaggttcaagtgattctcctaccttagcctctggagtagctgggattacaggcgtgcaccaccacgcccagctaatttttgtatttttagtaaaaacggggtttcaccatgttgcccaggctggtctcaaactcctgacctcaggtgattcacatgcctcggcctcccaaagtgctgaaattacaggtgtgagccaccacacccaacctaaattttttaaaattaaaagttttagaggaactggtttgtcagacactttttgtaaagtatatgacagccatgtatgtaaagagctcaacttagactgtaggtcagccagaactaagaatacctcagtcctccatccctaaatgtttgggcattttcctattcagaagttctactgcctgcccttcctcctttcttctcttttctttcttttcttcttttttcttttcttttctttccctccctccttcctcccccctccctcccttcctccctttcttcctttcttctttccttctttccttctttttgccaatcaagaaaaatggccagaggtgcagattgaaccgtggccacgctgtgaggaaaggcctccgtcctgtgagcaccaccctcccctcactggcctcgggaatcccaggccccccactcacatctgggggaggagtcgcagggcttctgcaggtgctctctctcctccagtcagtcagcaaaccgaggggactgtggaggacaagccactgtgcctccaggagatgagagctgctgatttttctttcctttccctgaggaaacgatacctgtataagtctcactgctgggagactccacaaagtaatcatctttctggtgagttgatctaagagctctcaaaacatctttcaaccaggtccccaagaaacagctgatggcgtcgcctgaacttctccatattcatagcaacactttcctgacatttcttggattgaccttgatttcttatcttcatttctaatctcctctatttttctatccaccttctttccaagaccttccattcccagtaatgacacctaatagctatatagggattttgtatcatgattatattcttactttatccttacaacgatactttaatgtgagccacccacatactatccctgtgtaaaaactaagaaaattgagacccctggaaagaacagacttacccaaagtaaagcttgcccaaatgtatagcaaagctagaatgaaaatctcagtcagcctaaactcagggcttcttttgtcgtctagtggctgagggagttatgaatgtgggtcacaggtgaccgccgcatttgaagaagagtctgtaagtgaatcgacttgcggaacatccttgaagccgacagtgagcccgtctctgctgccctctggtggccaggcagatccatgactcccctctcctgttcctcctgccctcgccggatgcttgtttttccctctcctcagttctagcagcttatgccttgttttcccgcttctcctggaggtggactctagtcagaatggcagagattgtgactcctttttttctctcccacacaccaacatcttcctgcacaaaatggcctcccataatatgtagcataatttaggacacagttctcagcacaggcagacctctgagaaagtgtatgcagatgatttgtgagaacacacacacgcgagtgtaaacggagcttctttacgcggtgagttggcgctgatgtgactgaccataaaaaattcaaataattgcagcatttggtaccatagagatgatactacagaatgcatgcaatgagcggcatcttttcacacattcaggtgtataaagtaaatttctatattttcctattacggattttaatttgtatgccaagcattatgatgtcttctgacagaggagttcatctggtaatttccagataaattcagtggctttcacacaattaatttaatagcagcctcttcttcacccgccgtgtgatttctaagttctgaggtgggaggtggtgcagggctggtgtagaagtctctcctcacatttgcatcatcagctcccacaatatgtcactatcccatcgtgtttcctggtcgtcactgtccttcccacagtggtgacgatcactgttatgtccttgatgccactctcctcttgctggaacattccatcccagcattttaggcagcaaactttcatcccactgttggagccttccagagtctgccacttcttgccttggagaacttttcctttgctgccactctgagagggacatctgtgggcatcgctaccattctgggaaccggaggtgaagtggggttcattcccctctactccaattgagagagaaccagggtaaagagaccctcctatcctcgtccatgtttaattgtttctcttctctccaaatctctcatcctctacagtgaggggagggtctttgtctagactgaaggatggagggggaaacccttacattaagaatcgtaaccgtaagtcaggggacccaattatgggctgctcataacgggagggaaagaaacttaaggaaaaaatcggctcaaaccttgtaacatcataatgctgcatatgcttttattattacattgacatgaaaatctgcaattaaattaaaaattgttctggagaactcttgaaatcctgagactatatctgagaccccctctagctcaaggaacacagacttaaggggaacgtaaaggaaaatctggcagaaacaaaaacacacacaaaatatgcctatcattatactcttcatgcccaaatattatgctgagaaggttattacatttctttggtaaacatctgagagtaattaaaccttttattactcagcaaagggagataaagtacctgagtaaaaagagcaataaagtagcccacaagggaccttggcccagagctctgatcctggagagggcagttcctttctctgggtctctgttttctcatcagtggaatgagggatggcacgtttgatattcagttttgcttccaactccagcccgatgagtgccatgctctggtggagacttggcactagttgggaatctttgatgtgtggcaaggtggagggaagggtggatggcacccgctgatgtgtgggacggtggggtctgtgtgaggacctaactggggggttgcagatgaggcctccatgaaggccttggctttctggggaaggtgagaattgccagtgtcatgattttgtgtgcacgtctgcagaattcacaactgaacccagccaaagtccacttgtccccggagtttcactgttgagaggattatagctgttaggaggtgaatgtgctattctgattttcggaatgcaatctcattttcacagggcctccgggatttggctctgccttcaactggggtgagacggcttaaatcctccttcacccaaagtcctggaggaggcctccacactctctggctctcccacactctctggctctctggtgtgtctttgatcagcacaccccagggctctgacctgtttctgaccacctgctatgtggatgaagatacatctggggccaagtgagaagacccagtagcaccaggtttcgccccaaaggagagagggagacacgtgagtggtttggattccctggtgaaggatggccacgggaagctggggacattgtctcagattacagagtaggacatacggacggaatcaatgtcctttagggaaatgctgccacctgttacactgcctcccacttatatttatatcccactgtgcagtcttcaaagtgcgatcgtagcccatttgaccctcacagtgttctcgtgaagcaggctgagtgaggaagaagcacgaaattataaacaagaaaaccaggatcacattttcatttgtcatggatgatgtggggcatgtgtccctgagccttaacgtcttcttctgtcacatggtcatgacacagcttggaaaacgttaggatgattgtctccaccacacagcagagaaaatacaggctcaagaaagtaaagaaagatgtccaaggtcacacacacacacacacaaaaacccaattcactttgtctcctagaaatcttattttagctttctctataaaaatgtattaacatatgataaactatagctgtttttaatgtctacatagatacataagctttcgacttcgtgaactaagttaatttattcttaccagtcagttactatggctgcttggcattttgaggagcaacatttgaggcttttactgaaaaaagttctaatgacccatgatacgtagtaatttgcaattttctttgatatgagttttagcagtgcaggataggccttgaaattcagaattgttcatcatctaatgcctaaacataagctaccacttattattacaatttaacacttaaactttatccagaaaattaaattaaattaaacatgggtttttgagaatttgatgatacatttgcatattagatcatatatcttgacaacaccaaaatttactatatttaataggaacagcagtttcagaagattcttgcattacatccaaatagtaaaacggaggggtcaaaagcttatcattttaaaaggtttttacttaaagatggcaatttaagtctagttatctattttcaaaaaatgtgccaaagcttttcagcatcctgacagcaaaccctgtggcagggcatttcctcggcaccaccggccttctgggctggatgactctttgttgtgggggctgccacgtgcctcatagaatgtttagcaacacccctggtttctactcaatatatgtcccctcccccagtcgtgacaactgaaaatgttcccagacattgccaaatgtcctctaagggcaaaacagcctctttccccattaagaaccctggtccaaggtggttatcctccctgatatattctctcacaatctatctgagcactggagatggattctcccaacattcttcgaaagcttcattgatttgagcaatttttttgagagttcacttgtagattttccctcccaccgctttgacatgaaagacctacaggaacacaagcctctgaagtggtctgtagcaagtgtgagttcattttagttcacacggctgagaaatcatgcttggtatggatgttgtggggctttctttactcttacttggtggaaaaaaatgttcctgcttttcacaaaaggagtcaagggaggcatcagcaacacccttcagtctaaggggaggtgactggtaagtttcaggtggcaaggtgctcatggtctgcactgtcttctaacacccaaccccattttcacataaatatcatactgcccttttcgatctaggtattgtgaatgggctcatataagtttccttaaagatatcttatatgaaagtacatattttttataaagcaaatgggcaatatttgtgtaacaacaatctcctgactcatttgattgttaaatctccatttcagaatgttgatttttacccctgtcccataaaatcttactagcagtagtttcttggaaagggggaaactgtaattgacttgacattgctcctgagctggtttctctactttgtgtgaagcaagttttctttcaataaaatacttgacacatcacatataataagtcttagacttctttcactctgaagtttgtatttttcaatggtaaaactagccttctatccttgtcctggtaagttttaaagtttttagctgtgtgaagtatttttgttcagctgggacagtggggttgctgggtttgccagtttctgccagttgggctttttgtttttttaattcattcgtgtttttaagtctattctaaaaggccacttacagatattttcccgactatctttctactactctttctttcactttccacggcatctctgtgtcccgggttctctgagcgctagcactgaatgttggctttctggctgcagtgtggagacgcagagccttcctgccctttcctccatgtgtagaaaacagtggtaaagaaaggctttgcaggaggagttgggaggaggacaggaaaaaatatttgaatcttgctctataagttttgcaagctcacaacagatgaacctaaggagttttgtttgctttggtttggtttggggtttttttaatattattgttcctttacctcaagtgttttttcatttcagtcacaagacttccttacacctaaaaaattgcttaaaatattgtctcatgaaattagggttgttgaggcaggaataatttcataaagttctattggaaggcaaatgtcaggactgatgtaggaagacacaccaacgaagttgagggtggtccaaagtctgttacaagttggaaggcttttgtaaggaagttcaggcagaaagaaaggggctcttcatattggagttgtcttttttcactggagggtacaatacagaggttacaatcattggacacagatgacaatatatagactaaaatatttcatgcacaaaacaatcagtaaaactttatgattcagaaacaaatccatatccttttcgatgtcaggaggttacatattaatcactacatcaaattagctcagaagctacattgaagccgaactacatcaatgtatgggtgtatgagcagatcgggttataggttacagaggtattcttcaatcagacgttatcttatgtgtaggaaaaggcaaggactattattccttatcttttaaggagtagagtgactcaggcaagagagatgggaggccgtgtgctcaatcttgttttgtctttgaagcatctttctggagaactgcaggtcatcacagcaggggctttgtgaaagtatgctagcaagccgaaatgagcaagcaaggcttcttacatttgctacattgtctcacagtataacacgttaggtaaagggttggatgtgatcagtaattgcagagaaatggagccaagcccatttcactgactgtgcaggggttgatgtggattctctgctaagactgcataaccaatggaagccatggagtgtgccgggtgtgtcacagcctcacttaggcacagcgtttccttgtctttgttccagggaggatggtggattttccaggctacaatctgtctggtgcagtcgcctccttcctattcatcctgctgacaatgaagcagtcaggtaggattcccttctccctttactgtatagtctaatgtcccagtgagctagtctgggtccaaaggtcgagaacaacatctaagagtgtaagtctggggccaagccacctgtatccaaaaaggaactcctcacttttgaggagctcctccactcccaggagctcctccactcctagctgagtcacctttggaaagttacttgagcacctcataccttagttctttcatctttttaatgagaataacagcagtaactacatctcagaggccagcacaggctttaggattaaatgagacattaaaagcacttgaatcagtggttgcaccacgttaaattattaattcactctagtactttggggtcaagaaatgcagctgcttcttatcataaattaagctgcaattaaaaaaaatacttggaaataagaaattagaagaaagggactttggaaatctcactagctgaattttgacgtcaaaatgttgcaccttgaaaaataattatttaaaaattcagtgtcaaaaaaaaaaaatcagtgtcagaaggagatgtcagagccctaaggaaaatgcagcatggcgaagtgggaaaaaacacgacacagagcatcagagggcgcaggctctgcctcggcaccgcagagctggtgtgtctgcctcggtgccgcagagctggtgtgtctgccttggcgctgcagagctggtgtgatgtgatgaagctgctggcttctctgtgcttgtgctgcagctccctaccctgtaacagtcaatctgatggaatgtcttcagttctagcttcatatttagacttcatcaatgaagaatacaagcagatctccacttaggctctttagccaccttttgagcagcatctatttgatacccagcagcagctaagtagggtgaggttcttcctagcaggattggatctgcacagagaaagagcaaatggccccggagcatttagaatgagaaagaacatatcatacatgacataaaatgatcaaacataataacatacataactgttaaacatctcttcaatttgcagataacaaggaagagatcagacatgtcttagaatttgtttggaagacccaaaaatctctagacaaaccagtgtccttaatccagcacaaaatgtccttgtgaaaactgcattgtacatagtcccagtaattggcctcctgccaactccagacgggaaaaaaacaaacaaaaaaaaaacaaaaaaaaaacagtttttatatctaagagaagaggaatcctgaaaggctaaaaaaagctaataaatggatttattatctaaacttcaggaaaataaaatgttaataacaagaataaggtttccaatttaaaaagtcaatttacatgagaataaatgactcaaggaataaataatttacttgagaataaaaacaacccaggtatgctggtattaatatcttgaagatgaagaaattaggacttcaaatctcaaaatcttaccaagagtaatagatttgccaccgaatcacatagctggtaggtgacagacagcaacctcacccacatttttgaactgcatttgttttcagtacacaaaattgactctgtaacaaacagatgtgcaaatcatcatgctggatttctctaaaacattaaacatatatctctccctcttctagttgcctccattttgacaggctggacaccccaaagcatgcatatgattttctgattggcatttcctcgttcctctttttcacttattttatagaagactttagagtcattggccctgctcatcctatcctggccggggttggggaagatgccctgttaacctgccagctactccccaagaggaccacaatgcacgtggaggtgaggtggtaccgctcagagcccagcacacctgtgtttgtgcacagggatggagtggaggtgactgagatgcagatggaggagtacagaggctgggtagagtggatagagaatggcattgcaaagggaaatgtggcactgaagatacacaacatccagccctccgacaatggacaatactggtgccatttccaggatgggaactactgtggagaaacaagcttgctgctcaaagtagcaggtgaatatctggggaaagacacagggtctcaagaggcagagatatattaatttgtggtaagctttgtgacagttgaggaaatccttttgaatcatcaaggtaattcctaatgcttagtcctctaccctgattgatttaaaaataagtggttctggagtcttcaagcttagtgttaaaatattttcccaaatttaatttgcacagttttgactgttcttgaggattatttggaatccatgacatgcagtctttagcaattttgctgagacacacatttgtgctacctaaggctggtgcgcaagagcaaaccaattgctgcatgaatgagcccagctgacgtccggcatctgtatctcagggcattggtttttctctacccaatcccatctatgcagaaactgagacgtgaaaatgttctttccttgtgaaatgccctcagttagaaagctatcaacaagactgaaaaggctaagaatgtcgtgctttggagattgttatatactagtgttcaatgaattggggactcacagatgcttttggacacaccctctgtgaatgggaaggttcttcatattgctgttgtattagctaagcaggaaggagtagggaagaaggggacaactgaagaatggatctgtcttatgaaaagtaaactatcatatgattccctgacagggctaacttctccatgctctaaagagaaaatcaagtaaatccaattactaaggcaaatggggaaaatagttctctggagatgttaacgtctccagctgatactgcttccttctttacttccctggaaggctgtttcctaatacctttttttttcttaacatccattactgttactgtgttcaaggtgattcaaaatggatggaggaatacatatatttctgacatggggggacagggaacgtactgatgtatttcaatatcaggaacatttacaaataagtcacacattttctaagggtccaagggaagggagtggatctctcttttaccagcaagtgattaagacagaattcccatttatggaaaatatagtccccttagtttgggtgtgggagtttcacgttaaatagagaaaaaaaatccatgatttcataaactgttgtaaactaggatttctcaaaaccatcttacccattgaatagaatatttagctacaaataacgcctcgtggagattcgcatttcacatgctcccgtttatccacttgcttccgaagatcacagccaccagcaaaagatgcaggaagaacaggcccctggggagtgatttctgactttgtgttaaatcttcaatcaaattggagttcaagacatcatctaaaataccagacaatgtgcccaatacagataattttaagatgaaaaaggcagagttcatggcacagaggaattaatgaataaattacagctcatctctgtttgcagtgctagaggcgttgcaaaatgtcatgatgtcccccttctccgattcccctttctggatctggagaaaagtactggtcagatgctaaaatgtaaagacccagactggggaacaaataaagtgtatctgaactcacatttgaatggggagactgaggtcgactttctgctcctcagactcctgaactccggccacctccctgtgagcaacgtcactgggatctcagcctctgtgatttctgcctctgtgggctctgggtgtcagagctgtggcttccctctgcaggtctggggtctgcccctagcatccacatggagggacctggggagagtggagtccagcttgtgtgcactgcaaggggctggttcccagagccccaggtgtattgggaagacatccggggagagaagctgctggccgtgtctgagcatcgcatccaagataaagatggcctgttctatgcggaagccaccctggtggtcaggaacgcctctgcagagtctgtgtcctgcttggtccacaaccccgtcctcactgaggagaaggggtcggtcatcagcctcccaggtcagtgctctgcctctaggacccacatgctcagatcagcaggagaggtcccagggactgcaccatagcacctcgtatttttatcaagagacattatctatcatatagcaatatgtattgaaagccataaaacatttatgactggaaatatacgcactacattttacttgaatagctgttatggcgcctgcgttatttttgagttctacctttccttcttctgcattgattgtttttactcacaagtattcattgcattgtaaagaaaataaagctatatttcttcaactgaaatgttttcctatgctgtcttgtgctgattacttctagaaatctatcatatgaagataatcagagatgtagacaactatttgcataatagaatattaattatggccttatttataaatagcagcaaaaacaaccaaccccccaatacaacagtacagtgtggaatcttgtcttactatacattatagcattaataaaaagatatttttaaataattttaatggttgaaaaaaatcctcatgatgcactattcaatgataaacatgacatctacctataaattgacatttccaatcacataaaagttactggccttaaataacttataactgcactaaaactttcaggataccctccacatttggatataagtatacagttattcatataaatggatagattaaaaaaactttaaagttaatgttacattttaattttaaatgaagctgattgtatattacatataattcgtctctctactttgtaatttaggtgatactgtttatgtccatataattttgtactttctgtgtatctataaaaggaacatatgttattttcatgctgatagctaagtatttatgctgtaaatatcagaagaaaccaacagaatcatggggagatagaagtgacagcatttttgttgtgcagagaaaaggaaaaaaagctgtatcattgggtaatctgtgggaaagaatcagtatttttctgcatttcatttttttaatgaattgagcttccctatataatgtataaattgctttcttttttaaaaaatagtttctctcctttcccttacaccaaattccttaatatgttattcttgttctttttccagagaaactccagactgagctgggtaagtacgaggtgctggcacacacctgtggagggagcctctgccctccccagcagagggaggggagctaccacgagaccatgtgacccagaggaaaaactgaggcacgattttaccaggtcctatgttcattaaataccagaggagaccagcaaagtaatggcctcattcaaggaggttgcagctgtgttacctgacactttgggggctcatggagattccagtgagcatcagatggacacctataggaagcatggcatcatctctgttctatgtgttgaggggaaagggagctgcctcagaatgtgtgggggatgacagcagacagctggccggggcctggaggccctttgaaaacatttcaagtgtgaacaagggcagcatcattatgacaacctgggttgcacccagcacctccctgctcaactctgctatggggtcctgcacctgctcctcaccccagtacacccctaagctaatcactattgggagggagctgttactttctgagtgcaacctgggatactgtgagtgtagcaattttttttttttttttttttgagacggagtcttgctctgtcgcccaggctggagtgcagtggcgcgatcttggctcactgcaagctccgcctcccaggttcaggccattctcctgcctcagcctcccaagtagctgggactacaggcaaccgccaccacgcccggctaattttttgtatttttagtagagacgagatttcaccgtgttagccaggatggtctcgatctcctgatctcgtgatccccccacctcagcctcccaaagtgctgggattacaggcgtgagccaccacgccgggcattttttttttttttttgagacggagtctcgctctgttgcccaagctggagtgcaatggcgccatcttggctcactgcaacctccatctcctggattcaagctattctcctgcctcagcctcctgagtaactgggactacaggcatgcgccaccacacccagctaattttttttttttttttttagtagagacggggtttcaccatgttggccaggatggtctcgatctcctgacctcatgatccgccggccttggcctcccaaaggtgctgggattacaggcatgagccactgcacccagcctaatttttgttttttaaatctcggagttggactgagggtattattttgctgcacctgagataagtggtttaaaacataaccagccgatggctgagcccctttgagtttcccctttacctccttactagctccctcctttttatggcctcttctcccagcccaaggcaaccagcctgcctccctgcctaggtgcatagaacgtggatcccttatgtgctctttccatcaattccttgctctccatcaagtcacctgctccaggaatgtgtatccatgtgtgtgctttaggtgagcttaagcacacctttcagcccacaaaagagtttttgaggaaaatcagggtaacaaacacaacccaatctctaccagagtctactatggcaccttcaaccccattaggccataaacataaagggaagggtccctggaaggcgcaaagtaactccacaatctgaggagagacacacacctgtgtatcttacccttctgagatcaggaagtaaagccagtgtttggggcaggttgacacaagtctgtctctcaagaaggttttaggagaagagtcactcctctgagttctctgagacccactggagacccagcacacacaatacgaccccatgtcctgttgttcctaagtcatggtaacctccggggccacaattaaccaacacggaaagatggagcttccctttgcttcctgtcaggtgggagaggagggctctgggcacggaagctttgcaggtgagctctaatgatgggacacccagctctctatggaagtcctaagactgaaatcactgcttgtagtcttacaaataatgtttttcatttataaaaataatagtttttaaaaatattaattgtatgccaggcacgatgctgaatatgttatgggaattatttcattttttcttacaataattataaagtttaattgctttatcctcatattacagctaagaaacaatcttagagacatacatggtttgccaaaaatcaggaagaaatggtgatgtttaccttctaatctacatctatctaacttaacagtgcaagtccttaattacttatgtgtgactttgtcagctcattcatctctatttttctcatctttaaagtgaacaggttgaatttaatctctaatgtagtgtccagttctaagagattagatataacttagcatatttgagaaatgagatagtgcattaattgaatatgctgattgaaagaggattatgtggtatgatgatgagattatcaggtttcaaggaatcagtgtataattcagtgtacttcacgctccagaagggaattaatttttcagtggatattcagaaggcattcagaacatacaaacaataaccaaaacaaaacaaagcaatatatttcagcacaaaattgtctggaaggctgtgtacaaaaccgtatagaaaaaggaggttaactactgcatgttcacacttataagggggagctgattggtgagaacacatggatgcatggcagggaacaacacacactggacacctgttgggggatgggggagggagagcatcaggaagaacagctaatggatgctgggcttaacacctgggtgatgggatgacctgtgcagtaagccaccatggcacatgtttacctatgtaacaaacctgcacatcctgcacatgtaccccggaacttaaaattgaaagaaaaaaaaagtgggttaggcatagtggctcccaaggagcttgtattctagtagaacatcaattattaacaaacagggctgcatgatttttttagcactttaaactttagttttacttggattctggacaaaaggagttttgtctgtatctgtaatgcatcaaattaattgaatctccatacttacattttgcttccttcagtctccattgaagtcaattttagctcttaattacctatgtcaggcagggcaagccagtttaagatctaatatgtgcacaggtcacacacggacagggaataaaatcctcatatggataaaggagatgaggaaacagtctgttttattaagtaatttaccgtaagccatgtggatgcagaaacagccccaaactaatccctagtccattttttctgattcttgtcttcagactttaatagatacataggagaggaaaataatattgttttaggtaaaattacaggacaaagcaaacaaaatgctggaaataactgggagtcaactgttacctggaatggaaggtaataatctgaaaattcaaattgtgttgacagggactttcctctctacaaaggtagctggcagttttcggccaatgacataatgggatgttaacgcctttggccagtgactctatgcagagaaccaacaattttatgcttgtgtttctattataaatgatcacaccttatgcaaaaccattcttatcatttaacagaaaaggacgacacttaatttagaatagagaaaaaatggcacgggcagggcctgatgagaatggaaaatgtaatatagcttgggcccaggaaagccctcagagaacatctttccccactttgcacagtgggagaattagaccccttttttacattcatcattgtttcacaatttgtactttgccgacttccccaattattgatcttaaaatgttaattttaattttcaaaattatttgaggacattcaactggtgtgtgtctataactccacctatgtggagcattggggaaataaaatatagcggctggaccagacttacaaggtactataaagtccacctagaggaaagcttcttcaaatatcattaccaaaagtccacatgagacacgtttttaaacccctccctattaccacgtcagagggtggggatggctccaacgccttcaagtctcacaggtctgtgcacctctgctcacgctgcagggtcttccaggcacttaatgcaaactattttgttcaactctgaaacattatgattttggtagttgtatagcaaatttacagtttaagaaactgaggcattaagaagtagtttaagacagattaagaagtagtttaaaatcatacagaattgaagtgttagaagaaaaactttagacagactaaatttagcagagtctaactgagaaaaggatgactcataaacaagccatccctcagaatcagaacggtttcagagaattcaaagcagcaatttggtcagacagcatttatggacagaaaatggaaatgaggtacagaaaacagaagtgaggtacagagacagctctattggttgcagcctggcgtttgccgatttgaacagggtttcaacagttggctgcctgcaactaacagaagtgcagcagctgctactcagctatttattacaaaagtgtactcctaagttagccttagctcctaagttaggcttattcataaaataattttgcaattaaaactctcagaataaaatgagcaatttataaatttggccccaggatgcctctgtacctgagtgcttatgtaacaaactgcaacctaagttaggctttcagtagttgacgtactaagttaaattgcagtttgttacataaggagtcaggtacagaggcatctggggccaaatttataaactgttcactttattctgggtgttttttgtttgtttgtttttaaagtctcgctttgtcacccagcctggagtgcagtggcatgatctcagctcactgcaacctctgcctcccgggttcgagcaattcttccacctcagcctcctgagtagctgggattacaggcacccaccatcatgcccgactaatttttgtatttctgtagagacggggtttcaccatgttggccaggctggtcttgaactcctgacctctggtgatccacccgcttcggcctcccaaagtgctgggattatagacttgagccaccacacccagcctatctgggagttttaattgcaaaattattttattattggtctgtaaactgaaaaaaatacaggtagaagcaggtagggattcaattactgttttactcagactgacacacatcatggaatgattcctccttaaagaagagcaacctctattctgagtccatgaaacccccacctcacctaaggatgaccctgagcctcacagcaaccctgggatgctcatggtttctaaactccaatggagctgttcttagagatgacattattggttccattttgattctttcattgtgttttgtccactctatttaacagcttctttaaaagtgaatggaccttcccagcccatcctcgtcagagtgggagaagatatacagctaacctgttacctgtcccccaaggcgaatgcacagagcatggaggtgaggtgggaccgatcccaccgttaccctgctgtgcatgtgtatatggatggggaccatgtggctggagagcagatggcagagtacagagggaggactgtactggtgagtgacgccattgacgagggcagactgaccctgcagatactcagtgccagaccttcggacgacgggcagtaccgctgcctttttgaaaaagatgatgtctaccaggaggccagtttggatctgaaggtggtaggtaagaattctagatagatattttgtattcaatacctgctcctgccactttaatatgctagttcctggacaatttctctgacatttgaaattttcttaatgcttattcatcatcaaatttatatcaaatcctccagtgtgtgaaactgtcatagttacttaaaatccacaaactcaaatggatgaaatttaattatttgggcatataacttgtatcttttccagtatcttcaaaaattgaccatatctttaaggaaatctgagtatcttactacatattttacaaaaggctcattgtttcacagtgtgttattagaattctgagaaatgcaataaaattctagaaactgtaatcatctgaagactaaactggatccactgtgtaaaccaaaattataaatattgacagttttggcagggacaggggagaaaagatgaaatcactccctgcagcatcatttcccactgtccgtgtgtgtgagaattgaaacgtccaaggttagcagatgccattgagtacatataggcccaagtcttggatatgctacgtgtttctcccacggattttgattctaaattaataaacacgtttagccatgggagcgcatgttgagaagtttcatgagcctcgtattttctgccattggacgtagatatttataaggtttcgatttttgagaatatcctcctactccgtatgttaatcctgtccatgtgacccatgccctggccgaagttattttgttctcagggacagaataaatgttggatttgaacatttaccttacctcttaatcatcccagaatgatttaggaatacaaagaataaaaataagcaaacaaacaaaataagaaaatgctccagccagcctcatccctaagtggagtgcaatcccccttaagcttttctcccttccccaagccctccacatccccttctttcctcccagtgaaattgctgcccactcatccacttgaaaggaccccaggctttggttgctttctctgccccaggtctgggttcttccccactgatcactgtggaggggcaagaagatggagaaatgcagccgatgtgctcttcagatgggtggttcccacagccccacgtgccatggagggacatggaaggaaagacgataccatcatcttcccaggccctgactcaaggcagccacgggctgttccacgtgcagacattgctaagggtcacaaacatctccgctgtggacgtcacttgttccatcagcatcccctttttgggcgaggagaaaatcgcaactttttctctctcaggttggtgattccttatgttccttcaggtttggaaaataaatatgaagaccaactcagacttactcattgtattgctcttcttcctttgtgatttttatttgctgctctctgacgaggtctcctgctatcctctgcaaagctggttttcaggacacccagggattctactcctctgagtttctctctgacaccctcaactagcgccctgcaattatttttatcattggatacacactaaattctcgtaattgaccctgttttcactctctctctttaaattctcttcttctgatgtgaaaacaattaaattacagaactttgtgttttccccctcatggaggattttcttctggattagaaactgatttttattaataccatcttcatggttgcggcttgagtaattttatcctttcctcctcaagtcattccagtgattgtgtgatatagttggaagagagaagggaaaacttgtctgtgcatgtgtacatttctgagacgagcaaacatgaaatacttgcattctctcctctgcatctccagagcagggaggagcaggccaactgcttcctgggaggccaaattctctcccttctctccagcctagaagctgctcagatgaaaagtacaatcttaatattgtcccagtttcacagtttcaagggattcttgggtttccattttagagtccaggatgacgtttttgtggaaaacactgcttgtttggggattgcttcttgctgtggctgtaggcctgcccaggaagaggagctgaaaagaggtaagtcagggaaacagaaacagcggagcacactgcagtgggaaccgtactgcgtacttccccgagcctcccttttcacaagtcacctatgggaggcagtcagtgaatatccagtaactaaggaaacatgagaaacaggaaagcccagggcttatcatgcaatccaggctcagtgatgcatgaggtcagtgtttccacttgtaatagaagcaaaatgattaaaagataatgatttgatttcctgctgcccattccccagtgatctggttagggaagaagaagaaaaaagtgagtagtacagccatccttgttttcaaggctgagagctgaggttcactgagatttgttggcgtgaacaatttcctatgatctttaaaaatgtggtgacctacttgttggtgatttctgtgttgctggtgacttctcatgtgttagggaggctgttttgtgtgctctagaaagtgcttccactttaaatttcttatgtccgtgaaacacttgtcttcctgtttggctgttaatagaatgaaattatattgattaattatcagaatggattctctttctttacagtgaatgtgacattggcttcaaacacagctcacctgagactgatttcttctgaacagaacaagcgtgtgatccatggacattcaggcagccagatatcccacagagatctgactatctgctctatgggccagagggaactcctgtcagggagctggtactgagaggtggagactgggaacagggcgcgatgggtcccggaggttgccaagcacatgttgcaaagaaagagtcatctctgtgtcacctgacagtgagttttaggcaatggattgcaaaagaaatgagttctgggccatcccctctcttccaagccccatccccttgaaggtggcccctgaacaagtcagaatccccctgaccgtgcctctgaatacctctcctcttataacatgattggcaagtgccctatctacaccttccccaaaacttccttctctgggactctgcaccccgcttcattctttggttccctaatgtaggttctctggacattttttctgtacccacaagaacatctccaacgtatcaggaaaataacaatctgggattctggaaaccagaatgatattctgagtcctgatcatttctcatttctctaactgcttgaagggggctgccatgatcattgaagtactaactcaaggtgttttaattctactcaggaaaatctgctggagactgatcttttcagagacctatcctgttccaggttctctgagatccggcctatcaatcacaatctgacatctgataatcaaggacccttagaaaatcccatgggaaatacaatttagcctacaggaagaaatgaaaggaataatcaaggatttggtcagtttcttttttttttttttttcttttctttttttttttttttttctgagacaaagtctcactctgtcacccaggctggagtgcagtggcatgatctcagctgactgcaacctctgcctcccgggttcaagcaattctcttgcctcagtctcatgagtagctgggattacaggcatgtgccaccatgcccagcctatttttgtatttttagtagagatggggtttcactttgttggccaggctggtctcaaacttctggcctcaaatgatccactcgcctcggcctcccaaagtgctggaattacaggcatgagccaccacacctggcctgatcagtttatttaagatggtgacaattaattgtccacataggtggaactgagaaaataaaaaatatatatatacagttaaaaaaaagtgaaagaaaatacagctgcataagggggagaaaaatctgatcactaaaatataatcttgaaaatcttatgaagtgttgtaaaatccctcctccagactttttgagaaagttgatacaggaaattgagtcaggaaaaaaattttagactttccgatccaagcgaaaaattatgtatcatctatacgaacatgtcaattttattgttagagcaaaataaagtgcacaatttaaaattaataattataaaataaacaaatataagcagtacatgtaacacagtaaaaatattttaaagttataatgagttcaagaagataaactatatgtggaagacagaagaatgtcaacaagacttttggaaagaatgttatgaagtgagaagacgaggacctgctagtgacgctctgctgctctccaggatggcagacgtcagaggcatcgcggtcccatgcggatcactcatgaacagcactctgaacttgctcttctgggccatcatttttttttctatttttaaactcataaatttaaacacataaatgttagaaactacacattattcttccacaaatgtttacacattaattttaataaacatttttttcaattgtggtaaaatacataacataaaataaaaccctttaaccattttaaagtgtacagttctgtggtattgtatatgtgacattgctgtgtgaccatcatcatcactttctagttccagaatattttcatcgccctaaacgaaacttcatacccattaagcagttactacccatttttcaccccctactccccaggtaatctactttctgtccctatgaacttttctattctgaatattttatataaatggaaccataaactatctgtgtatgtgtatgtgtatgtggcttctttcccttagcctaatatttttagagttcttccatgtcatagcatgtatcagtgcttctttcctttttaaaaaaaaaattaacagacattatttttaagaacagttttagatttataacaaaataaaatggaaaatccagagagctcctagatccctcctctctcccccctatttctgctattattaacatcttacattagtgtggcacatttgttacaacccatgaaagaatagtgacacattattttcaactaaagtccacagttttacattaggttcaccttttgtttatataatctctggagtttaacaaatgatttttacatttacattgatctatctttatatttatgaagacttaaatttattagtaaatatactaggtttacctgaaaatattttaacactattttgatttaatgtaattaaaaataatttattgcacaacatctaaaggttaactattatttttcacttacttttgagtcttccttcctagtgaatgtagctctttgcttgttagtctgtgcttgtgaaggccctatgaatacatatattcactttccagggagaaagtctcaagaaaattggttttatcagtcacattctctcactgtatattagaaaacatactttcctatagcttcccaaattggtgattaatgtactttctgagttccagttccagttagaaaagccacaggaaggagaggggttggtggcgttgaggatgatgccccagtcactggaagtccctgtggctgttgggtgggtaatcgggttggtgcctcaggatacagttccctcccctcctggtgtgtagacagctgggtgtagtcattaaagtggggccactctcagaataaatgtgcagattggctggatctcagtttcagggagaggacaggaggaagccacagagactgaattgttaactccctgacattttcctcctttgtcagtacaatttaacttccatgaggacagtgatttttttccttcttgtctagccccacaacctgtaaaaatgacatacattgattatcaataaacatttgtaaaatgcatgaattgtctcataaagtgatatttattgaatatcttacctgttgaatgtactatgctaaggcctagagatacaatccttaataagacataattcctgccctcaggtctttcttttttgcagtggagtcactctgtttttggaatgtcttattataccttcataaactttactaaaaatgggagtgccagagtagtccagcaataaagaattaattgatgtagccaggtggtgaattcacttttccagaaaggataggctacttggagaccctgcactacttattgatttactcaaagctacaaatgaaaataagatggacactgttatccctgacaggtctaaagctctgagtccaatcaaccatccaccttcacgttttctaccatgtccacctgcagccactgctccccaatctctaagcttagaaggacaaacacccattaaaatgagtaaagaagtgacaagtttaagaatcttgttgtagaaaaaatatgaatttagactctgaaaaagagatagtaaaaactcctcttgaacctcatgctgaatgtcctaagtgtataaaaaagtaaaatgtctaaggctgaacctgttacatttcgtgttctataccacagttccaccccatttgttcctgttttgttgttacccccatgtttagggctcgcatgtccagaaatcccttctcatccaccatgtccatttgattataactattaatattttatcaccatttatttacctctgtcctgccttgattatttcttgatgaaatgtgtaagcctccctttagggtcagtgaaattaggactaggctctggcttgattcttcctggcttcgaatactgtctttgccacttagtgtgtgacgtgaaatttcaccaaggagatacatctacaggacagattgttagaggcacttgtggtttacagatctgcaaatactgtagaagaaaaactaaggggatctcttccatcatcaggaagaaagggttcatttaacagaagaagctcggccaggtgcggtggctcacgcctgtaatcccaacactttctgaggacaaggcgggtggatcacaaggtaaagagatggagaccatctgggccaacacggtgaaaccctctctcttatactaaaaatacaaaaattgtggtttccaggttcatccatgtccctacaaaggatatgaactcatccttttttatggctgcgtgggaattgaacaatgagaacacctggacacagggcggggaacatcacacaccagggtctgtcgtggggtgggaggagcggggagggatagcattaggagaaatacctaatttaaatgatgagttgatgggtgcagcaaaccaacatggcacatgtatacatgtgtaacaaacctgcacgttgtgcacatgtaccctagaacttaaagtattaaaaaaaatacaaaaattagctgggcgtggtggtacatgcctatagtcccagctactcaggaggctgaggcaggagaatcgcttgaacctgggaggtgcaggttacagtgagcagagatggtgccacagcactccagcctggtgacagagcgagactccgtcaaagaaaaaacaaacaaacaaacaaaaatacacaaacaaacaaaaagcaggagaagctcatattctatatccttgaagacaacttgatgataaacagctggagaagtcttacatgcagcaaggacaagggaaaccctcaacagtgggcagaacaggtcaggaagaaaaagaatgttaatgttagcaatgactcttggtacagatgtttctttatttctactttactgctttctctcctaaagtataaactgcaacattgactcctctttcattcacattctcacataggacacaattctggacttgctgaccagtgagaacttattaaagaaaagggctctttccttccagaaggcttgggctcctcctccaattatttacaattattcatgagccttctccgtcccttgtcaaagtccaagattagcagttgattgtacactagagcctgaagagcaaacacgctgagctattaaaggacttggacagattcctatgcatctccaacagtggtaatggaagtgagaattcactctactgcaatacttcccttcaaacgcctcccctcctccatatttgataacaaaaatagtaagaagagatttccctgtaaatgtagctttaaaattatatacttcaacacacactcagcatgaaaacagatgagaaatccatgaacttgtttggagttttcttgtgagaaatagttgctgcccacaaagagactgtatttccccaatagcagcaccggaggaaatctccctggacattttccagttctctcacttcactttctgcctcttcctctttgacagaaagtgaaatcacacctagtgaaactgacctactcaccatccaaggacagctttcctggtgaatgtacctagaagatgctccagtggagacagcagaggtgccaacacttcgctgcttattatgctaatagaacattagcttcctgggcaacatctctatcacaactcgttaaagaagttacaggggtaactggaaaagaatcaggacaattttcatgatgatctaagcagaaggtcacagatgtgccagcactctgaaggctagaataaggatggaaaatcccacagaaggtgattccagtaagagaatagatgtgggactaatcgacctcgttgtgaaaagacacgtctccagccttgctgtcctggaaaccttctagggggacagggaggctcctgacagagtctctgggcaggaagtgagagccatgacccttccttcttcacatgtcaccatgcagaaattcttctctggactttctacaaaccaccactctctcttcattgtgctgaacaaacacccagagctcatctcgttcctggtccaacttctgtccccattatttacttctacctcccagtaatgtctgtctcccctgtggtaaagtaatgtctcccctgtggtaaacccagaacactgaagatggttttggattccccttgtccttggtgtgtgggggcatcccagttcggggaacattctccgttgaagaagtgtatcttctaccctcagatcggatgaggttgggatgagctgcatctggatccagagaaacagccactgcatgtatagttggaaaaaaaaaaaaaaaaaaggaggaaagctgcaaatactgggaaggcagaatggagaaaaacaagagggagaaaactggaaggttaggtaaaactgtgttccgtcctaggagatacacgatgtgtaagtcctagaaggctagggttgggcaagatcttcagtaaccatctattccagccaggctaggactgtctagccaggatggctgtcacacctgaaagtgttccagggtaaggttttcaggatggggtcctgcctattcttcaaacgcctgttacgttattgcttgttcttaaaattaagtcctatagtatttccagtcatggtgtgtccactttcatttaagcctcttcattttcattttctgtgggtttatgtaataactgggccatccacttctcatacacctttatttctagtgattgaaatcccaggccttgtagtcaaaaagatctgaatcttgataattgctctttctttagtagctctgatcttggtgacgttaccttgcttctttcaggcacacctaactctcataataatgcaaataattatggcattcagcacaggactattgtgagaaataaatgagatagcgtatagggaacttaatactatgacttctctgtgatgaacacttggttcattttagcttccaatatttatagtaacactaatagcagaggtgatagtagcaatagtactaatactggtagtaactaatcttcttttcaaaccaaacatcctcagtaattaaaatttttctcataagaatttgtatttgtaaattagacctctccctctcctctccctctccctctccctctccccctccccctccccctccccctccccctccccctctccctctcttccctctccctctcccctttccacagtctccctctggactgtgctgctgccatctcggctcactgcaacctccctgcctgattctcctgcctcagcctgcccagtgcctgccattgcaggcgcgcgccgccacgcctgacgggttttcgtatttttttggtggagacggagtttcgctgtgttggccgggctggtctccagctcctaaccgcgagtgatccgccagcctcggcctcccgaggtgccgggattgcagacggagtctcgttaactcagtgctcaatggtgcccaggctggagtgcagtggcgtgatctcggctggctacaacctccacctcccagccgcctgccttggccccccaaagtgccgagattgcagcctctgcccggccgctaccccgtctgggaagtgaggtgcgtctctgcctggccgcccatcgtctgggatgtgaggagcccctctgcctggctgcccagtctggaaaatgaggagcgtctctgcccggccgccatcccacctaggaagtgaggagcgcctcttcccggccaccatcccatctaggaagtgaggagcgtctctgcccggccgcccatcgtctgagatgtggggagcgcctctgccccgccgccccgtctgggaggtgaggagcgtctctgcccggccgccccatctgagaagtgaggaacccctccgcccggctgccaccccgtctgggaagtgaggagcgtctccgcccggcagccaccccatccggaagggaggtgggggggtcagccccctcccggccagccaccccgtccgggaggtgaggggcgcctctgcccggccgcccctactgggaagtgaggagcccctctgcccggccagccgccccgtccgggagggaggtgggggggtcagccccccgcccggccagccgccccgtccgggagggaggtgggggagtcagccccccgcctggccagccgctcagtccgggagggaggtgggggggtcagccccccgccaggcgagacgccccgtccgggagggaggtggggggtcagccccccgcccggccagccgccccgtccaggagggaggtgggggggtcagccccccgcccggccagccacccggtccgggagctgaggggcgcctctgcctggccgcccctactgggaagtgaggagcccctctgcccggccagccgccccgtccgggagggaggtgggggggtcagtcccccgcccggccagctgccccatccgggagggaggtggggggtcagccccccgcccggccagccgcgccgtccgggaggtgaggggcgcctctgcccggtcgcccctactgggaagtgaggagcccctctgcccggcc

SEQ ID NO: 23 - DNA, 1368 bp, Homo sapiens
atggtggattttccaggctacaatctgtctggtgcagtcgcctccttcctattcatcctgctgacaatgaagcagtcagaagactttagagtcattggccctgctcatcctatcctggccggggttggggaagatgccctgttaacctgccagctactccccaagaggaccacaatgcacgtggaggtgaggtggtaccgctcagagcccagcacacctgtgtttgtgcacagggatggagtggaggtgactgagatgcagatggaggagtacagaggctgggtagagtggatagagaatggcattgcaaagggaaatgtggcactgaagatacacaacatccagccctccgacaatggacaatactggtgccatttccaggatgggaactactgtggagaaacaagcttgctgctcaaagtagcaggtctggggtctgcccctagcatccacatggagggacctggggagagtggagtccagcttgtgtgcactgcaaggggctggttcccagagccccaggtgtattgggaagacatccggggagagaagctgctggccgtgtctgagcatcgcatccaagataaagatggcctgttctatgcggaagccaccctggtggtcaggaacgcctctgcagagtctgtgtcctgcttggtccacaaccccgtcctcactgaggagaaggggtcggtcatcagcctcccagagaaactccagactgagctggcttctttaaaagtgaatggaccttcccagcccatcctcgtcagagtgggagaagatatacagctaacctgttacctgtcccccaaggcgaatgcacagagcatggaggtgaggtgggaccgatcccaccgttaccctgctgtgcatgtgtatatggatggggaccatgtggctggagagcagatggcagagtacagagggaggactgtactggtgagtgacgccattgacgagggcagactgaccctgcagatactcagtgccagaccttcggacgacgggcagtaccgctgcctttttgaaaaagatgatgtctaccaggaggccagtttggatctgaaggtggtaggtctgggttcttccccactgatcactgtggaggggcaagaagatggagaaatgcagccgatgtgctcttcagatgggtggttcccacagccccacgtgccatggagggacatggaaggaaagacgataccatcatcttcccaggccctgactcaaggcagccacgggctgttccacgtgcagacattgctaagggtcacaaacatctccgctgtggacgtcacttgttccatcagcatcccctttttgggcgaggagaaaatcgcaactttttctctctcaggttggtga

SEQ ID NO: 24 - protein, 455 aa, Homo sapiens [sequence omitted]

SEQ ID NO: 25 - DNA, 21781 bp, Mus musculus
gctgctcatacaggacacccaaagctatgatgctggaatctatgtgtgcagggtggaggtgctaggcctgggcgtcagaatgggagacaggactcggctgctggtggagaaaggtgaggtggtgggagatcccccaagatgcagtgttactgggagttagggatggtcccctgctctgagctcccaaattccttcctctccaccgtctccacgtcctgctgtagggcctcctcagcaagcttccaacacagagcaagaggctcacacaagtctcctcctccgggctggattctacgccctcagctttctctctgtggccacgggcagtaccatctattaccagggcaaatgtgagttgctgagcaggggcaagggagcagaaatgggaggggacagattgcaagaggagaggaaagcttcaggcctgtaactctgagcagcccctgctatttctcctaggtccctgtcacatggaaatcatggacactcctcccgcagcctctgagaagtgattctaagtctcaatgatctagcactctcaggaggccaacaataagtccttacccgctcctctctcctacttaggactctcatattttcttcattctccagtctctctctctctctctctctctctctctctctctctctctctcacacacacacacacacacacacacacacacacatccctccacccttagctctcccttcctacccggggaccacaagctgtttactggctttctgcaggtgggagggtgagccatgggctggacacatatagagaagcctgatgcagaagtggggaaccagactttactagatgaccatagtgtgactgagcacgcacccagggcgaggagagcttttgggggcactcaagtgggtgtgctcctggcgatgcaggcatagtcagtgctgaggtcttctttcatgtctgtgatatcactactggacactggcagctgctggagagatgcatagtggggctcctgccctgagacctgggcctggcagtgcagaggatgatgtgaggaccaggggtactgtcacacatccttccccagcctggccgcagctcccacctgtctttctccctgtgtctccactcttttttttctcagtctctcctctttatatctcttgaacctgttttcgcttactttccctctttctttgtttctatataagtgtgtctgcctgtgttgtataggcccttaagtggatgtttggacatcaactttccaactgtttctacacattatttctatctatccatctatctattttgagacaaggtctctcactaaaactggagtttgccatttccactaggctggttggccagggagcccctagggcttgcctgtctgtaccccacagtactggggttccaggcacaagctaccatgcctgactacagcaaatactttctcagaacctcctctctcccccacctcctttatttactttatttatatgagtacactgtagttgtggtcagacacaccagaagagggtatcagattccgttacagatggctgtgagccaccatgtggttactgggaattgaactcagggcctctgcaagcacagccagtgctcttaactgctgagccatctctccaagctccaaacttcctcttctattgagacagggtctcatgtagctcaggctgaccttcaacttaatatgtagtgaaggacagactccctgcctctatgtgggatttcagtcacatgccagcgctctggttttatgctgcgctgggaatcaaacacagttctacacccgctggataaggactgttaactaaaccacactgctagccacgcccacgccccacccactttgcttttgttgttcttttgagacagggcggctcctctagtcctcatggaactcttctctctcgttttgtttgtttgttttttaatttcctctctcactcacttcctcctctctacgtccttctggagtgttttatattcttataaacacaccattccctccctctcttctggttgcctctttttctgcctctttcattttctcgttcctgctacttcctcttcccttttctctcggctccaccccttcatcccagccccactccctacgtgggtttccctcgtcccctcaccccctgcccgcacaccctcccacctccagcccccctccctcgcccccttgcccccagccgccacttccttccccgccccttcatctgctccacccctcacccttcccccttgtctcctcgtccccccagactcacattcctttccagtctcttcactagaagaaaaaaaaaatggttcagtaagaccccttccctgacccccccccccgccagaatggcaccccacattggctcatccatcctaggacagcacctctcattgaatctgctacctcagaatagcaccccaccccaggcccccaacgccagagcagcaggtctccaccccagaactgccttccacaacacacctactggagccccacccctccaacctcgctggttgccataggaaccacagccaaaacctgggtcttttggacaactctggccttttctagcagtaggaagggtgtggagggcaagctgtgggtgaccgagatgctctagggcttacctctctgactgaaccggcacaagcagatgaacaggatgatgacaagcaggaggaggagccctcccagtcccaggctcccatttagcaggaaatcatctggaaggagtatctctgagagggttttttttttccccaccaatttcccaacctcctggttaaatgtaagtttcctagcttcctatatttttcctgggtcccccttccccaattttttattttatcctatcttcctctccccgatcaatcctgttttctattttttgacaatttcatacatatataaaaagtctcagccgggcgtggtggcgcacacctttaatcccagcacttgggaggcagaggcaggcggatttctgagttcgaggccagcctggtctacaaagtgagttccaggacagccagggctatacagagaaaccctgtctcgaaaaacaaaacaaaacaaaacaacaaaaaaaaagtctcttggtcatttccaaagccctttctccctctcccccctcccaacccatgtctctcccacctttctgtcactttatgttgagagtctcatgtatcctgggaggccttagattctcctagtagccgagtatgcttgactttctgatcctcacacccctgtgtcgtgtcttaagtgctagcttggcaagagtgtactaccatggctgttttatgtggctctggggtcaaagccaggaccctgctatcctctcacagtttaaaatacaggaaaatatactctaggagattttgaggggggggcggtgttgtatttttgtattagtttttgtttgcttgttttgttttgtttttaaagacagggtttctctgtggagctctggctgtcctggaactctagaccaggctggtcttgatctcacacacagagatcctcctgcctctgtccgccatcccaacccctccggccctcttgccccctcactcccacctccccccactctgggattaaaggtgtgcaccaccactgcctggctttttttttttttctttctttctgcagtatcttctatagtttaggctgcttccaaatttcctgaagcctcatgcagagacaagtcatgtccttgatttctagtccttcggaccaccccacctctctggtgctgggattacaggagacactataacccagggcttcgtgcctacacattcattacccagacatatttgttacccagacttcaacttctcacttcctctagagattcacctaccgggttacctctcctgactatgctcactccctactgtttccgggtctcaggaggcccctcttccacctgtactgcctcattctgaccacttctcctaatcctgaaccctgcttttcttccctcactctccagccctcacatccctcccctttccgaacggaggggtccctacttactggttgtgcaattgttaccagatcccattgtcatcagacatagtccagggactgagaacaggcctgaaggtcaagactaaactaatccctcttctgctgggcttaatagcttgggttagtcacgtgcccccaagttccccatctctgaggcaaggggcccctttacagtcctcatcctcactgggctggggattttatgtttgtctttttctcttttttgtttttttggctttttttggagacagagtttctctgtgtagccctggctgtcctggaactcactctgtagaccaggctggtctcaaactcagaaatccacctgcctctgcctcccaagtgctgggattaaaggcgtgtgctaccactgcctggcttatgtttgtcttaacatattgtggtacccattttccaggccaggagcccgagattttaacaaggaaagcccaacgcagccctattggtagagatggatctctgtgagttcaagcacagccagagctacacagtgagaccctgtctcaagaagcgaacaaaagccggggcgtggtggcgcacgcctttaatcccagcacttgggaggcagaggcaggcggatttctgagttcaaggccagcctggtctacatagtgagttccaggacagccagggctatacagagaaaccctgtctcaaaaaaacaaacaaacaaacaaacaaaaaaaaacccaaaaaaataaagaagcaaaagccaagggagactcagaagtagcagagaaagtgtttagctgtattgccccctcccatttactctgccccaggctgatgggggtgggaaaggcagcggggggggggggcacttggaggaagctggaaacactgctcaatcctgaatgctggtgagagggctggtgaaggcaagggagccagggtctggagtagttgtgggaaccactgggaaaccagagagaagggtgccctttcccaggagggaggaccttatttggctggtgtggagtagtggctaccaagaatgctttaacttccccttgggtacttcctgccctttaactgctggttcctgtttgagggtagatagaggcccctcacttgagggacaacagcgtgaaactcagaacctcccagttataaggggcatgctgtaggtttgagggacccctgaggagctgtgatgaatcagggacagaacagattattattagtagttattattattagcagaattttgctatgtagcccaggctgacctgaggctcaccatcttcctgcctcagcctgcagagtatacggcgggccaccactttcagctgcagcttcttttctttggaaaatgaaggcacaagagctcagagggtagggtgtgaatgcagattccttcgggttcagggaactccaaatccatagtctggcctccatttatcccagcaggtttcccgtctcatcccggatctccacccactccccgctgacccagactcttggtttacagtggggacacattcaactgttcagagtggaaagaagctccccaccgcaggcattctgcccctcccgcagttttagcctctttccactgcctctgtgcctccttgcatctaggagaggaagaatagccattgggagatggtgttacatctttcctttgagattcctagatatcattagggtggttactccctcagccccagcctcccggttcaccctgtactggtaaaggaatgtccacctcctccaggggccccctctgcggtgccgccttaaggttcatcatcttgtggtttgtgcgtaggcatgggctcccagcacctcgagtgccagataactctggggtgtctcagggcacctctcttggtgtctggcagctatatgcagcaggatatcgatgtgctaccaaaggagtagggaagtcagaggtagtcagactaaatctgctaacagatgctgacaggaagtgggtgagagaagctgatgttagcaaagccttggggcatcaaggagaacttcccacagaaggcagcattctggcattggcaggagggcaggagggactgaggtgaaggtctctcagtgccactgtgaccaagagagaaaggggtgtagaagactacaccccaatctttgaacagagaggaagctggtagctaggatggagacagaggtgggtgagtctggtgcctgggtccctatgcatgttttgttaaccaaattcagggactttgtggtactccccccccagtgtttcccccagaacaaatggggatcacaatctaagtgggtttcttcttttttatagtttataattacattttttttaaaatttttaaacattgggtgaggagagagctctgttggtaaaagcactggccgcacaagcatgaagaactgagttcgagtccccagggcccacataaagatgggtgtggcaaccacttgtgaaagtccatgttcctagtatgagatgggagatgtggaaaactgagaattcaaggaagatcgcaggggatggggtgtccggcctagaatgttcagagaagatcgaaattagaccctgtctcagataaggtggtgggctggccggggttagcatttgacgtgactgtgaactcatactgaaaaacacacatgcgtgcacactcacacacacacacacacacacacacacacacacacatacacacacacacacacacacatacacacgcgcgcacaaaggtcaaacatctagaaaaactgaaccttacaacaaattcatatacatatatatcatatatatatttgaccaagccagctcagtcaatcaacagggtctcaagggagggagtgaagattgaaaagaaaaaggcaaagccaggcatggtggcacacacctttaatcccagcactcaggaggcagaggcaggtggatttctgagtttgagaccagcctggtctacaaagtgagttccagaacagccagggctacacagagaaaccctgtcttgaaaaaaaaaaaaacaaaacaacaacaacaacaacaacccccccccaaaaggtaattagacaaaactataacaagactccagcctgcactgaggctgaagcgggtttatttctctccagcctgctttgatatcattttaggtacataaaaacaaaaaaccaaaaaacaaacaaaaaaaccccccaaaaaaccatgggcagttcttagagcaaagacaaagtaatcaaatgaagtagtaaacaaggagatcacacaaggtaataattaagtaaaaaactaaaaacaaagccccatgacccctgtttctaatattcttatctgagcctacttccttgtccaagcccagtgacaagccaaattcctagaatcggcaccaaaagctctcagagctctcaatatgtgtgtgtgtggtgtgtattatataatttgtttttattttaaattatatttgtgtccatgtatgcatacaaacttgaatgcaaataccatcagaaaccagaagagggcgttggatcccctcaagctggagctataggttacctgactagggtgctggaacctgaactcaggccctctgcacgagctgcaagtgctcttaactgctgcaccatttcttcaggtcccataagcatagtcttagcacctagatcattggttctcaacccatgggtcccaaccccaccacacctcagacatcctgcatttgagacattgacactatgatttgtaacagttgcaaaaccacagttatgaagtagcaacaaggtaactttatggctggggggggggtcagcacaacatgagggactctattaaagcgttgcagcatcaggaagtttgagaaccactgacctagatctataagcaacactttgctggtcacatgcctccctctcctttgtttgttcagttttgtttaagatttatttattattatatataagtacactgaagctgtcttcagacacactagaagagggtgtcagatctcattacaaatggttgtgagccaccatgtggttgctgggatttgaactcaggaacttcagaagagcagtcagtgctcttaacagctgagccatctctccagcccctttgtttgtttgtttgggtttttgtttttgttttttttttgagacagggtttctctgtatagccctagctgtcctggaactcactctagaccaggctggccttgaactcagaaatccacctgcctctgcctcccaagtgctgggattaaaggcgtgcgccaccactgccctttgtttgttttcaagaccaggttttttctccctgtgtagccctggctgtcctggaatgtgctctgtagaccaagctggccttgaactctgatcagtctgcctttgcctcctaagtgaatgcatgttggttccttctttccttcttgagacaggttcttatgcatcccaacctggcctcacgcttgccaactagtgaaggatgaccatgggtttctgacggttctgctgggattacaggcccgcagcaccaagcctgcttgatttcgtgctggggacaaagccagggccctgggcatgcaaggccagtgctctcccatgaaccacagccctgagctacttctcatatctttccaggttgtgactattacctcatgttaccgctgaattgttcaagttagtctttgtttcctctttttttttccttgcctcaggaagacaaaatttacatctagtaaaatgtatgaagctggaattagttctgttttgcctgttacagaatcaaacctactagccaagtgccctgtcaggaaactctactgctatcccaacactgccttttcgtctctctgggcctcagcatcttcttagggctttcccatggagacgaagtggctagtgtaataaagactgtagttcagtggctagcacattcttggtgcctttggtcagtcagctgtattctactaatattggtgttggtaatattttccaaacgagttgtctggtctgggacatagagactgcaaggtcaccaggaaggggacatggcctgaaacctctgtccaccttcctccgacctgctcttccctaaactccaatcagctgcccctcgggtgccattaattcggttcctgatgttcattgaagtcaacaaatttctcattcattcattcattcattcatacattcatttgccctgtccctcatttataagtagttgatgcttcccaatggaggaggctcattctagacagactcccttaaggtggagtgtgcctctgtattgctttatcaggacagagagagagagagagagagagagagagagaggctgagcccccttcataaagccataaccactgcggacccacttaattctgcctttcccatctggttttagagactgaaacaggaagaagtcagccagtgtggggagagggtcgtatcagggacgcagacacacagccgacccttgttggcctcccactccatctcctcaccccccctcccgtgtgtgtgtgtgtgtgtgtgtgtgtgtgtgtgtgcgcgcgcgcgtgcgtgcgtgcatgcatgtgtgcaggtgcgtgtgtctttgcagccctcccttcagcactgtaaggtccagaagcatgaagaacacacgagatacttggagtcctacctggccatgacaaccttgtttgttgcctggccttctgcaagctcccttccttccctgggcttcatcttccctccctgccaagcccctcttcatctttaccttgaaaacctctctctaccccatctccttccccagttcagagaacccaggcatccagccacccaaccccggccccagcgctgggtaaacaggaagctgggtgaggggaggaagggtgttcggaaagtccccgggcagggggcaggtgtgtgggtctgcgggggtgggggggtctacccctgaggtatgaaagcccctgccccggtcctagttctgagtctggatggggacacggggactgcagggcctgggtgggagaccccaggggaggggctgcctcttgctggctgtggcaggagctacttccctggtgaccctgttgttggcagtgcctatcactgtcctggctgtgctggccttggtgccgcaggatcagggacgtcgggtgagtggctgcaacgggctccagagggctgcctcttgtgactgtttatttacttatggctgtgcttctgcccaccgcgctcagctggccgctctccccagagggaatgtctggtctgtctttgcctctccaggcaatcctagcctgaattttcaagccccttcctggttggcttcttttccagataacactgcacttgcgtctctctgcctgcatacatcgtctttgtttgttcttctagcaagatgcagtctagggaggacacagcaggcccaggccttggggctgggctctacggtgggaggggtggagttgccattagccaaatctgacctctgggcactctaaccctacctacccatccaggttgagaagatcattggctcaggagcacaggctcagaaaagactggatgacagcaaaccgtcgtgcatcttgccctcaccctctagcctctcagagactcctgacccccgtctgcatcctcagagatccaatgcttccaggaatctagcctccacatcccagggccctgttgcgcagtcctctcgggaggcatctgcatggatgaccatcctgtctccagctgcggattctacaccagatccaggggttcaacagctgccaaagggggaaccagaaactgacctcaaccctgagctccctgctgcccacctcataggtaagcatctggtagaccgaagagtgctggctatgtacccccacagtaagcgagagtcctttggctctgctatgacactactggtactttcccaactcctccaccaccaacttctccctcggtatgactgactgctcaggaaacaggtaaaaaccggcagggatctcgccactttagtcccttcgggtgatagatagcaccgttattcctgcccctccccgctaagtaccacagaaggaggaagaccccgctcctccgctccaggtccctgctcatcctgcccgggtctccgacctagagatcacggcccgagcgctcacgcgtgtccctttctgcaggcgcttggatgagtgggcaagggctcagctgggaggcgagccaagaagaagcgtttctgaggagcggcgcgcagttctcccccacccacgggctggcgctgccacaggacggcgtctattacctctactgccacgtcgggtacaggggcaggacgccccctgccggccgaagccgtgctcgctcgctcacgctgcgcagcgccctgtaccgcgcggggggcgcctacgggcgaggttcccccgagttgctgctggagggcgcggagacagtcacacctgttgtggaccccatcgggtacgggtcgttatggtacacgagcgtggggttcggcggcctggcgcagctccggagcggcgagagggtctacgttaacatcagtcaccccgacatggtggactacaggagagggaagaccttcttcggggcggtgatggtggggtgacagccatctgtattcattcctggaggatcgactgacggtgcgaatgtgtgaatcgtgatgtccgggaccccgacagtcccgagcggccgggggcgtggcgggggggggggagaacggaatgtaggacacgaattttgaaaataaagaatgtaaactatgccggcccttgccagtgtcttcacggaaatgcagacgtggtttttgattctgggacacgtgcaggtgtggctgacccagctttgaactgtggacacctgttgcacccacgtcctggctctaaggccagggctccaagagggcggaagaagggacaattaaaccctgagacttctgccagcaccctgattgccaggatgctgaaaggttagggaggttggttgaggtttgttagcagctgcgggtcggtcaaagaagaaacgaaaggaaagatattagactcacggattttcctaatccttatttctatcctatctagtgttagggggtgaaaccagggcgagaaagggtgggagaaagaatccacaaagtagcaaagacctggtccccacaagaccccctcacatacacccttgctcctggcttctgcctctgtgaggaggagccaacaggagaaggtaggcaggattcgttcccagagagaaaaactacaaagactgtggaacaaagctccgtgggttgggcccatcagttcagttgggcctgataggttatatgtatgtagtatgtatgtaatgtatgtatggatggatgtatgctctatctatctatctatctatctatctatctatctatctatctatctatctatctatctatctatctatagtccgggtctcatatatagtcctgggtcacctggaactctccagggctggggctaaaggcatggaccaccacgggttctgacagcccttctttaaggggcagcaggtcagtcgcaggcacgttaaggggcagactaatgaagaaagcaaaggagctgaaaatggcaggggtggggtgggggaggggattgtgtccgaggaggaggagttccaggaggaagccgatgccctggggtcctttctagaaatggaatgtcttcacctttggttcacacaaagttgggcaagtgggaggcccctacgatgagtaacagcagcccccccccccccacgccatggctggaggaggcagagggggacccaggcactatctaggtcaccccagtgggtcacccctaccccccaccccaccccagcataccacgtggttggtttttccctctctacacgggtgcaggaaggcccaaccaacaaagagcccactggggtttcattttctcttctcttctcttctcttctcttctcttctcttctcttctcttctcttctcttctcttctcttctcttttttaaaagatttatttatttattatatgcaagtacactgtagctgtcttcagacactccagaagagggagtcagaagacttgttacggatagttgtgagccacaatgtggttcctgggatttgaactcaggacctttggaagagcagttggtgctcttaaccactgagccatctctccagcctcttctcttctcttctcttctcttctcttctcttctcttctcttctcttctcttctcttctcttctcttctcttctcttctcttctcttctctcctctcctctcctctcctctcctctcctctcctctcctttcccttcccttcccttcctttcctcttcttttctctgttctttcttccttctttccctttttctcctcctcctccccctcctccccctcctcttcctcctcttcttccttctcttcctctctctcctcttccttctcccactgaccttgaagccctcaacaatttacctgcccctacctccgaagtgttgggattaaaagcatggctacacacccactccttatgtgctttggaccttctgcacagagccttccagtggggtgagagggtgaccaattttggctaaagtctagtcaggcttcagaatcttctatacctagtcattgccttccttgtaaaacctagttttcgtgaaaagccccattcagtcggtttagcaagctccctctcctagactggatcaccctcagtcatcccgtgcagcccctgaggtgatgtctgctcacctggcctgtctcaacaggcgtcttgtctgatctgtttagacaaagtccccctaccccggatttttctttcctcttagtcatttgccatccccctaacgcccaccctgctggggctcttaagacccacttgctctcattgaacactctacaacaagtctctgcaccaataactaattctgaataaagtcggccttgcctgcttcagcaagtactattgaataacaacaacaataaattattattattattattattattattattattattggtgttgggatcaaatccaagcctgcatatgtgattaagtaatttaaaaaccaacaacaacaacaaagcatttaaacaaggtgtttttctctttccaatccacccacctcaatacattcatcatttgtctgaaacactggaaaaccaaagccagcaatggctccttctttgttgtgttgctttgggttttgaattcagggtatcccatacactgagcatccaccctcaccccaacatgctccacagagtcacattttcagccctgtgtctttttaaaaactatttcactcatcttcagaggtttggaaaaataaaggggctggtgaccgaaaggcagagctggctgagcccagcccagcatggagcagggatagagcttaggtctcctctccgtggaccatgcccgctctgtctgttcagaggcaggttgaatggtgcagggtgcgcagttagacacctgaagctctgcggctcttccttggctgtgattcaggtgcctgagaatgtggctcctccccagccccatgggagccacaacagccggaaagaactgcagtactttcccagcaggtattggaattcccagagtgggaaattcccatgccccagggcaaaggtaattagggttaggctcctgtttccgggggagaggtagggatgttggctgccttttgttccacgggggtcttgggggtcttaatggcccaggggtataaagactgagatctggacccagagactttaggcctccgcaaagagatggatgcagacttcatcccaagacagaaatcacatttcttttccaagcgatctttatttctctcaatgacccgtagggcaattacagtcacggctcccgtggggagcagaggttcagtgatgtagcgacagcctggtcaccaaatcagcgttattaagacaattgggttagataaatattttgttttaaacataagcaaaagaggaggcaacaaggtagagaggccaggtggggacagctcagctccgttttcacagaaaacatgtctgtctgaagacagcttcccacactgggtcctccaggacaccccggccttccaaataaatacattcataagcaaataaataaataataaataaataataaataataagtgcaaatataaatagaggggggctggctctgtgaggaaggctgtgcattgcacctcagggaagagtctggaaaggtctgaaggtaggaaggcctgagatcttatccagcctcattctgagacagaggcaacctgaccactctccctttgcagaactcaggaatggacattcgaggctccagtgaattcggaaagcccatttgagtccttgatggtggtgcatgagaggcccacagtccaggtcactgtcccagcatcttgtgtttctgagtagttgttgaaagctctgagcacagagttggactctgagccataatcccctttctaagttagaaggacacagactgggggctctgaggagtagacaataaaggggtcagagtaaaggggtcagagtgggggctgggtagagaatggatgaacacccattcccttcacagagcaatgactccaaagtagacctgcccggactccgcaaagtctaagtacttgggcagattgacctcagcgctgagttggtcccccttctccagctggaagactcctcccaggtatatgggctcataccagggtttgagctcagccccctcaggggtgtccttggggcaggggctcttgacggcagagaggaggttgactttctcctggtatgagatagcaaatcggctgacggtgtgggtgaggagcacgtagtcggggcagccttgtcccttgaagagaacctgggagtagacaaggtacaacccatcggctggcaccactagttggttgtctttgagatccatgccgttggccaggagggcgttggcgcgctggctcagccactccagctgctcctccacttggtggtttgctgagggggggggggaggattgagtcagtgtcaccctcttagttcacactccacatcctgagcctcagcagctacccacacttcacttccggttcctgcaccctctgtctttccacatcccattggctatgaggtcccgggtggccccctgatgccttgcttttgagtcactgctctgactctcacgtgctgtctctaagagctctgtcttttctcagcctggctcgacacccctcaacccgccccccaaaatcatgccccttcattctcaaggcacatgtaaagaaatcttacctacgacgtgggctacaggcttgtcactcgaattttgagaagatgatcctggaggggaagagacaaaggcaaggatgagccttttaggcttcccagcaagcatctatgcacttagacccctttcctcccaaaccaaagctttaagttctccccccaccccatctcatcccatgcctaactgcccttcctccatcttaaattaagagagaggtgtgggaacacttactgagtgtgagggtctgggccatagaactgatgagagggaggccatttgggaacttctgtgtaggaaaagaaggaggttagttaagacagactcaccccaaaggagaagcctcccggctgattgccccgcttacagttcctctttgccccaccccaccccccagctttgtgtttttcttcttcattcattcatctgtccaacccacggcttctttctgcggtgccctctgtgcttgatctcccgttatctccccttcatcttcctccttatctctcatgcctctctcatttctgtctctgagttttatctcttgcttatcccctcttcccctggccacatctttccagatctctccacgtgtgaacacacttgttcgttcattcatctctctgtgcatccgacgaaggatgtttagtcagctggacgcatgggtccgaggtcctgactctgtcccctccacactctcctccaccttgccctgcccattagcccacttctttccctcacactgtccttcttgccctcctaacccgttttgcttgtgagcgagaataagggttgcccagacactcacctcatccctttggggaccgatcaccccgaagttcagtagacagaagagcgtggtggcccctgccacaagcaggaatgagaagaggctgagacataggcaccgcctggagttctggaagccccccatcttttgggggagtgcctcttctgccagttccacgtcgcggatcatgctttctgtgctcatggtgtcttttctggagggagatgtggcgccttgggccagtgagtgaaagggacagaacctgcctggttggctgcttgcttttctgggagctatttccaggatgttctggagtttctgttctccctcctggctagtcccttgctgtcctcgctgagggagcttctgctggctggctgtgcagacggccgcctttatagcccttggggaagagggcggggaaaagctctcattcaaccctcggaaaacttccttggtggagaaaaccatgatctcatgtggaggaagcggtagtggccctacacctctgtctcggtttcttctccatcgcgggggcagagggtttggaaagttggggacacccaggcatcaaggaatctcctccccgtcgtccccaccaggattctgtggcaatctggggccaatcaggagggtgtgtgtgtgtgtgtgtgtgtgtgtgtgtgtgtgtgtgtgttgtataggaccctgagaactgaaacccatttcttctctgtcctccagagctaatcattgtctgtttctttgtagaaagaccatgcctgtgtctatttccttttgatttctaaatgggacatccatgggggagaacttagcatgggggggtgcttctgaaagctgggtgcataaggggggagacatgatattgaggagggaaagccccctgtttgagttcttggaggaagtggctgaaggcagagcagcttgagagttgggaagtgtgcatgggctttgggagggctggtggggggggtaatgggatgagtatggggcagccccagagggaatgaactcagccctgggaattcacggacctcacaagccttctcctttcactctgatcatgagctcaggctgctgctttgggtccctgctcccaagtgagttttccacggagcctctgccatatcttgactgcggtacatcaactcagacatttaggtcccacagccctgcttccaggatttctcccaatccgtatgactccccggtcttccaaggattcccctcccccaccctcccactcctaaacactctcccaccctccagtggagtcacttctccccagaaccctcatctctctccacccttggatggatctccctagctcatcctttgggtctcctccggcagttaagctgcctcactcccgtgaatccaccatgtctctgggagctgcctgctcctcatgtctctttgctctgcccggatcccatggaccaactgaggcctctgtcccctgctccactccttaaagagaccaggaagtttctcccccaacgcaagacagacacaagcagacagaatctcagagaaaagaggtttattgggtttcacagatggtgcagggggtccctgtggatgtctagccaagcagtggctggcttttagagcttcgtgctttcttctagaaccccttggtcacccacatctaattctctcgccatctctctcttagatgggtcctgtctgaggtgagacacctttgtgtctgggacctagttgtcatctgacggctttctatttttcccctctttctattctctataaataaataacttaacttttctctccataaatagtcaaccttcccctgttcccagccacctctcccatgtctgtccctccttcatgtccaggtctctgtccgacctagacccacaaaaaccctgctctgtgcaggaacttctaggtaggcttgagtcgtcccctgagcatctggagtggccctggggaagatgtagtcccctgaagtgtctcagactcccgtgagagctccaggttattttagtggggaaggctggagactgtggggatgtgacccttgaaacaacggtcaggatggaggcctggaatccaattcttgggtttctttagaatctacagtgcaaaggctccaaagaatacactgctggggctgaagtgtagatgggagatgccgtcggtgtgggtggacagctggtctcccttactgagcaggaacacagccccctggtacattgagcgcacccacggtccttgaagtcccggatacacagacttctgcgcactgaggagaggcacatggaaggggtattgggaggaaaagagctggacctcgtgtgccaggtagatgggagtgggaatggccctgggggagcagctttctccagagaaaaccacctgggagtagacaaagtagaggccactggtggggatcaggagggagttgttgctcaaagagaagccatgtcggagaaaggcacgatccgtgcttgctctccagagcagtgagttctgcttgctggggtaccctgggaagaggcacaagacattggggggctatcaagatcagaggtccccatccctgagggagcaggcactggacaagtgggatggttggtagggagatgggagtggggtgcctgcccttaggggtaagaaaagttggtgtggggagatgggaagatcgcctgggcccctgggcaagtaggacaaaaggcagggactggacctctcctctggaggcagaagtttaccaacaaggtgagcagcaggtttcaggatgccatgggtcaagtgcttctgagggagtggatgggctgtcctggcagcggagaagcggacaccagagagtccctgggacagaagagagtggagaggactctaggactctgagttagctaggccaccccagcacccccaatctcttgctgcctcacctgggcccctagaggcagggccagcagcagccccaggaggaagacaggaggggtgccaagcaccctcaagaggtggagacggccgagcagtgtcatgtggagaacctgctgagagagagagagagagtgtgtgtgtgtagcggaggcggggcacacagcggaagacagaccttacctcccagctgagacagccaccctgagagacagggcgacagacagaaaaggggacaggcaggggaaccctgaagtgagcagggataaggagagacagaggggaagaggaaagctccaccatagaatcagacaatggctaacagaggcagagagagagaagagagagagagagagagagagagagggagagagagagagagagagagagagagagagagagagagagagagagagagagagactgataaggccgccacaggaacagaccaaaaatcaaagccacgacaggaggaccagacccattaaggctggggatccaggcaggttgtatagaaaaggctgtggctcaagaaaggaggtaggatcctgagggatgcctgataccagggtaagcccaaggagacagggtaggagaggctcacctgctgtgcggggtcctgggcgctggcgctcgggtccctttatagaggaagcggcagtgtggcaggcagcgggcgggttctaggtcggggctggggcttggggaagcccccagggcttagaagatgctgctgtttcagtcgaaggcaggaaaggctggggcctaggagagaaccgcaggctaagggcttagactactgcgttctgggaaagggagtcgggtccggggaactgtgggccgcagggactagcagggagctgggtcaggcccaggagttccagtgaacggccgagcaattcgtggagagggtgcagctgggctgtgactggaagcctggttccctgaagagtgatggtttatatcacttctgcacccttgactgctcacaggcttctctgcacatttccctctctgtcgatcatggtcatgtctggagggctccgaagccacatgtggttagcggcacctttgttttttcaggttcgaacccagggctctggatgcttgacatgcctgccgccccttcaggcctatttcctctcttgtctttgggggttcaagtcacagttattccaatatatctgtattttctggtcatctgccagtttttttttttttttttttttttttttgcttttttcgagacagggtttctctgtgtagccctggctgtcctgaaactcactctgtagaccaggctggcctagaactcagaaatccgcctgcctctgcctcccaagtgctgggattaaaggtgtgtgccaccactgcccagcttttttttttttttctgccagtttcatctgccagtttcatgtcaagaagttccattacagtgccctctccccaaatctggggcatcctggtgtgtaacaatcttaactgtgtccccttactctctggagcggcagttctcaacctgtgggcaaggtccctttggcaaacctctatttaaaacaaatatttacattatgattcataatagcagcgaaattacagttatgaaatagcaacgaaaataattgtatggttggggtcaccacaacatgaggaactgtattaaagggtcatggagttaggaaggttgagaaccctgtcctagaatgttccaggtctggaagatgatttgggggtattctcttagaaccccaagatc

SEQ ID NO: 26 - DNA, 1077 bp, Mus musculus
atggggacacggggactgcagggcctgggtgggagaccccaggggaggggctgcctcttgctggctgtggcaggagctacttccctggtgaccctgttgttggcagtgcctatcactgtcctggctgtgctggccttggtgccgcaggatcagggacgtcgggttgagaagatcattggctcaggagcacaggctcagaaaagactggatgacagcaaaccgtcgtgcatcttgccctcaccctctagcctctcagagactcctgacccccgtctgcatcctcagagatccaatgcttccaggaatctagcctccacatcccagggccctgttgcgcagtcctctcgggaggcatctgcatggatgaccatcctgtctccagctgcggattctacaccagatccaggggttcaacagctgccaaagggggaaccagaaactgacctcaaccctgagctccctgctgcccacctcataggcgcttggatgagtgggcaagggctcagctgggaggcgagccaagaagaagcgtttctgaggagcggcgcgcagttctcccccacccacgggctggcgctgccacaggacggcgtctattacctctactgccacgtcgggtacaggggcaggacgccccctgccggccgaagccgtgctcgctcgctcacgctgcgcagcgccctgtaccgcgcggggggcgcctacgggcgaggttcccccgagttgctgctggagggcgcggagacagtcacacctgttgtggaccccatcgggtacgggtcgttatggtacacgagcgtggggttcggcggcctggcgcagctccggagcggcgagagggtctacgttaacatcagtcaccccgacatggtggactacaggagagggaagaccttcttcggggcggtgatggtggggtgacagccatctgtattcattcctggaggatcgactgacggtgcgaatgtgtgaatcgtgatgtccgggaccccgacagtcccgagcggccgggggcgtggcgggggggggggagaacggaatgtaggacacgaattttgaaaataaagaatgtaaact

SEQ ID NO: 27 - protein, 306 aa, Mus musculus
MGTRGLQGLGGRPQGRGCLLLAVAGATSLVTLLLAVPITVLAVLALVPQDQGRRVEKIIGSGAQAQKRLDDSKPSCILPSPSSLSETPDPRLHPQRSNASRNLASTSQGPVAQSSREASAWMTILSPAADSTPDPGVQQLPKGEPETDLNPELPAAHLIGAWMSGQGLSWEASQEEAFLRSGAQFSPTHGLALPQDGVYYLYCHVGYRGRTPPAGRSRARSLTLRSALYRAGGAYGRGSPELLLEGAETVTPVVDPIGYGSLWYTSVGFGGLAQLRSGERVYVNISHPDMVDYRRGKTFFGAVMVG

SEQ ID NO: 28 - DNA, 22173 bp, Homo sapiens
gacatggcctggatgctgttgctcatcttgatcatggtccatccaggtgacagggcgtgcgctcaggaccccaaggagtgtgggtgggaggagggagatccaggaggctggactagatgctatagggaacgggcttggtgggggctgaaacacacggctctgagggaggagtgggactgctccaaaggtgacactcagtggactcccccaattcacagtctctctgtgtcacccactgtgaggctttttagtttgagagatccaagtaaatctatgataaatttcttggtgaaacttttttttttttttttttgagactgagtctcgctctgtcgcctggctggagtgccgtggtgcgattttggctcactgcaacctctgcctcccatgttcaggtgattctcctgcctcagcctcctgagtagctgggactacacgcacgcacgaccacacctggctaattttttttttttttgagacggagtcttgctctgtcacctaggctggagtgcagtggcatgatcttggctcactgcaacctctgcctcctagattcaagcaattctcctgcctcagcctcctaggtagctgggattacaagcgcgcaccaccacacccaactaatttttgtatttttagtagagacagggttttaccatgttggccgggctggtcttgaactcctgacctcaggtgatctgcctgcctcggcctcctaaagtgcggggattacaggcctgagccactgcgcccagccatttttgtatttttagtagagatggggttttgctatgttggccaggttggtctcaaactcctgatctcaagtgatctgcctgcctcggtctcccaaattactggaattataggcatgagccactgcgcccgcctggtggtgaaactttttttttgagacagtttcattctgttgtccagtctagagtacagtggcggtatctcagctcactgcagcctccacctcctgggtaaaaatgattctcctgtctcagcctcccaagtagctaggattacaggtgcatgccattactgctggctaacttgtgtatttttagtagagacgaggtttcaccatgttggccaggctggtctcaaactcctgacctcaggtgatccactcgccttggcctcccaaagtgttgggattataggcgtgagccactgcacccggccgaaactgtttttaatgaactgagagaccttaactatcaggcatattattaactaaatgcaggagttctcaaaatgtggatttctgggaacctagaacaaattcttaggccccactccagacctactgagtcaaaaactcggggggtaggcccaggaatctgttctagcagatgctccaggtaatttccatacacactcaagtttgagaaccactgaaatagaatgacttgtaaatttccctaagtagataatttaatcagggattttaatatttggtttaattcatcaacatggacgggttaaataggaatctcaaccaattaaggccacgtcttcacctggagatttaattagttactttctttaacgaaaaccaagagtggctgggtgcactttgggaggccgaggcaggtggatcacttgagatcaggagtttgagaccagcctggtccgaggtgggtggatcacttgaggtcaggagtttgagaccagatggtgaaaccctgtctcgactgaaaatacaaaaattagccagtcgtggtggtgggtgcctgtagtcccagctacttgggaggctgaggcaccaggatcgcttgaacccaggggacggagtttgcagtgagccaagattgcaccactgcattccagcctgggcaacagagcaagaccccatctcaaaaaaagaaaaaagaaaaagaggaaggatggcttactgtacaatgccatttgtactaaaataatacctggataatataatgagtgatattagttaactaggcagctgcattcattaatgagcttaatttcaccatgatggtttacatttcagctagacaagttactactgaactggctggagaatgatggcagagggtgagagtgagagttggtataggaagaatttgaaaaatgatttttattttttattttttgagatggagtcttgctttgtcgcccaggctggagtgcaatggcgcaatcttggctcactgcaacctctgcctcccgggttcaagcgattctcctgcctcagcctcccgagtagctgggattacaggtgcacaccaccatgcccggctaatttttgtatttttttagtagagacggggtttcaccatgttggccaggatggtctcgatctcctgacctggtgatccgcccacctcggcctcccaaagtgctgggattacaggcgtgagccactgcacccagccgaaaaatgatttaataagcaatgttaagaaatcagattggttaagagggaagggtttaatgaggcacccaaagtatctattcccatgcaccctatgcctggagaaagctgggatgttctactccaagctctgttgtcttttctctttggaataactggggaggtgtttctctgggtcttccttctgcccccaggatcctgtgctctctgggtgtcccagccccctgagattcgtaccctggaaggatcctctgccttcctgccctgctccttcaatgccagccaagggagactggccattggctccgtcacgtggttccgagatgaggtggttccagggaaggaggtgaggaatggaaccccagagttcaggggccgcctggccccacttgcttcttcccgtttcctccatgaccaccaggctgagctgcacatccgggacgtgcgaggccatgacgccagcatctacgtgtgcagagtggaggtgctgggccttggtgtcgggacagggaatgggactcggctggtggtggagaaaggtgagatgctgggaggtggtgtctcctcctggctggaggccccaagaggcaatgtccttgggaggcagggatgctcctctgaggccccttccctccctgagcctgtgtgcacttcttccccaacccccgtctccattgccccatgcagaacatcctcagctaggggctggtacagtcctcctccttcgggctggattctatgctgtcagctttctctctgtggccgtgggcagcaccgtctattaccagggcaaatgtgagtaatggagccaggggcaatagtggacgggatgggaggggcagtaagagagtgggaggagggaggacagagaccaggaagaggagagcctcgggactgcaacactgagcagctcctgtcctctctctgaccaggccactgtcacatgggaacacactgccactcctcagatgggccccgaggagtgattccagagcccagatgtccctagtcctcttcaaaagaccccaataaatctgccccaccactaactcctcatgagtctcaagtgttttcttctccattctccagatgccaaatctactctctccggattcccccaactctgaactttcccttccaccaggtctgacctggaaaggtccaagaaggcagctgccggctgtggtcccagcgcccctcccaccaccatgtgggagctcagcacatctgcttcccccagtcccaggaggctgagcctgattgtcctgagaaatgggaaggatcagatatgactcctccttggcaactgccctttcctgccaggcccacacataccctcttctggctgttaggggagcttgggtccctgaacactgtcattcacccaataaattactatttgaccccagagtgggtggaagggtgagccatgtgttttttttattttaatttttaaaaaatttaaaaaattccctattcaaaggtcaaaaagccacataagttttgatgatgatcaatttgaacggaggctcgagatggactgagaggactgagacacagaagtggggggaccatggtttttactggctggaccacagggggaccctgtccacccgcctgggttgaggaaggtgtctggggtgctcaggtgggtttgttctcagcaatgcaggcatagtcagctcttggatcctccttggtgcctctcttgtctctgcccctgaggtcaggtccctcactgctgggcactggcagcctctgcagagatgcatagtggagttcctgctctgaggagccctgggcctgggaccaggacagaaggtgctgatgggaggcgatgccgtcagatccttccctgtgagttctgctcccacctccagcctttcttacttctctccctctctctctctctctctccctctctctctctctctctctctctctcttttttctttggagacagagtcccactatgttgtccaggattgtcttcaacccctgagctcaagctatcttcctgcctcagccttgcgatagctggaatgacagacgtgagccactgtgcctggttctggagcctctctctctctctctctttcattgctcttctctttgtgtctctctcactctcattttctccctgtctctcctatcctctgtctcactttttctcttggtttctgtctcattttctctttctcttttgcctcgattttctctgcctctctcatgctcctactttctctctccttgtctcccgtccccaaccctcctctcagcgctcagccatgcttctccccactcacccactcaggatctctcttgccctcccccttccctgtccccagactcacccagctcctctccagcctctttactggaagaaaagaagaagctcaacacagcccaccctttgtgcttctcccgggccctcccgggctccccccaccagcaggcgtggactcccctgttggcttcccagtggctccagggccaggcagtgttctgggaaagcagtgggaaagcgtgtgggggtgggggcacagggggcactgctgcagggggagggagggagtgcagcgctcacctcttcgatgcagccaacacaggcaggcggacagaaggaccactgccagaagcaggagcccgcccagccccaggcccccgtagatacatatatcttcagggaagagggctcaaggttaggaagcccattccttctccagcgtaccccagcctcctggttggttgcagctttctcagattccctctccaacagttttagaggcagaaaaatataccctcagagcttctccatcccagaccttaatacctcacctcttaccaggtttctgggcctcccgtgaggtccctttccctcctgtaccagctgtccccagaggcctgtccacctagtcatgagctgcatacatcactgttccccatcacttcctaagctcccaggactctctctatgcagatgcaagagacactttacttaccatcattccgcgataacattaggtcagggatcagggactggcctggaggtcaggaactctagtccttgctcttttaggcgaaatgatcaggggctggtgacttgcctcaagttcctcatctgtgaagtgaggggccctctgttataatcgttcccaggctggggagcctcccttatgtgccaaccctgagctgggcactttccattcctcactgctaatccccagaacatagggtatcatggtgcccgttgcccaagtaaagacccgagattcaagcctggactttactaggtcacccatcccagaaaggtggagctggggtttaaggccagctctgcccaactccagagcccagccctttcctctgccctgggctgaccacgtggtttggaggggacttttcagccctggatggttctaggtgctggtaaggggatgatggaggggaaggagcctgggcctgggtgggtgtgggcactggggggaagaagggagggtgatatcagcacacccagcaggtgggctgctccctgagccgcagagcagcgcgggagtgtgggggcccccttggctggtgtggagagctgcttcccacaggcagatgctgctagggctgaagtggggcatggaggagtatctggggccccataacttcccctcaggcacttcctcccctccaaccactggttcctgtttgagggtgaagagggggccgttctcttcaccccagagccagatatactgactagggtctggaaactgggacccttctgggtttaagaggaattctggggggtggggagcagaagtgcaggtggaggccataagggccgtgggcacagaaatgaattgtctttaatttctttggggagcagagactcagaggattcctcgacggcccagggaaactcaaacccatactctccctcccctcatcttagcttcaccccactctggggtgtgaccatccttccaccaaggtccctgcccattcccagcttacccagagcttgtggcctgcaggatggacagactccaaactggccagtgctgtctggctgaagagaagtgttgccacctcagacattcctgcccctcctctggctttaacttctcccccagcctgggttcctccccagcattgttaggagaggaagttcggctccagggttagggttacaacatctttcttttcaaacttctgggcctgtagctagggccataatctgcctcagctccagtcatttcactgatcctgccactagtcagcaaacacccaccaccttcaggtgtcttccttgattaactcttctctattacctcttacactgcatctgttgagacctcttgatcttggcatatgtctgtggacacatgtaccctgctccagttcagactgggagctctggcatatttggtgttctggtgacccacttggtgttctgcagctctatgcagcaggctgcttggctgtctgattaacaaacatgagagttaaaggcagccatactagatctacatgagccctgtggatagatcaaggacagaaagttggtgacaagttggtgacaggaaaggaggtgtgggcaatacaggtggacttcctgtaggaggcagcattctggcattgaacacagaactaagtaaaggcagcggcctgaggctctctggagagacctgggtgaaggcttcttagtggcactgtgatggagaaggagatgggtgctggaggattgcacacccactccttgaggagggtgaagactggggagcgcctgtaaggcaaggggtgaggaggagatgtggtgcctgggtgggtccatattaatttgcgtttccccttccaaattcaagaaccttctacttcctcccccacccttctccccatcctccatgttccccatgctgaataatattcagggttttttgtttgtttgttttgttttttttacattttattattaaaaagtgcaaacatagggtgaaatgagaataattgtacagtgaacatattcttaccacctagatgctactattaacattttttgttttgttttgtttttgagatggggtctcactctgtcactcagcctgaagtgcagtggtgaaatcatagctcactgcagccttgaattcctgggctcagaggtcctcccaccttagccttctgagtagctaggactacagacaccagctaccacatgaggctttgtagaaatggggtcttactatgttgcccaggctgattttgaactcctggtctcaagcaatctttccaccttagccttccaaagtgctggaattacaggagtgggccactgcacctggctctattaacattttttatttgctttatcacatatttatcaatccatctcacttttaaatatcttttaaaattacaaatatcagtacattttacatctaaacccttcagaagcttaacattgactggagttcagtatttatttccccatttcttttctggcctgaggaaggcaaattttacatacaaatctcaagtcagtactcttttttttttttgagacggagtcttgctctgttgcccaggctggagtccagtggtgtgatcttggctcactgcaacctctgccttctgggtacaagcgattctcctgtctcagcctcccaagtagctgggactacaggtttgtgccaccatatccagctaatttttgtatttttaatggagaaggggtttcaccatgttggccaggctggtctcaaactcttgacctcaagtgatccacctgccttggtctcctaaagtgctgggattataggtgtgagccatctcgcctggcctaatactgttttgtttgtttgtttttgtttttaagacagagtcttgttcttgtcacccaggctggagtgcaatggcatgatttcggctcactgcaacttccgcctcctgggttcaagtgattctcctgcctcagcctcccaagtagctggaattaaaggtgcctaccaccacgccccgctaatttttatatttttagtagagatggggtttcaccatgttgatcaggctgctctcgagctccttacctcagatgatccaccttccttggcctcccaaagtgctggtattataggcaagagccactgcgcccagccccagtattcagtttttaaactgtcttgttatcaaggctctggagccagatgcctgggttcaaattctggttctgccactgactctgtgagctccataagtttcttaacctctctgtacctcagtttcctcttagggtttttgtcaggattataattattggctgggcatgatggctcatgcttgtaatcccagcactttaggaggccaacacgggcagatcacgtgagtccaggagtttgagcccagcctgggcaatgtggcaaaaatccatctctacaaaaaatgcaaaaattagctgggcatggtggcatgtgcctatagtcccagctattcaggaggctgaggtaggtgaatccatagatcctgggaggtcaaggctgcagtgagccatgatcctgccattgcattccagtctgggtgacatagcgagaccctgtctcaaaaaaaaaaattattaaagtgtgtaaatcagtggcataaacatgttaagtgcattttgtgggtcagctatattattattagtattacggaaacacatagagatgttaccaagaaggggagatgattggagccacttccagcttccttggacctggtctttcttcccttgactctttttttttttttttttttttttttgagagagagagtctcagcctgttgcccaggctggagtgcaatggtgcaatcttggctcactgcaacctctgcctcccaggtttaagtgattctcctgcctcagcctcctgtgtagctggaattacaggcgcgtgccaccacgcccggctaactttttgtatctttagtagagacagggtttcaccatgttggccaggctggtctcgaactcctgacctcaagtgatccacctgcctcagcctcccaaagtgttgggattacaggtgtaagccactaccccggctactcccttgactcttaaccactcatgctgcctacatctaccattcatgtggtccttgctgctttgttttggttattcctgcatttatttgtccttttattcatttatgtataaacatttagtaagcacctactaatggatagggctcattgtagacttggaagctctctgagggtgggagtatgcctcgtccatctgtctttactttttgtagcaagggaggtaaagctccatttccatccctccttagtgagtcagtagtcagtggtgaggctaaggcttacctctccctttctcactcagcacagggggctggagatgagcaagggaacgggaggaggtcagcccagtatgggaatcagttcttctcagggaacccagacatccatccctcaagattccagtccttgtcctagtccggcccttgacctcagagacgggatcagctcttcctccagcacctaccttgagggtatagaagaatgcaaaccacattggaaacctggagatctgtgttctcatttcagctctgctgactggcttcctgcaagctaccttccctccctgggcctcagtttctctctctgctgagccagaagatgtctaaagacccctttggttccaccctgagagcctgtctccctaacctcaacttcttccccagttcagagaacccaggcatccagctgccccaccccagctctgggtaaacaggaagctgggtgaggggagcaggggtgtgcggaaagtcccagccaggtgtgcaggtctacagggagggggtgggcccgtccctgaggtatgaaagccccctgctctggctctggttcagtctcaatgggggcactggggctggagggcaggggtgggaggctccaggggaggggttccctcctgctagctgtggcaggagccacttctctggtgaccttgttgctggcggtgcctatcactgtcctggctgtgctggccttagtgccccaggatcagggaggactggtgagtggctgcaacaggccctggtggagagttgtatcttgcggatgcttggctccctctggttgtgcctgtggtcttttgccccctctggctcagctggctcggctgtccctggtggggatgtcttgtctctttgctgactctctttccatgttcctgtgatgttgtgcttgtgtcccgacataagccccttgtgtctcctctcctcttcccgaggtacatctgtttctccgcccaagtacctatgccttgcttgttctcccttctaaggaggtgtgtgttggggatggtgctggtaggagaaaccccaggcctgcagcttgggtccactttcagaggggtaggggtgacatgagctgaatctgaactctgggcactgtgaccccacccaaccaggtaacggagacggccgaccccggggcacaggcccagcaaggactgggtaagagcagactgtctctccttccccgcttcagaccctcaggggctcccagctccctgctgcgtccccagatacctcttcctctaggaatccaggctccccatccctgcgccctgttctctcaagggtagcctgcatgggtggctgccctgcccccaatcgtggactctttgccccttccagggtttcagaagctgccagaggaggagccagaaacagatctcagccccgggctcccagctgcccacctcataggtaaggacctccaagacctgaataagagtgtaaataatccgaaggttccagttctgctcgcccagagtccttcggctccatgattccagtgctcggtttcccacccgcttcacgaccttttgtcgctcgtgcccactcttacgctcgtccccgcagtgtagtttcttcttccctccggtgcaagcaaaagccggcctggaggtccccactacagcgttctgcaccccacatccgtgttccctcggcccccaactcgcactcatcccagaaacagcaccatccctcctcccccggcccggctcggctcccgcaggggctaaaagccgccacttccccagaagtcccaagcctttaggatcgcattcccaagagcgcgtcggcccgtgtctccgcaggcgctccgctgaaggggcaggggctaggctgggagacgacgaaggaacaggcgtttctgacgagcgggacgcagttctcggacgccgaggggctggcgctcccgcaggacggcctctattacctctactgtctcgtcggctaccggggccgggcgccccctggcggcggggacccccagggccgctcggtcacgctgcgcagctctctgtaccgggcggggggcgcctacgggccgggcactcccgagctgctgctcgagggcgccgagacggtgactccagtgctggacccggccaggagacaagggtacgggcctctctggtacacgagcgtggggttcggcggcctggtgcagctccggaggggcgagagggtgtacgtcaacatcagtcaccccgatatggtggacttcgcgagagggaagaccttctttggggccgtgatggtggggtgagggaatatgagtgcgtggtgcgagtgcgtgaatattgggggcccggacgcccaggaccccatggcagtgggaaaaatgtaggagactgtttggaaattgattttgaacctgatgaaaataaagaatggaaagcttcagtgctgccgataaagatgctgagttgcgacacacgtcttaattcagggtgggtgcacgggtgcgggttaaatattctcagtactcttctggttgcttgaaacaattcatcacaacacagtgtatggcctttgctcctagggatgatggtctgcctgtcccaccccctccctgcctctgaatggccaggccccaccattagcccagttggagggtgggaggaagggggacttctcaaactccgaagcttctctaggcatcctgattttcagggccacatggtcccaaccagactctgcaccatactcttttctcttgggtaccccccaacagtgagaggggtcattacagagcccagcaagcaccactcagaaaggcccagcagcagagtaagcccctatcatgacagaggaatgaagcctggaggggccccgcacttctccccctagagctgcctgaaggcctctctgtctcctacccgacagtcaactcttctcctccaaggagcttaattcaaggctcatggggtctgaagggaggaggctgaaggagaaagaaggggagaatattagagagagatggggatggcaggaaggagcctgtggtgcctgaaaacaccaggaagttctggggaggaggaaaaaccgatgccccacttagggtgtcccatttagggtgagacggaaaatcctcacctttttttcacactttaggtcccccttcccaaaagtgagtaagtgtgggtgcttctgggatgagtaacagtgtcccccattacttcatggctgactttcagccacaggctggaggaggcagagggtgacccaaggccctatctaggtcaccccaatgggtcaccctaccccctcagcctaccacatggttttctcctgcctggcaccccagggctggaggtaaagcctaatttccgaactcagtgggggctcccagtctaggggggctcaatttccgtctccatatttgtttttggaattattatttttttgagacagggtctcgttctgtcacccagacgggggtacagtggcatgatcatagcttactgtaacctcaaactcctgggcttgagtgatcctcctgcctcagcctcctgaggagctaggattacaggcatgcaccactacacctgactaatctttaattttttttctagaaacaaggtcttgctatgttgcacaggctggtcttgaactagtgggctcaagtggtcctcccacctcagcctcccaaagtgttgggataacaggcatgagccactgcgccccacccttatttgtctttgactctctccagaagagccttcatccagggagggggtgcttttctctttccggattacccacctctcacctctcccctccttcaccacaaagaccagtgggaccaagccggcatgtgagtccttcacccacatcttattcctatgtttcattcttttttaaaaaatagagacaggatctcactatgttgcccaggttgctctggaactcctgggttcaagcgatcctctcaccttggccttgcaaagtggtaggattacaggtgcatgccaccacgtccggcagttcggttccttgttctttattgtcctcagtctcttcgatttcacccactgagagaatggaaggggatagaacagctggaaactggttgaaggaagccagaattcactaagtgcccactgtgccaagggctgagtgaggtcctctgatggaggtcaggccttctctcacatgccctatgtgtggtggacattcctatccccattggatagataggttaagtggctggttcaggttgcagagttaggacagggtgatttgaagcctagacacccgaatctctggaagtcccttggctgtgtgattcaggtacctgagaatgcggctcctctccagctctctccggactgctggccagctgcaacagccggaaatctcacctgagctgcaggattttcccagcaaggattggaattcccagagttggaaattcccatgccctgagggagaggtaattaggttcaggctcttgtttcctgggggatggggaatattctgttgggctttgtttatgtagggtctccagggccctaggagtctaaggatgggactgggtccgagggatcttaaagcctgtggagagaggacttagggagcttcttcccacccacaagaagaggcagatgcagaattaattccaagaaggagaccatgtttcttttctaagcaaactttatttctcgccactgaatagtagggcgattacagacacaactcccctggggagcagaggctcagcaatgagtgacagttggtcaccaaatcagcattgtttagacaacttaatcagataaatattttaaaaaacataatcaaaagaaggcacagaggccagggggctacatgggaacagcctattgttcagctccgttttcacggaaaacatgtctgagccaaggcagctcctacattgggtcccccaggataccccggtctcccaaataaatacattcatctgtaaataaataaataataaataaataataaataatcacaagtgcaaacataaatagagggagctggctccatggggagggctgggctccgtgtctcaaggaagtctggaaacatctggagagaggaaggcctaaggtccacttgtgtcaatttctaggtgaggtcttctcaagtcctgcagcattctggccagaaccaaaggctccctggtctccagattccagatgtcagggatcaaagctgtaggccccagtgagttctggaggccccagtttgaattcttagtggttgccagcacttcactgtgcaggccacacattcctgaatcccaggtttcgaagtggtggtcttgttgcttaaagttctaagcttgggttccgaccctaagcccccaattctctttttgagccagaagaggttgagggtgtctgaaggagggggtaataaagggattggggcaggggaggcgtttgggaaggttggatgttcgtcctcctcacagggcaatgatcccaaagtagacctgcccagactcggcaaagtcgagatagtcgggccgattgatctcagcgctgagtcggtcacccttctccagctggaagacccctcccagatagatgggctcataccagggcttggcctcagccccctctggggtctccctctggcaggggctcttgatggcagagaggaggttgaccttggtctggtaggagacggcgatgcggctgatggtgtgggtgaggagcacatgggtggaggggcagccttggcccttgaagaggacctgggagtagatgaggtacaggccctctgatggcaccaccagctggttatctctcagctccacgccattggccaggagggcattggcccggcggttcagccactggagctgcccctcagcttgagggtttgctggagggagggagagagggagaggagagtcagtgtggccatgtcggttcactctccacatcctggccctcgagctctgcccaccccacatccggttcctgtcctctctgtctgtcatcccacatcccacctggccatgacgttctgagtatcccactaaggcctgtgctgttcctccacccttcccttgagctcagcgagtccttctcacattgtctccaagttctgcctaccatcagccgggcttcaatccccaaatcctagccctccaagttccaagacacatcctcagagctcttacctacaacatgggctacaggcttgtcactcggggttcgagaagatgatcctgaagaggagagagaaaagaaaaagctgagacccttaaacttcctagaaaatacccccctactttcacctccatccatcctcccccaagaccaaaactttaaatttcccccactgcttccataccggtactaaccctacccccaaacccaaacccagaattaggaaagaggtttggagacacttactgactgcctgggccagagggctgattagagagaggtccctggggaactgttggggagaaggagaatggttaacatcgagggagtcacccttaaaggaggaacagctggctgcctgtctggcctgcgctcttagccctgaggtgtctggttttctctctccattcatctgtgtattcaccttccaggcattcaacagctctttccctgagtgtcttctgtgtgccagacaccctatcttcttctctccttatctcccccatctctctccttagctgtcatatttcccgctctttctgtctcaccatctttattcatatcacttgtttcttcccccatctctcttctcacaccccacatctgtctccatatcttatttatatatctgcttgttcattcattcattcattcattcactccatacacacttagtgagcaccttccatgtgccagacatcctgtctctccatctttctctctctctcttccccatctcttgccacatctctttctgcatccccgtctttctccacgtttttttctctccatccctccctatcagcgcacatctttcacccatcccatctctctccctctcttgcgtctccatttccccttgggtgggagagtggatgaaggctggccaggcactcacctcttccctctgggggccgatcactccaaagtgcagcaggcagaagagcgtggtggcgcctgccacgatcaggaaggagaagaggctgaggaacaagcaccgcctggagccctggggcccccctgtcttcttggggagcgcctcctcggccagctccacgtcccggatcatgctttcagtgctcatggtgtcctttccaggggagagagggtggagccgtgggtcagtatgtgagaggaagagaacctgcctggcagcttgtcaggggatgtggcgtctgagggttgttttcagggggggtctgtagttgcttctctccctcttagctggtcctctgctgtccttgctgagggagcgtctgctggctgggtgtgccaacaactgcctttatatgtccctggggcgagaggagggcggggaaagaatcattcaaccagcggaaaacttccttggtggagaaacccatgagctcatctggaggaagcggtagtgggccctgcaccttctgtctcggtttcttctccatcgcgggggcggggatttggaaagttggggacacacaagcatcaaggatacccctcacactccccatcctccctgctccgattccgaggggggtcttctgggccactgactgatttgtgtgtaggaccctggaggctgaaccccgtccccatgcccctcaaaacctattgcctccatttcttttggggaccaggtctgtggtctgtttccttctaacttccagacaggatgcaggaaaaagatagaactagaactgggaggggcttcagaaagctgagtccttgagggagagaaaacggggttggagggaaaagctgtgttgagtcctgaggcctgtgtttgggtccctgcggggagaaggagctgggggcttggtggcaggcttgaggcctcaggaaaggctgggtgggggtagcagggacaagcctgggacagccccggggagtgaaatcacccccgggaattcacagaccccactggggcaggccttcttctttcattctgacccggagactcataatgctggtttcagtcttggcttccaaggaactctggggtccctgatttttttcatgaagctctcacttctcagggccccagtgtgtggccatatcttcttaaacgtcccctgtattccatacctggaggtcctggaggctctttcactccctggggccctctacatggccctgtcttcgttaagggggggtccccatactcgacttccatagccctggacattctcctacccattgctgtggtcacatctccccagaggtctcctgtaacccattcctcagagccgctacatgtggccatatctcccaggagctccctgacccccgcccctccagaccctgacttttccttcatcttctcagcttctcctttgcttcccctgcagcagtctggcggcctcacctggtgagtccatcacatatccctgaagctctctgagcccttatccttttgttctccccacagctcttgctccctttgagccctctgtccctccctccattccttagatagactgggaagttctcactcccagacacacacacacaagcagacagcatttcagagaaaagaggtttattgggcttcatcgagggtgcagatgcctccgtgtggggctctggtcggcagctggctttcagagcctttccctgccttctggggccctgtgatccctcatgcctacttctttctctcttggtcagccttgtgcgcatgccctctcactcttcatctcttgggcctgtctctgtttctccttggatgttcttctattattcccctctctccatcctccataaataaataatttaatttttttgccttcataaatagtcccctccctgcctctagtcatcccccaagctcctccatgtgcctgctcttcctctgtgtgtggatctaggccccacctagctggtgggacagaccaacagctttgggctgggaattcctaggcaggcttgaaatcctcagccagacagacatcagggatggttcagggaggtgtggtcccctgggatgcctagaattccttctttgaaagctccggtgacttgatcagggaagacttgagctgttggaatggccaaaggagaggtggtgacgacccctgaaatggtcagaatggaggcagaatggggagaaggtcttgaaatcaattattttttctttctggatttttccaagttctacagagcgaaggctccaaagaagacagtactagggctgaggactaggtgggggatgccatctgtgtgggtggatagctggtctccctgggtgagctggaacgcagccccgtggtacatcgagtgcagccagggttcctgcagccctggatacaccatcttctgggagctgaggagaggcacatggaaggggtactgggaggagaagagctggacctcatgggccaggtagagtggggaggaggtggccttgggagagtaggctttcccagagaagaccacctgggagtagacgaagtagatgccactggtggggaccaggagagaattgttgctcaaggagaaaccatcctggaggaaggcacggtccgtgtttgctctccagagcagtgagttctgcttgctggggtctcctaggaagagccataggggatgggggtgggagatcaggggtctggatcagaggtctcaatccctgaggaagtgggcactgaacaactgagttcctgggggatggcagggggaggcataggagtgggctccctctgttttttttagcgtgggggaagttgggggagaggggtggatgcttgggttcctgaggcaggggtaggaggagagctggtggggacatgtctgggaggtcaggtggatgtttaccaatgaggtgagcagcaggtttgagggtgctgtgggcaagatgcatcttggggtgctgacgggcagtctgggcagctgaaggtgtgaggccaacaccagggagcccctaggggagaacagagttgaggggggctctagggctcaaggtttggctgagccaccccagcagcccccattctcctgctgcctcacctgggccccaggcagcagaaccagcagcagccccagaaggaggaggtgtagggtggtgccacacacccttgggaggaagagacgttcaggtggtgtcatggggagaacctgcagagaaagagagagagagagagagacagtgagcggggcggggcacgcggcggaagacagacctcccgccctgggagacagcaccccccgacccccgagagagagatcgacagagaaggggacaagatgcagtcagagaaaccccaaggtgagcagagggagacagagagagacaggaagggaacagagaggaatcatggcagaaacagagaatgtgtgacagagacaatgagactgacagatggagagtcagagacagagaaggaaaccaaaaccaaacccaccaaggcccaggcccaggcaggccggggatccaggcagcaggtgcaggagggaccgaggcccaggcagagggcaggacactgctgggcggtagtccaaagcacgaagcacgggcagcccaaggagatggggcaggagagcctcacctgctgtgcggagcccctgggcccggacgctcaggtccctttatagaggaagcggcagtggcagcgtggcaggcagcgggcgggttctaggtcggggctggggcccggggaagcccccagggcttagaagatactgctgtttcagtcaaaggcaggaaaggctgaggcctaggagagaaccacaggctgggggttcaggcgactgagttctgggaaagggagtcgggtcaggggaatcgtgggctgggagggccagggagtggggtcaggcctagagttccaaagaagggacagtcaattcagagaggaggtggttgagcagctggggtgtgagctggaggcccggttccctgaagagcaatcatatataacatctctgcacccttggctgagtacaggcttctctctttgcccatttccttctcttgtacccctgtccttgtcccaaacaactcaaatcatacttgtcccagtatacggactttccagcccatctggcaggtttcacatcaagaaggtccattatatatccccttcatcggggacattctggtgtttgcctcttgtccaggtgaaaatattaatggatcccccttccactcttgaaagtgtcctagtttggaagataaattttttggtccccttactcagagatgatgctggacagtcaagtatgatgaggtctcatctcactcctgaaggatgccctccatctcttcctgacttcaggtggcttccacagaacagatttatataaccccaaataaacacacattccaggatcaatgtggcagacaccttccaaagttttctacaaaggaagtttcagaattccacatgggtgaggcttaagggtggtgacttagggtggggtggggacagctaagggacttgttctgaagctgcatttgcagagccaatacattattttaaaattgttccaggcctggtgcagtggctcacacctgtaatcctggcactttgggagtctgaggtgggcggattacttgaggtcaggagtttgagaccagctggccaacatggtgaaaccccatctctataataaatacaaaaattagccaggcgtgctggtgcgcatctgcagtcccagctactcgggaggctgaggctggagaattatttgaacctgggaggcggaggctgcagtgagtcaagatcgcaccactgtattccagcctgggggacagagcaagactctgtctcaaaaaaaaaaaaaaaaagtttccaaaatttttttcctttttattgatatgtaacttaggtatgaggtggacacctcttaagtgtacagctgatgaatttttccatctgtatgtagccaccacccagctccacgtattttcaggtccccagcaggttccctcatgccccctccctgctgataccctccaaagataaccaaccactctctcacttttatcaccatagattatttcctcctggtttggggcatcatataaatgaaatcacacagaatgtactcatttctgtttgacttctttcagtcagcattatgtttgtgagattcatatacgtggttgtatgtatcagtaatgtttttaaaaaaaattatgatgtaatattctattgtatcaatatattctaatatattctgttgatggggatttggtttgtttctagtttttgtctaacacaaaaaatgtctaacacgaacattctcatacatgagcccattttcacttagcttgcaagttacaaggtttaaaaaa

SEQ ID NO: 29 - DNA, 900 bp, Homo sapiens
cagtctcaatgggggcactggggctggagggcaggggtgggaggctccaggggaggggttccctcctgctagctgtggcaggagccacttctctggtgaccttgttgctggcggtgcctatcactgtcctggctgtgctggccttagtgccccaggatcagggaggactggtaacggagacggccgaccccggggcacaggcccagcaaggactggggtttcagaagctgccagaggaggagccagaaacagatctcagccccgggctcccagctgcccacctcataggcgctccgctgaaggggcaggggctaggctgggagacgacgaaggaacaggcgtttctgacgagcgggacgcagttctcggacgccgaggggctggcgctcccgcaggacggcctctattacctctactgtctcgtcggctaccggggccgggcgccccctggcggcggggacccccagggccgctcggtcacgctgcgcagctctctgtaccgggcggggggcgcctacgggccgggcactcccgagctgctgctcgagggcgccgagacggtgactccagtgctggacccggccaggagacaagggtacgggcctctctggtacacgagcgtggggttcggcggcctggtgcagctccggaggggcgagagggtgtacgtcaacatcagtcaccccgatatggtggacttcgcgagagggaagaccttctttggggccgtgatggtggggtgagggaatatgagtgcgtggtgcgagtgcgtgaatattgggggcccggacgcccaggaccccatggcagtgggaaaaatgtaggagactgtttggaaattgattttgaacctgatgaaaataaagaatggaaagcttcagtgctgccgataaagatgct

SEQ ID NO: 30 - protein, 244 aa, Homo sapiens
MGALGLEGRGGRLQGRGSLLLAVAGATSLVTLLLAVPITVLAVLALVPQDQGGLVTETADPGAQAQQGLGFQKLPEEEPETDLSPGLPAAHLIGAPLKGQGLGWETTKEQAFLTSGTQFSDAEGLALPQDGLYYLYCLVGYRGRAPPGGGDPQGRSVTLRSSLYRAGGAYGPGTPELLLEGAETVTPVLDPARRQGYGPLWYTSVGFGGLVQLRRGERVYVNISHPDMVDFARGKTFFGAVMVG

SEQ ID NO: 31 - DNA, 209612 bp, Mus musculus
  misc_feature (1)...(209612): n = A,T,C or G
cttctgtcctctctgtcccacctccctacccacgtttattcccactctcacccctggtccttgctctgaactgggattcaaagtgtgcagccctgcacctgccttttttatgtgggatctaactcaggtggttattcttgtactgcaagtcctttactgagtaagctgcctccctagcccccaagtctcatgttaggataactgcacagtttcctaggaggcacgcccctccagctaggactgaatgaatttatgtagagacataccttgttggccttcctcactggctgctgtcgaccttggaaaattgcacaattgtgaaagtgttttcttttcataaagccctttctcacctcttccttccctctcaatattctagacttcatttggttgtcttaccacttcttaaaatatttgacaattcttgctaatactctgaaatacttctctcaaagataatttgcataaaaatgttgagagggagaaagaatagtagtttaactacccaaaggcattctatcatcattattttctactctatctaaaaaatacggtgtatatttaagatattcaacatttaaaaattgtgtgtgtacatgtgtgtatgtgtatatgtgtattgtgtgctcatgtgtatatatgtacatatgtgtagtgtgtgtatgtaaaatgacaatatcagcatcattcatcatctaccacctggttttgacacagaatttcacatttgctctttagtacagcaggctagctggcccatgagcctctgcaaattctcttgtcttccactaaatcactaaaacaccactgggattacagatgtctgctacagcatctgactttacgtgatttcgggtcctgaattcagattttcacatttgtttggcatgcactttatccatgaagccatttccccagctaaaatatgatgcacatacagagatatacttgagcaccaggaaagtcaagaaaactagcctactcattgctccaaggcttcccataatgatagcttttgtccattatgataagagctaaaatgtgtcttagcaatctctgtctgctgtacagcatcactactcctgtctttatgccgtaccttagatatcttggctcgttcatcttctatgactccaagtttgttcccttcaatctacttctttccatgtacttctctgtcctctttccattgttagtttcctggaatttctccatttaagaagggtatagttttcataaaaccaaaccaaaccaaaaccaaaacagtaacatggtagagagtcaatcttgttggaacagcccagaggaagttattttccctcaacagaacctctgtagaaaggaaagaatttgcccaagctgactttatggcatttccctgatagcttatgacctctccaatttcagagctttctgtcagcatgggtttctggtctcctttatagatgggattaatgtgtaggagtgtgaactcaagcgtagttattttcctatctcctgaagaagtcattctgtgaagaaatgcttctttaggctaaaacgaagccaaacaaagcgagagctcaaggcaattgataaacaggaatagaatagagtcacagccagtgatgcccgcttctgtcctttcctggtaccagactagactccctttgcctgtgttcaccagtcaagtcctgaaactttcctgacatgcttttccatctatagaaaaggaaggagaaggtatgcaaggcagacacaatagtactcttgttatcctaggttcttttccaaccacaggtcctgacacagaaggtctagggtgggtcccagatgctttattgcttctaccaggtgatactggtgtggtcttgtgagagataagaactcagatcaaagcaccccagactttgttgagagggagacttatctcctgagcctgcctatctatctatctatctatctatctatctatctatctatctatctatctatctatctattgctttctaccccgagggaatcagttacgtgcatctacattagaatctagcaattctacgtttgacacttgtatcaagattctattgcagttgccagctttcaggagttagtatacaagacgagcgtagctctacccggtctgcacattggaaccacttgaaaagatttacaaacaaatactaacgtttggaggttcctttcatgaccaaaccaggaactccacgcatgaggtccagaatgagcaactcttatgctcctcacttgaagctccttgactcaacgtggactcaagactgagacgctgtggtcattgtctctacagacacgtacagttctttatacttgcttttaaccggtaaagtatgcacatgaattcatgtggccaccatgatgtcttgatgcatgtatgcatggtaggatgatcaaatcagtctaatgactgtcaatcacatcaaatatgtgtcttctctttgggataaggacatcaaaactcttctctcttactacatttaaaaagaacagtgctattaactcatcttgcaacaaagcaccggagactacacagtgcctgtgcctacttcctgtgctcttttactcacccttctcctttttgagcctctggacattttttctcttctttctctccaaagtttttcgcatttcttgtggctcccagaaaccattttgaatcaaatatttggattttaagtttctaagcttgagggcaagttgattgtgttgttccacttctatcttagatgaagccaggttatactttcaagccccaaacctttgtagaaatctatctaagcacctgctgatgaacagaattgtagcttctcaaatcccagcctcctggctgacaattatgcctgactcttaggcaccacacaagaaccatatttgtgtatttgagccttctggaagtgacatgtttgcaaacatctcaaagagctggataccaaggaaagttcaatattctggaatccatggctttgcatgctatgaaagtgaggacacacttgagctagactccctgtcaagattggctgctgcttctgcttctgctgctgctgccactgctgccaatgatggccacttagaattctgggaattttccctagccatatcacgctgaagacagtctaggataatcccaccttctagattctaacttgtctcctttactgtgaactagacctttataatcaaatttccttcacccactctgctttaaagctgaaagaaattaaacatttctgggaaataattttaattagaattgctcttgttcttaatatttattaataacaccacatttctcatttgttaaaacaagaaatgtatgacttcaggaagacagtaatatgaacattttgtatacacacagtgttttgcctaatacatatgcaaatttataaaatgggctcaataacttctaacttagctgtgtttatttctcacttgctatttacttgtaatttacctctgcctgagataaatgtgcaggattcagtttgtaggtccaacatgaagaagtgtttttgtttttgttgttgctgttgttctgtgtttgaacacatgggtgctcacacacagcctcctaaacacactccttgctgtctctgcactcacagcacagttggaaaaaaaatcttgcaaatagtacgctataatattgcatgaagattttttgctctaatagtttatgaagattttgcttatattactcattattagtctccataattacccagaggggtgcttataactattgctaatttgtatatgtgaaactgatagtttaattgaaatccccaggttttttgtattactctctcagtaatgttgagactcaatctggacgtggcaaacggatgatcagtaggattttgattgttgtgaacgtttaccagttgatgacttcttacatgagcaatatggaaaatttgttcaattatgctttttaataaaatgttcagaaatgagagtaagagttcttacagttgtcctccataaggccagagtcatatcattaagacccagcaggagggacaggaaatggcatagtctaattactttactctcatagtctaaatggctagtctcaagtttgaagcacaaagacaaacagaagacacatctcccatactgttttaaaagtttatgacagcctttaaaattctctctgagttatctgttctgattggttgggtaagcaaacactaatgggtacctgggaaatatctaactctccatattcagtgctattgatgtaactcagtagatattttaaaaatggatttgaaacaatacaaaacatccattacccaattttggttggaacttccattttcttatccatgaacaagtctgcctccaaacaactaagaggagtaggccctccctgcaggttgctttgggttgtctcgtaattgacctgcttttccatctaaaggagagnnnnnnnnnnnnnnnnnnnnaaaattatttcccagaaatgtttaatttctttcagctttaaagcagagtgggtgaaggaaatttgattataaaggtctagttcacagtaaaggagacaagttagaatctagaaggtgggattatcctagactgtcttcagcgtgatatggctagggaaaattcccagaattctaagtggccatcattggcagcagtggcagcagcagcagaagcagaagcagcagccaatcttgacagggagtctagctcaagtgtgtcctcactttcatagcatgcaaagccatggattccagaatattgaactttccttggtatcccgctagagggggagagggggagaactggataacccccagaatgagtttgactatgtacatacctcagccaggagttagaacttgtggctggtgaatcaggaagatgggaataaggatgcttcctgggttaggtatcagggatgcagcatcagagtgggggtcctgcttttgttgatgggtttgtcatcacatagagatactagtgagtgtgtaaagcacaccaacccctggagggtagcgatagctgccctgctgagctatagtcttcaagatggtccctttgaagagcaggggaaagtggttgagcagcagcagaaagatatggcagagccaaaatggaagaagcagagctatgattctaaacctaagaggtgttttgaaacaggactcttgaggatgtaggttggtcggcaaagccatgggagggttgctttaggcaggctttctactgattcagtcaagtttagcacacttcaaaattgaagcagatgatgaaacagtacacatcatggtgtaagtgttgttaaggaaatgttgcggctgtgtctttgggtgtacacacacttcatgtgcatttcttatcctgtttacaaaaagctgctttctaagcagtttctgggaggagaaaaagcccagctgagcaagcaggatggtttcaaccgtgccttttcttttttaaagcacatggaatccttgttcccaggacattgggaactttctcaatcaataaataatatattatatagcaaatttaaaaggtttttaaattggcaattaaagatatacattctgtatatatttatggtaaataatatattttagtatatgagtgcattgtagagaagctaaatcgagctacttaacacatgtactacatcacatatctttttgttattgagaataaaatctacccccttggggactttcaaatatacaatgtattgctgtaactatggttgccgtggaaactgtagttctctctaacttacaattgctaactagttttgtgtcctttgactacatctgtccagttaccctacccttttggtccccggtaacttaccaccatttttttctctctgttttgtgtgtttcagtttggtactttatatgaatatggaacctatgtaatatgtaaatgcaaaggcaaatgcagtatttgtcattgacttattttacctaatgtgatgcccccaaagctcacccacattgttgccaatgacagggcttcctatttttgaagaatgcatgttattccattataatattattccatatatattattccatatataatacgttctgtttgatctcttgtatattgtttgcaagtagaggatatgtgtgagtgggggggatgtgtgtagtctccactgactgtgctatcgaggaaacagagttgaggttctcctgaagtgtttgataggcaaaggggtacaggaaaagtaagagtaaagagttagcattgacagtgagcgtactttgggattgataaaggaactgacctaaacctaacagtgtgcactttaggaagaagggtcaatatgcttgtactagaaagaggggtgcttataagtctggggttggatttgagatctgatgatgtaagcatctgagctgcctgagttgcatgaagagacatgatatttcaagaagatgagttggtgttggtttgaatatgagactgagaatcaggaagaatcgcagccacacggcctaccgtggctttcagtcaccgagtgcgattagatagatcggagagggcaacctaacctgggctaagagagaaaagaaaatcacttctgactattataattgatgccatgtataaatgaagacaccatgcacttaaagaagaatttatgctttctgactcatctttgcaggaagcagctaatcttcctcatcatgctaactgcgttctctgagggatactgttaactattctcataatgaagacttaactcaaatgccagtgtttttttgttttaaagtgcaccaaagggagaggagtatctatttttttaattaggtattttcttcatttacatttccagtgctatcccaaaagccccccataccccccctcccctacccacccactcccacttcttggccctgtcgttcccctgtactgaggcatataaagtttgcacgaccaatgtgcctctctttccactgatggccgactaggtcatcttctgatacatatgcagctagagacatgagctctggggggtactggttagttcatattgttgttccacctatagggttgcagatccctttagcttcttgggtactttctctagctcctccattggggcccctgtgatccacccaatagcggactgtgagcatccacttctgtgtttgctaggccccggcatagtctcacaagagacagctatatcagggtcctttcagcacaatcttgctagtgtatgcaatggtgtcaacatttggagactaattatgggatggatccccagatatggcagtctttagatggtccatccttttgtctcagctccaaactttgtctctgtaactccttccatggaggagtatctattatccttttgtgttttctaaccttatgtgcagttaagtgttctttaatgtacactaggaagagtttggacaaatgcacacacagacacctcacaatacggaacagttacatctcccagacagttgttgttgttattgttaatttatattatttatttatttcaccccaagtgttgtccccctcctagtcccccctcgccgagttcctccctctccctctcctttggctcggagagggcatcctccctgaatccccacaccctggggcatcaagtcttcctaggattaggtgcatcttctcccactgaagccagatgtggcagcccctcaaaagctattattatttttttctccttcctgtagtccctctactcctttcagaaatcattgtcatgggtagttagcatagacatcaccttaagctccatcacaacagcaatgtaaaaactgctgtgtgaccccctgtcaccactgccattgccaccatagctttgtctgtatttacgtttcatatggatgatctttttttttttttttttctgccaccacgatttttaagttaacctacactgtggcacataccaggcgcttgttccattatagattgaagtggttgtatgaatttgacaccatttaaaatccattctttttattggcagtgtttccagggtttgactacataagtgaatctgatgtgaatggttttctttcctcttttaatgttgcttttccttttgtttatgtgagttttcatttcacttgggtgaacaagtaagatggacttttggggttacagatgtatatttaactttacaagaaattatgctcagaactgctcatagcattttatatttttataacgtcttatatttatatcaaggtccagtggtcccattttcttatcagtgatgctagtattagcctttgcagctactctggcagatgagtgcggggccatcactgtgctgttagtttgtactgtcttcatgtcttgtgagtgggctgtggcacaccttgagacaaccattcaagttatatccccagcgtttcacaggaattctctatatattctgggttgactttagctatccacattgtggatattttctcccagactgttagtctttttttttttttttttttctcaacagtgttcttggatgaggggtttgatttacatcttgatgtgcccaatttatcaatacttttttaaatgttgattgctataagttttatatggtaaacttttgtcttcctcaggactgctaaatcccctcttgtgttttcttctttgctactttatttatgactttcacttttgttatgagatctgtgacctttgtccccttagttttatgtgacttggctccatcaccccatcaactgtccgtactgggagtcttctcaggatggatggctaaaaaagcatctgtaaaggatttgtctttcttctactcatttttggtcatgattgctcccacaaggcatttcccatcacattcccaggtgatgaccctgggcttaatttagtgtctattctctagatcattttgattgttgatttacatattttcttaatatgtaaacttgataagaagaacacagagtatactcttttaacttttattccactctgatacctgactcagaggtccacctttcacacagaaactatcacttagttgaattgcatcattgtttttgggagaactgattctgagttaggatttcaaacctgctgcttacaattttttctatttttagattctacctgaagaggagcccaaaggagattattttaaactatattttaaaagtagactattctttgtacttttaaagttcttttaaagatgtttatttaaaataatttttatttatatgttattatttgaattcattttcactttattatcatgagaccattaacattgttaaagttgcagccaaaaactgttgttttttcaaccttagttaatatccaaatatacattttgaactaattttatgcctaaaacaaacctacttttctgcgtaaaatagagcagcaatataaactacatatatttgctaggttctatgtcacatggagaagtgatagattttaatatttttttgatatttaatagattttgaatgattttatttccaaagaggactctttaatgtttttttttttcagattagatttttcaagatcaagtaatataatgaacaaagaatttgtcccatcaaatcatatttgtattaatagcatttttggaggaacattctcaacttgtctctgttacaacatcaatattcttaatttgtggaaaagagactccagcctatctaataaatgaaaacatgtttggtcatcattactactgaccactaagcacactcttccattagactcttgactgcaaagaggtgccttacagtgggttcagtgggaatttctgtttgtgatataaagcttggggttattgaaggtggggtcattggtcaccatgcttagtggattatgacacatgctatattattgtcttatagaatatagctatttcatctgctcatcttataaaattttccattttgatcacttgaaagacaaaggttgttcaataaagctaagtaattctctctttcttctttagaatcaagtttcttactgggaaatgcccaaattgtggactggcctgtagtttatagtaatgacggtttttgtaaactctctggatatcatcgagctgacgtcatgcagaaaagcagcacctgcaggtaagtggatccaacaactctgaaatcttttccaaatatgaacaagattctgagagtggtgagaggtttgtgtttacttatactcaagacaggataaaattaggtcgaagaagtaaaaaaaaaaagatttaattgtgaacagcaaatatgaattttaggagctgatgctgataactttcgcaaaggagaacttttgcttatatgtgaattaattcactcattaaaattttttggttacctatcataagccaacaggtcgcacagctcctgagtgatgagaggagtagtcagtagtagggagctactgatgacattggtgcctctgaagcaattaaaatagcacctaacaaaacagaaaacctgacctagccaagtggcgcatagttcacaagaacgtaaaggcacaaaaatgaagcctatctattacactgagccaatcatatgcctttatagtgttgatacagtcaatccagctgagccaatcacatgtctttatagtgttgatagagtctatccagctttttgctttgttttatgtgaaacaatttgatattgtattagttatgacaactttaaaaataggccatatctacaagtttatggagaattatgataaagggggatcagaaaacaatcaaaaacaaagaagcctatgtataaggaacttattcaaaatctaaaacttttctatcatatttcagtaaggacagctgggaccctacccccatttcctgctaccacttcagtttttctttcaatttctcacttaactaagtgttggagtcaaattattttggaactgaaaagaatctggtctgttctttctggttcaagttctaagaaaacataggaggtactgtgttaagggacttgcccagagaagtttctgttctctacccacttatactaagatggagggtgtgtgtgtgtgtgtgtgtgtgtgtgtgtgtatgaatgatcttcatcttcatgaagtctatatctgacactacacacagaaaagcctttgcaaaacagattctaacgctcttaaacagatataaccgtagttagcagaaatgggaatgtagggccagcagttggaaagttaagccagaaacttagatgatttcaatgtttgtcaaggcttgagaaacaatctgttcacacttcctctccccgtcctctaccagacacactcattttttcactattgaggttgtccctacattttgtctacactccaaagaatgaagtagaagaatgaatgaagatattgaaactgtggcctgggatggaccacacttttggtagtgtagcactgatatcttttcagcaagggtagacatttgaactttgtgcttaaaaaaaaataaataaaaaacaccattcccccaccatagaccactaagggtgtgttcagtgctctgagatgtggaagattggttttgtgcgacattgtttccatgtgttttcaggaaagtttaggttaggaaaagggaaagctttctggtcagccttatcatgtgggacagcactataatgagcccaacagagcacagacgcttccccatctcttcttcttgaatggtcagtagctcatttgtttgtgccagatgcttttttttcacccaagaagatctataattcctcaagtaaggtatgtttgtcctttatcggattccagatagttcatgtgtgcatctttatttgcaacttcaagttgttttaaatgaacttgccatatttgtgtgtgcatgtgttatgtatgtatatgtatgtgtgtgtaaaatgtgtgtgtaggtttgtgtgtgtgccagtgcctgcatgtgtgtgatatgtattagtatatgtagacataagtggctgtgcttgtacatgtggaggccaggggagagcatcctgtgtcttcctctattgctgttcacccctccctcccctnnnnnnnnnnnnnnnnnnnntccctccctccctccctccctccctccctccctaattacatgcttacatgtaaattaactcacccattaatattctttcttccttccttccttccttccttccttccttccttccttccttccttccttccttccttccttcctttctttctttctttgtttcttgtgacaaggtctttcactgaactagaagcttactatttcagttagggtacctgaccaataagctcctgggctctgcttgtctctgtcctttaacaatggggttacagatgtgggcacctatacctagcacttacacgggagttggggatttgaaatgaggtcctttgtgatcttactcactaaatcatctcaacaactcttatgggggggggggcgtattctgattgctttaattgttttttttagaagactggctattgccttctgaatcgctctccttcccgtgggctctctcccacctctgcagttttgagagagagagagagagagggagacagagagggagacagagagagacagagagagacagagagagagattcactatgtagccctggctgcaccggaactcactctgtagatcaggatgtcctcagactcagggatttacctgcttctgcctctccagtgctgaaattaaaggtgtgcaccaccatgtctagtgctatctggatatctcttaaattttgctttccttcttgtgtcccatatgcttgtcatatcccataatgttttatttggtaaatgtagtgtttttttcctacaggcaaaggattaaaaatgcttgtgcatcatatttatacatcttttattgttctaaaatagttactttctccttcatgttgccagtgtcaggagaagtcccttgaaaattagggattccatcatacttacttaaaaaaatttaatttgttttatatcatttatttattcttccatccatcgttcggtctgccggcctatgtgcctatctctgtctgtctgtctgtctgtctatctatctatctatctatctatctatctatctatctatctatctgcttatctaattattttgtgtgtatgtgttatgtgtcatggcatgattatggaggtcaaggtacaacatgtgaaagttggctccctacttccaccatgtaagctccgggaattgaacttatgcagccaggcttagcatgtgacctttctcactgagttgtctcaccagctcacactcacttttgaatgcactatgtacacaatacaagagtgtttattatctgtctttgttaaattatattgttttgctttgcagtaaattctagcataggtctcccatgttcctgcagagcatgcttttatttatggcatgtcaccccgagtgttaaagcgtttcaagaaatttgggatgatttggactttcccattgcgagcatgtcttccctcaggtctcctgcacctctgagagacaatctttcagaaatggctgcattttgaataaacagcctttatgcacttatacactaaatatgaagtgtgttttgcttatctaaaaactgcagccatttaaggcctgttcagagtagctgatgaaggaacagactatacctcagccctgacagctttcattggaagtatgattgtgtaaacaccattccattttgaattttctctttccattttaaataacagacaaacaaagaaaaactttacccattttgggtggactgcaccattaagagtgaagaccaagaaataatcagaatattgagttgtaggaaatttgtttaaaactattatcacgaagtcctaacttcctaaaccacatatgttgagagcacaacagtgaacaaagcaaataacaaatttcaagacaaaaagaagaccacaaccaaacaacccatatatgtattagacaggatctgtgctgtgagtctaatttttcacaacatgcagttttctctccctatttcttgagtaattttataaaatcatttggacatgagatgcaaggagacagaggaaggggagaagaaaattacacccagatttagaaacataaggttggtgttaaaggtcactacattatcggcagtgattccagaatcattgaattaaatgtgttgatcagtcacttcgcacagccaaggctttgaaaagaaatcaaactattttactggtttctggatctgtgcaattctttttactaatctttaaagttagcatacaaaggaaaggggttcattatgacattttcacaggtactgtactttcactgtactttgttatctttctgtctatctgtctatctatttatctatctatctatctatctatctatctatctatctatctatctatctatcaatctatccatttatccgcccacccacccacccattcatttagtttttacttattcactttatattctgctcactgacctcctcccattcacctcctcctataatccttccctccatcccacccctcttctcctgagagcagctgagctctcctggatatctccccaccttggcacatcaagtctctgggggggggtaggcacatcccctcccactgaggccagacaaggcagcccagctagaagaacacagcccaggaacagccaacagcttttggtatgtccccccctctagttgtttggaacccacatgaagaccaagctgcacatctactatgtaactgcagtgaggcctatgtccagaccatgtatgctctttggttggtggttcagtctctgagagccccaagaggccaggttagtttactctgttggtctttctgtggagttcctatcccctttggggcctgcagtccttcaccctgttcttccatgagagttcccaagctctgtcaactgtttccctgtggatgtctacattggtttgagtcagctgctgggtggaggacagccatgctagattcctttgtgcttgcctatgagatgggtctcaagttgggctgattattgtttggccattccctcagtccctgctccattccccttccctttattctttatcttcctctcccgttgtcttccctcacctccccagctcctcctctctggtccttttcctcagacagtcctccctctgatttcaggtcacaggtattctgttactctcctttctatcacctctctgttcagcgcaagaaaagaattgataataaaacagtatcactaaatctggaaaggaagatgacataaaatttctttccaatgatgcaattcatcagaagagtgggtcttgaggccatcagcaaaaacagtacaatatgtagggtctaaacatgtttttttttttttttttactgattttactgattacttttattcaaatgtatgaaaataagaagtcagtgactcacagatcagtgagtctcagctatgacactgtgtagcagagaaaaggaaccgcgtggtgtgcgttatttgattatttgaattgaagtcagtaggattaggatgatgatgagaaaaatagtggcctatcataattttaaaacactcaaatgtaaattgctctataggaaaactcttttaagaatgtcaaattattattattattattttggtgtttatccaatatcaagagacagatttgtttcatttgccttctaaagtttttttttttttcatctattgcccaacttctcctgcactgaactgaatcaaaataaacacagttctcggcttgtctgagtgtctttcctttttcaaaggcttcctttcatccgcccctcgtgcttgtcttcttcctaagctttgcctcggatgttcatggtgttttcctgcgagtagcatccctactcatttgattcttgagctggagttgctttcgatatgtccgttcctaagagcttcaggcttgcactatgaagcactattggttacgaagcactattggtgattctgactatcttcttccaccattatgacttggagacctctttaagcttctatgtcacattccacttcattgggattgactgcagttgagtgactgtcacagcctttctttcagttatccattcaatccatgacattcaatttcccatactttacatctcaaactaattggagatgagcaaccttatatacatcacagttttgtgtgggagaaatactttatctttgagccagaaagcatatggaaggaggcagtatagtatgcagattctgtaagggacccctcacatttgctgcctagagagcccgtataacttcacagtcctcagtcatagctgaggcttctggtttctacctccttgttgttccctaacacacaacactcttttacttttgttttcaccagagtaaaacaaaaaattattctatgacatatcaggattccaaggaatttccaacttattttgttttataatttagtaattgaatttccaagcatcagattgtttgctgtatattggtggatacaaaaagtattggttgttcaaaggatgataggttttaggggaggaagttctggcattcaaaacctgctgtcagggcttaggtggggaccactacagcctccatttctcattagcctgaaactttggagaaatctgttctgcttttgtttctgggatagtggggcagaagagcagttgtgtaggctaggtgggggggggggtgcttgaggagcagcagatattttcaaaactactgccatccattggaaagccattcctaatcctaacccaagtcatcatttgacatcatagacagcaaagcagagatattaagtagactgtgagattccaccagctcttatgcacacaagagtgcagtggacatgagggatggaagtcagtgcattctgttgacggatgaccctgcttctcactgagccactgaggaaaattgtagaagggaaactgtaggggtatctagtactattctgattttccttaattacctgccatggatctaacatttaggactctgtctaaattctttgaagggaatatacataaatgggttgtagaaacctttttgttaggacagactgtataaagcaaaagccttcaaattctttttaaatgacttctttcagatgccaaagatgttgattttgtttgagtttttagcttccccacttagcgctctctctctctctctctctctctctctctctctctctctctctctctctctcagagctcttttgttttcttcttctttgactacatatctcagtttatgctccaccctgactctgcagttgcaaccatttccaagctgaaccccaatgcttactcacagcataactcactctgttggttctttggtgagacgtttgttgggatgtagattggtctgcacacacagacctttgtgagtagtgcctgtatgtttgtgatgcatttgtctagggccatttctgccaaaggaaaagcaagaccagttgatggagcccgtgattaggttatttatttctttacttttagagttacaaagttctgtcctctgttggaagtctatcaatcttacagttatcttggttgttaaatacaatgagaactgtttacaagatttccagaagagaagacaggatgcaagaataaagagcttctgctatgagctaaagccacatatctcaaagatgtgcttagactgatatagatagaagataagcagatgctgagtcaaacctggtcaagcctggaatagttctgaagagaattttccccctctagtcaaagcttaaatatttttcccaatttttttattagatattttgtttatttacatttcaaatgctatccctaaagtcctccataccctccccctgccccctccctgctctcctacccacccactcccacttcttggccctggtgttcccctgtcctggggcatatacagttggtaagaccaaggggcctctctttccactgatggccgactaggtcatcttttgctacatatgcagttagagacataagctctgggggtactggttagttcatattgttgttccacctatagggttgcagacccctttagctcctagggtactttctctagctcctccattgggggccctgtgttccatccaatagctgactgtaagcatacacttctgtgtttgccaggcactggcatagcctcacaagagacagctatatcagggtcctttcagcaaaatcttgctggtgtatgcaatggtgtctatatttggaggctgattatgggatggatctccaggtgcagcagtctctagatggtccatcctttcgtctcagctccaaactttgtctctgtaattacttccatgggtgttttgttcccaattctaagaaggggtgaagtatccacactttggtcttcgttcttcttgagtttcatgtgttttgcaaattgtatcttgggtattctaagtttctgggttaatatccacttaccagtgagtacatatcatgtgagttcttttgtgattgggttacctcacaggatgatatcctccaggtccatccatttgcctaggaatttcataaattcattctttttaatagctgagtagtactccattgtgtaaatgtaccccattttggaaaaaagacagcatattcaacaaatggtgctggcacaaatggaggtcatcctgtagaagaatgcaaattgatccattcttatcaccttgtactaaggtcaagtctaagtggatcaaggaactccacataaaaccagagacactgaaatttatagaggagaaagtggggaaaagcctcgaagatttaggcacaggggaaaaattcctgaagcaatggcttgttctgtaagatagagaatcgacaaaagagacctcataaaattgcaaagcttctgtaaggaaaagacactgtcaataagacaaaaaggtcaccaacagattgggaaaggatctttacctatcctaaatcagataggggactaatatccaatatatacaaagtttaaatcttatccctgtgttcaaatcttatttaggagcaggctgggctaggatgtttgcttcaccctcatgggtttacatgagaggaagtcacagaacactgtgtgtctccctgttagctgtagtgactccatcttttagtaaacatgatctgatttgcatccttggatgtgggaaagcaaagaaggagagctgagctgtgggttttccagccatcacatgacctgttacaattcatgattccatgagtattatccttttaatctttacctctgaactattagcactattatcattttgatcagagaggagaggtctgatgactctctcagcaagtatagttttacaggtggctgtctaagtgcaggtgtccactggtataacggctcttggtaccacaggagagatgggtcactgctgtgagaacaattccattttccttccaatgaaataaagtagaagtcagttgtaattcctaaagggcagtttaacattctgtatgagcagaagttatgtagcataattgctacttctaaagtgtgagtccctttaaattccattaaccattggctgactgcattggattttgtcattctaagtcagggcttgaaaaattgtgacaaaatggtcagcacctgcaagcaaaatgagcaagcacacaatcatgccctatccacatagcgatgtagcattgtctgtcagtatgatttgggcaaactttagcagaaatagctatgtatgtatgtatgtatgtatgtatgtatgtatgtatgtatgtatgattgtaatttattacatttttatttattatattagttattaattgtgattaaagtggaaggatgtctcttaatgtttttgaatttctgatagccagtggcattgaactcttattttttcttcacgtagctgtggagtcatgtatttctttgcttgaacaaacaaattcaggtaatttgttcatttccaatttgattcgattcttggttgagcattttaaattctttatgtgttctgaatgtaatctcttgtcagatggaagcagttcaggttctatagctcccatcactgttggcttgcagggatttctaccgttcctcttgttgcctctgctttacagagcctcacccaggccattgcctgtgtcaaggtcttcaagtgtctctgctctgacttccagttgtttcacagtctcaggcttcaagcttagtgcttacaaactgttttctgttgatttgggcataggctgggagaaagaaatgaagtttggttcttctgcatatgcatattgaggttccccaggtttttttttttaattaggtacccaggtttgtttattgtgtatactctctaatgtatttgtgtgtgtgtatgtgtgtgtgtgtgtgtgtgtgtgtgagtgagcatgtgtgcacataactcagtgagtgagtgattgtatgactgtataagtgtgtataagtgtgtatgtctgtgtgtgtgcatgtgcatgagtgagtatggtgtgtgtgtgtgtgtgtgtgtgtgtgtgtgcacatgtacatgagtgagcatgtatgcatgtgcctcagtgagtgagtgagtgattgtgtgagtagttatgtgattgtgtaagtatgtgggtgtgtgagtgtgtgtgtgtgtgtgtatatgtgagtgttttagctcccttgggtatagacattttctatagatatatgaacttatttctgaagtctctactctggtcccccggtgtgcatgtcagaatttatgtagtacctatgttgttgtggctactgctgtcctgtagtgtatattacaacctctcattgtatttggctccagcttttgatttttttttaattctcaagatgcttttaaatcatggggtatagtgtgctttcttatgaattagaggaaaattttgtttctgttagaatggcagaattgtgatagaagcttcaagacagttctatattttgttgagtcatatggacatcatagcaggattaattgctttaattcacacacatgtaagatctttccatctgagcatgtatatcttccaacagttattcatctgccttttacagtttccattgtagaggtcatttattctctgagattaatttgctcccaggtatttgatattttcaacagctattataaatgagcttgctttatgattcttttctcagcaagttcattatagcacataaaattactcatatttctatattgggtttatttcctgaaactaccaaatttggctatcagacctgataatcttctgatggtgtctttcaattatggtttctaaacaggataatctgattctctttttgtctggatatcatatttctttcctttatccaattgctctgactaagaatgtgccgtgctctgtggatcacgtgagctgcatgtgttatccagattttataggaaacagtttcaatttttccctcccaactcactatgattttgctctgagaccattgtgtgtggactttttatgttgagttcatttgttctctttcgttgtttatctcggatgcttctttgatgaatgttgatgagagcgctggatgatcggtccattgatggaaatgagatgttgatgtccacagcagtcgctatagtataacctctttctttagatataacaatatttatttatttttttttgcacattgagtattttattgtattttattttttccgagacagggtttctctgtgtagccctggctgtcctgagactcactctgtagaccaggctggccttgaactcagaaatctgccttcctctgcctcccaagtgctgggattaaaggcgtgcaccaccgccgccaccaccactgcccagctttattttaatttttgagacagggttactctatgtaatccctttatgagatattctagcattagttagaagtacatgttacatcccccactgagtggattcccctcattagcccatagataccacctctctgtgactttctaccatttttgatttaaggtctgcttgctaagtatagccattgttgctcgctcacatgctccatctcagcccgtgtctgtaacttactgtgaaacagtaagttagttctacttgtaagcagcacattgttgggtcctgccttttacttcacttaggcaatatttttttttcctttggggcttctgatgtgtttgcatccaaggttattagcattatgtatagaactatttgtgtcattttctttgttttctggtttcaaatggccatgttgtagtctttggctctgggctttatctctgttgttttctgtgtgagtgagattcgattctttctaacttttatgtaactgctcttctagagagttttagtcttttgcatcttctcagagtggtacccatcattatttgctctttcactttcaggtgtggcttcccttgagcatcatcccgttaagggtgctttagcaatgatggattctctaatttttcctttggactttggtctcgtacattgtttagctcacctttgttctcccataacatttctcagagcaatagtcgaagttaacaatttttcccttctaacatttaatatggtgtcatattcccttacagtctattagttttctgctgagaaatctcccataaatttaatagtggtgaccttaaatgtgagtgaatgcttttatgtttttagaatctggaagtttggctgtgaaatgcaacagctaggatgtgtttgagtcaaatctatttcttgggctttctgggtctcctctgtgtctgtaactctccaagattaaggaaattatcagctttttctttgtcactatggaagtttcattttctattttctttattaagataaggtctcatgtagcccagcatggctttgaactcactatgtaaccaagggtgacctcaaacttctgatccttccgtttctgccctttgcttctggagtaccagataatgtgccaccatgtcctgttttacgcagtgctgggagaacaaagccagggctttatccattctagggacacattctactaactgagccacattccccatctctaactggaagtcacctaagactgaaagtcatcatattcttgagctacagcactcctggataagcacccagaggactctgaacccaccactgagagactcacccatccatgaatgttgatacaccactcaccatagctgagtaatgaaactattctcaatgtctactgatagatgaatgggtaaagaatgtgttacttatattcaatgggatcttagtcagccgtaaagaaaaatgaaatcatggcatattcaggaaaatggatgggtctgggactcatttgttatgggaatgggctttctgttctttactttccttccttacctcccggaagcttcataatttggccatttattcacttacacatgtctcataagtcttagaaactttctttgttctttctaatgatctttctcttttatttctgcggtgtaatagtggtactccaaaagctctgtctttaggttcagacatttttctgcttgatctagcttgttcttgaggctctggttcatctcttttatttgacttttttcatttttcatgtccgaggtttagaattggttccttttgatgaattcttactcatttcattaattgattttcctgtttcaaagaattatttaaattatcttgtatgtcattgattgtccttggaatcattcttttgagttcttgctcaggcaatttttcctattttcctttccctggagtcttgttggagaacaattgcactctttttgatctatcctgttaccttgcagtttcatactccatgtttcctcctgctgacatttgcatttctaggggatcagttctattgtaagtggtgcagcaatgtccatggatgggcaagtatctcagtggtggatttagagtcctctggtgcatagtaggagtgatgtagctcaggaatatggtgattttcagtcttagataacctccgtactagagatggggaatgtgcctccactactgagtgattttcatatttgaagaatttctttcctttcctttcctttcctttcctttcctttcctttcctttcctttcctttcctttcctttcctttcctttcctttcctttccttttccgttagactatattggctttggttcaagttgacccttacagctatggtctccaaacaacttcttcaattgcaataaatggctgtgagcacaattcactggaagcagggcatgaagcctgttgttctctgcagggctgccaggtggggctattctagcagccaaggagggtatggtacacagagcagtggaggaaaggtgcttacctagtggagtcaggcaacatttgtgtaatgtagcacaggaacaaaatgtgaggaccttgtgtcaatttttgtggaccatgttccagtgaacccaggctagaaggtccctgggcatgtgtggtatggttcccatggtaaagggagcaaggctcgtgtgtagtacagagtgcatctgttaagcctccagtgatggtatgtaggtggagccatccttggagagagtgtgcttcatgaccacagctcctcagtcatctaaagcagtgtaataggatgccctccccaaagactcagtgagacttcaagattgctcggcagcaaaaattcagggtgtcagtgttagctgttaaggggtctcctgtgtatcttttcattgtggtagaacgttccaaatataaactggtcttgccctgggaaatggggcagttgataataggctttggaccctgttttactcaaatgtctgccctcgtgccccacagtacttctgtttcatctgctctgcattccatctctttctggtgagtgaatacgctgtttgaatagtatctgttcttcccctgccccttcagctcttcctttctttagagccacttctgttgccactagctagccatcttgttgttggctttcttctaccattaacaatggaaagcctttatggcaagtagaggcttgctccttgatcctgtgtttactttatatgttctagccatatctaaaacatgtatctgtcccagacaccagcttaggaattcttctaggggtcacacttgtttatgagccatttttcttgtttgtgttgattgaaatttctctgaaagtgtaaaatctttcaactggtataccaatttcttatggtctcttctgacttcacttactttcaactgttcacaattattatctttcttttggggggggtggaatttagtatttgttgattaatctctacttcctattgtccatttttaaaatgttgcatggaagtaacatgaggagagaaaagaaaggaagcacagttatgtggtacaccatttgtatgaactaaatatacaatgcagcagttatcgatactgacaggctctgaaggacatgatgtgactgtttgcatctctagataggcagctattattgatgataattcccctttgtccttaggggatatgttctggggcccagggcattctggaaatagtgataagtgcaaatactgcacacctgttttctcctatacatccaaatcatgatgtttcattcataaactagagatagtaagattttagcaataataataataataatcacaaagaacaattataataatccattggattgggatgtgaccactctaaaatacatctttttttcttcgtacctttacttttcaactaatgaagtatcttatgacttctctttggaaaaacctgaatttgcagagtcattattattgtatttggggcccattattaagtaaaataatggttgctagaatatacacactgccgaactaaagtggctgatttgctaaccgagagtgagactgtctgggtagcatgtagagtgtatagactcgtgtagaatttgaatatcctgatcagggcatggggttcacatcactgtggtagatgaagcagggtggcaagaactttcacgtttagaatgatagacgactttcaacgtttgagttgtgtattctagaatttgtcattttatagtttttgatcatgcttgaccatttgaaactggagaaagcacaatattcgataaggggatgtgactggaccagtaactaaagtctctactgatgtgaaacatactgaaaagaatcatggtaattgaaattactatggtagtgcatggtagtgcatatggaaaccatttataaccaggaagtactctctctctctctgcctctctgctttgctatgtaagtaaagataactatcagcaggaagttttagcagcagtgattaaaacatggcttaatattttactgtctttacatatcctactacagatcacaaatttctagtgctacccaataagatttgcataaataatggcttgcatattttgagttcattgtgtggggacatcgtttaaggcaaaatgaaatccttaatcatagacaatggtgtgattgatctgtgacacagaaatgaaacaggcttttctcttccagttttatgtatggagaactgaccgacaagaagaccattgagaaagtcaggcagacttttgacaactacgagtcaaactgttttgaagttcttctgtacaaaaaaaaccgtaggtatttttgttaccaataagatgacctaggtctttctaaattttagtttgggaagtggtagctaagcaacaaggtagagaagattacaatgcttcattactgctcttggtgttgggggagaggttgctggtgaaattagattgaaaaattaatgatggttttacccttgaaaagatcctcttgaagaatggaaacaaacatggtgtgtttcattctactttcacaaattaattttaatttttagttagtgaaaaatatattatatggatgaatgttttgcttgcatgtgtgcatgtgtaccatgtgcgtgcctggtgcctgccaaggtcagacggtatcaggtctcctgggactggatcacagatggttgtgagccaccatgtggatgttggtaactgaactcagatcttctgcaaaggcaaaggagctcttaactgctaagccatctctccagtcccacattgttattttaaacattacagtgtttcatatttattggatacaaagtgaccctattacttaggagtgctatgtgaatacttaaatcaaacaaggaacactcaacatttcaaatatttactttttgtgataagaatattggaaattgctctcttggcaactctggtgtctgcagtttgctgttattattcaccgtattcatcatgctgtgcaatacatctcacacctagacatcgtgctgtgtacgatgatttttttattcctttaacattgttgcaaataccacaaactctctctccccccactctgtgtgtgcatgtgtgtattgtatatgcatgtgtatacgtgtatatatatttgtgtattgtataggtatgtatatggggtacacagattgtggaggccagtggaggacattagatgtcttcctccctttcctcctgtattccctggagaccagatctcttacttgagtttcttactttccaggtagactaactagtctgtgaaccgcagtcatccttctgtctctgtcttttccttttctcccagtgctgtggtgattcacacacagagccgtgcttggctttttgtgtgggatccatgcaggtccttatgcttgctcagcagacattcctacccactgagccatctccccagcccaagaaattcttttaaagacggaacagtattcacttcatatacgtacttcattgttttatccatttatgtattgatggacattcagatcaataataaattggttcctgtgaattgtagtgcaatgaatgcaagtgtgcatgttttgtagatttcaaatcttttgggtaaatacccagctgtgggactgttacaccatatggtggctttgttttaaaaattttaaattaattccagagtagggttttttgtagtgtctgtgctaatgtatgttcataaatacattattagaggagtcccttcttgcggttactacacaaatatcagtgaggtggatatatggttatttgttgtcagtctttacaaatatatgctttacatagacttgaactgtttcctgtttaagcgtgatgggcataggcgttatccccaggacaggacagtcacatctggtaaatatctgctgatattgtgaattgttctctaggattagaattgtacacagtctgttgctacttatttcatcacatagaacctcatggtacagcccctatttgggaaaaataaccaaccaacgaaccagccaaccaccactacatgcacatcctcaacaatcaagtcttctatttaacttgatggctcctttgcatggtcccatgaactttgtttctttttgctgctttctcaaatgtcttcctcctcctccttctcttctccttcttttctttcttcttcctcttcttccttcttctccttcttcttcttcttgatatgtagagtcccttcatagtccttaatcaagaagccatctctaaatgacatctgaatgcaaaggaagaactattttctccaatgtagtctctcactgggtatattgactacacttaggacaaggcccatgctctgcagtagatggcctacatgaaacannnnnnnnnnnnnnnnnnnnnnnnnnnnnnnnnnnnnnnnnnnnnnnnnnnnnnnnnnnnnnnnnnnnnnnnnnnnnnnnnnnnnnnnnnnnnnnnnnnnnnnnnnnnnnnnnnnnnngggtgggtatgaaggtggggtgggtatgaaggtggggtgggtatgaaggtggggtgggtatgaaaggtggggagaagctgagaagagttgggagaagagaaactgagatcagaatatattgtaagaagaatttatttccaataaacatctatatgtgtatgtgtgtatgtgtgtgcatatgctttcatgttaagtgacagcagtaactatatacatcttcagtggttgctatggtttttttaagtgtgggagacatcctcagtagaacatgctggttctaggttcgttgtatgttggatttcatggtgcgcagtttatccttccctttccttcgatctgttattctttatggaatacatggaattaaaatcagattttcttttttatcactagacccacgaaaggataacagcccccatggacattgcttcacagaagtgcatttggcaatggaatcattttctggttttacttatcgaaacgttcaacaatttatcttgaatttttagaaccaaggccaaaaagatatttctgtctgaagtcacactcagctgccagtgtgtcacacagaaagccatcagttctgaatgatcagttcttcctgctacgcaggctatacacattttcttggtcttcccttcaggctcaaatatttatttatgattcataggatgctcaaatgcccaagctcccttcattttcacagagatatttctagtctttagatgacttagatatatggcccaagtttagcaaataattgaagatgacttaccctcacatttaagtagaattaacaaatatttgctcaattttcagactttgtagccaagtccatagtttgagggtgtcaaaactacttcaatgggattctatttttttaaatttatttttaaacatatggaaaataatttgaaatttacatttttacaattctccttctaggatagttatggtttgaaatgatgtgacttttgttcacctctgcccgatctctttaaaaaaattttttttattaggtatttttctcatttatatttccaatgctatcccaaaagtcccccataccctcccccctcaactcccctaaccacctactcccacttcttggccctggcgttcccctgtactgaggcatataaagtttgcacgcccaatgggcctctctttccactgatggccgaccaggccatcttttggtacatatgcagctagagtcaagagctccggggtactggttaattcataatgttgttccatctatagggttgcagttccctttagctccttgggtactttctctagctcctccaatgggagccctgtgatccatccaatagttgactgtgagcatccacttctgtgtttgctaggccccggcatagtctcacaagagacagctatatcagggtcctttcagcaaaatcttgctatgtatgcaatggtgtcagagtttggaggccgaatatgggatggatccctggatatggcagtctctagatggtccatcctttcgtctcagctccaaactttgtctctgtaactccttccatgggtgttttgttcccaattctaagaagtctgcccgatctcttaagggaactgagtattgctatatgaacatctgtatacagctggtaggagacaggccctgctaccctgtagaaagctcctgttctcccctgtgtgctctttgcatctgtctttaattttgattttcctttaataagaaggatgagtattatcaatgcattagggtagaacacaagcattttagccagatttaaaggaatctcacaagtggtcatctcaaacagcttttacacatcaactacaaaaagagtgttgtgtgactttgaaaaatgttagatggggaaattgatatatcttctgaaggctggggaatgcctgaatgccaatccttgtccccaagactttcatcacataattaagttacagtaaacagcattttgcaaatggggcagttgaagtttctgatttactcagtcaaggttgacatttcagcttgtaacctttttaaaatttcttcccatttagtgtcctattaaaaggaggcatttcctattctggggaaagtttatctttggggacaaagacagaatctgtctatgttgctagtgcccagtgcccacgcctggtgcccaagccctgctctgggtgttgggaagaatacactctgtccatccatctcagactccttgtctgagcccattctggggaaagtctgagcctatgagctgaaaaaaattctaccttgatatttggaaacagcttttcagacagccctgtctctgccagaattccaaagtggctgtttcggtaggaaggcatgactgtggcatcagctcttcttgtccagatttctagcaggcccaggaaaaagaaaaggattttcaatgctttttttctttgtttataaccctctctacctctagctcaccaagttggaacagccacaggccatgaacacagcagtgtctggcagtggttatttgtaaaactgtatatcactcacagttcccagacacgctgtgtaagacgagagcaggaaacagggaggaagcctggctgggagatgatgggtttgtttccaagtttccttctcattctgcaatcatctcagaaagggctgtgtcctcctatggacctgttagagccacagagcctcaatggccggagttgaacattatcttataaatctctctgcagtggtctgggttctggagcctgctgagggactcaactcatctggtgtaaatggcaagttagcccttccatgacttaggtagattcctcaggtttagcaggtaatttaagagcactattattacagtgaccatttagacagaattgacagtggcattaggtgacccaggtttggatccaggtatgaaggaggttgttacttggttttcatgggggaccactaagatgctctaacttctcagctgcatcagctacacataacctcttctgcccctaagcatggacgatttgggggcttttattgctcttttgcttgataaaaatctgatggaaaatgaacttatttacttactatgtttttttattgtgatagaatgttctttcagtgtgctgctgctgtgtggataattattcccttgaggtatttttcatgccttcatctagtccattgttgcaatttatttgtcaattccgaggtctgtccagaccctgagctttaaaactgtgaaaccctcatccctctggagagcgcagtagctgtttcttgaagaatgatgtggcgcagttgagcctccaggggcaggaggcagtggctcattaagacaccggagattcttaagccctgaacacacatgctgctttactttacctttgatgattgccctaaaagtttcaggtagcactcagtgtacagtaagtatcaagtattggtgatgtctcctgtgaccaaggacacagccatcaaagcgtcacctaagtccaccccatggaagagagggccttgggacagaagcagcgtttgagatgctcttctgggagtcaagtttgtcagggtggtaggtgttgctgctgcagctaattggaaactcttgtcaaggtgacaagaccagagaagcatgtgggagtgatcacacttgatgagtttgtcagaggccccaggacacagacctaaaggtgatgctggtataactttcggagcaagactgcctttgtgtgcacaagttgggaagagatcctgtacttttccttaaaatgttcatatttggggctaaaaatacactcattaagtctgaacaattggtagctgatagagagttaaacagttttcttttgttgctttagattgagatttaattcaaggccttatgcatacaagatagcatacatatgcatacattccatcagtgaactacatccccagctcttgttaaatttttaattttgttctcaattatttatgagacagagtatttctaagttgcccagtaaactctttagctcactttgtagtagagaccattcttgaatctgtgatcctcctgcctcagcctcctcagtatatataaagcctgattataggcctgaaccagcagctctggttaaagcattgtttttagtattgtaacaaaactgctgttttggtgctgaagtaagggaagagatggtagagtcatggaagctaacccttgctgtggccctgacacccctctgtcctctttctccctctttctcccctacaggtacccctgtttggttttacatgcaaatcgcaccaataagaaatgaacacgagaaggtggtcttgttcctgtgtacattcaaggacattacactgttcaaacagcctatagaggatgactcaacgaaaggtaaggtccaaaacagagtttttgtacctaagaattcggtggccttttatctgcctctttctcctccttctcctcctcctcttaaaacaccaaatctatgtcacatccacatataataacctaactttaagttgaaatatatcattaataaagcatgtcttctgacaacttaagtattaacaattaaaataagtccaactggaataaaataaatacattaacaaaaatccaatgaattgtacctattatcacatgtatggctgcctcaaagccagtagtatcccaggagctaatactgatagcaagaattcactgtgaagtacaaagggctgatgacagacagacagacagacaaagaaaaactggaatttttatgcattcagaaaatgtagctagagaaatctgaaagcctgccaaatttcagcattacacacattgacttgctttctaatagatttggtgatgtttttaaaatccaggtttaattttgccccctattatatataaccacatcccgggcaagatgtacatctattgtctccatgagcttcctgtacaggcacagcacttaggcaaagattgagtcaattatcttacaaatgtgttaatcttcaaaaataggcaataaaagtgcagaacctaaagaacagtctagatcgtgttcatatggctcagcttgtggatgggaacaggtacatgttcctgatatagaaacacttctgcaagagcagacacatctcaacccaggtctccattcaacataggagataagtcttctcctaaggcccctcatagtgcacagtggaagtgggaggaagttggggttcttggagctcttcacccttttgtccaatcaagggggatagggcaagaaaaatgggtggtgcaaatttatttttgaaacagtttcttaataaaatattttgagtttgctagacccatggactgttgagtaaactcagacatcaaatgctgagttagctagctggtggctgtcctcccttcatcccaaactgcctgtgtactgaggaaaccaccctgactgtgaaataaaaaatgggagacacgggtgtctacagcatattttctctccctgcctccctctcctgctgtatcttcctatggacttagttttctctacaattgtcctagtaaagtgtagggagaaattccatagagcatggttaattcgggagcagcctgattggcacttcaacaccctgtacctagggagctttagagtgaagggaattacacatagccagggctgatttcgctgaggtcctaccagagagctattgataatttgatggagttttgttcaaccaactgagccttactggctgattacattcagtttacttatcagcttctatttatgcagctgtatgttctcttgagtggaagttgtaacatttgtcgtaaagagagtggctggctcaatgcaagcctccccaagtggagcattattgacagcagcatccagaggcgcagctatggaaacctagagcactctttattctctccgatgtaatttattcccaatttattttcttcatttgggtttaaattagaagatggtgtcatataaatggagactttaaattcatttagaaataggttttataaaatggtatttttaagaacctcttaggagaccaaaagggaatgcttgcctttatgcagttggcaaatgttcctttcccttccttctgaaaaataaaaaataaaaaaaaccccagcacagagctttaagctttccaactgcaaccataattacagaaaatgacattaatttatcccttgcaggtgagtctaaatacataatattgtatctattcacatttttgttagtaccaaattaaaaggagaagctttatcctgtgccaggcattgaaaatatgactgaacaaattaatttgtacatgtctctgaaattctagactctatgaagtcattttctggaagatcaagtaaaatatctaatttagggcctagataacacacatactctctctttctgtctctctgtctctctgttccccccccccccccttttgtatgagccacgcaaacctgcagctcagtattacatcatttcagccattcaaatgctggaattccaagcatgcaccatcacaaccagctagtattacctttaaaatcttaaaacatacttctaaccatctttgtacttaatgttgatttctttgaaactttgtggtgcttcagacaaaggctagaaaacatatttttcctccattgtatatggaacactcatcagaatataccatattctgagacataccttttttttttttttttttttttttttttaccaatttgaacaaatatatacctttgagaatgtatcctagaccataatggaatcaaattagaactcaattactaaaagatgcatggaaaattccccaacaatttggaagttgaggaacacatttctaaataatatatgagtcaaaaaatcttaagtaaaaatattctgaactgaatcaaaatttagctctttcaaatttgtggaagagagtaaaggcaagacttagaggaaaatatgtaatgttaaatgtacatctgatgaaagaaaatgacttaaaaaaacaacaacccagtaacctagtttccatcttaagaagctagaaaaagaagagaacgttaaaccaaagcaagcagaggacaagatcctgaaccatacgggagaaatcattgaaaaactggacaacattgtagaaaaacccatcaaaactcaaagctaactcttacaatgaaagtatcattacagttaacctgcagctctgataaccaagagaaaagagggaagacacaaattgccagtgcagaaaatgaaaggtctatacccacttatcctgtggctactaaagcctagacaacgatcaccccgtggtcaccattgatgacttatgagaaataatagaccattctcatgaaacagaattttttttgttttgttttgtttttgagacagggtttctctgtacagctctggctgtcctggaattcactctgtataccaggctggcctcaaactcagaaatccacctcctctgcctcccaagtgaggggattaaaggtgtgcgccaccgctgcccggcttgaaacagaaaatcttaatgcctcatcactattaaatactcgagcagtaaagagtaattgacccaaaccaagggaatagaaagtacaaatagtttcatcaggagaccctaataaactccttttccttcttcaggattttacacacgtatatatgatagccaccattcccctctttcacactccccacccctccccccaaatgccttcctcgataaatgggtcattctaatcagcctcccaaagcatcaaggttcaaggcacatgtgggaagaagaggaagaaagaacacaagagctgagggatgggaagagggctttgatctgctgctgtgtggacatggctgttgtacacatgcatccataacgttgctggggctgcctgcatgtcctctaggtctcttccagaatgcagaaggtactgctctgataccaaacccaagaaagacagtacagaaaaggaaatgatagatgagtgtcccactctcaacatgatagtccacaaaactgaatccataaagtattggaggaattatgcatgacaattaaaggggctctatcttcaaaaagcaatcctccaaatctgtcctatcagtgaggtggctaaaaaacaaacaaacaaacaaacaaacaaaacaaacaagcaagcaaacaaacaaacaaacaaaaagaaacccacatggtcccttcagttggcatagaaaaagcatttgaaaaattgaaaactcacttataaaaagcctttgaaaaaaattcaacattcattcatgatttaaaatccccggaaaagcatgactgggcgatgatcttccatgttctcataaggaacagctgtgaatgtctgtgcaacctgtgactaacagtgaaccctatctttggtgaggtgcttaaaacattaaagataaaatagtcgatatgtgattgataacctgaaacatttttcaagtgaattttgaagtcttcacatagttagctttgagtgaagagtttttatatcctatttttacccccaagtatgcatatatttatattagaggcatgtttccctcgacttaccctatgtaatttatgacacagttgaagctgcccaaggaaatgcaaagcttctgcatcattttgacctgctgaaccttaatggtaattagtaactttgtatttatggaacctggaagttggcagcattttgccatgaattggggggggggcatatgcaggtacttaaagagctgacttatctctgaaataaatgcttctccattctcctatcatcatgttcatcactctgcatccccatgtaaagtaccagagtgcttgtaagacagtctcttttgagttcaactatctatttttataaattatttttgagtaaccccagatagattgattgttgaacaatgatttcaataagtatgcaaacaaaaatcctgggaacattattggtataaaatatctttttctagtgccagaaattctagaagttgaggtaatttcaaaataatttttgttctgaggctcctgtatgccttttctatagctaacagattactgaaaaagcattgcgtaatgcagctatgaacgctgcatatgaacaactctctattattcatgtgaactgtacatttaacatgaaaaattcaaaagacatgaaatatttataccattaagtcatcatcctaccatatctttgaagctagtgatataggaataggagaacatttttggaagctttgtaaaatggtgtatgtttttatttttaaagataaagaagaaattaaacctttcggataaatagggcctgcaatttcattataatgactacaatatcaaaatgatttaggttaagaacattgaataaaaaatagcgatgttgcctttgatccagcctttggcctcacagtaacttaacacaaactttttcatgacctctataggactatcctcatctgttaactttacttttatctgttttattttgccaaccacaagttgaactgagaatatttctggggatataggagtgtccccttttcttatattccagtggggaagacaaacaaaatagtagaagctttcctccaagtgctcctgtgttcttggtgatcagctgagcataagcactgtaaaggacacaagagaggtgttgagagagtgaagcagggattagacaggagagacacagggcagcatcgaggtcctctgaggctcctggtctagaatttcacttgtgtccgtgtccctcattttgttctctacttttgtctagtcagaggaatgcagatgagaagtatgtaaaaagttgggtttctctgaagctcagttttgattaggtacaaggggaagaatcttcaaaaggagtattgattagaaaaggacctctctcctttgaagatctgcctaatttattggtttgcattcatatcgatctcctatttatattgccaatcaccccttaaccccacccaagaaactcagacaaatggttgaaagacttgaaggaacagactctgaactttgtttctgaatcagattagacaatgactatggtggttatggctgcagtaattgagggagctctgcttatagctaagcctatatccatcacagtttcatcctgaattattttgattttgtccgtctgatatcaacagtgaatcatgatgaattatgacaataaggaacggcagcaaacctaccaggctctatgttcgccattgctcattgcactaattgtgaagtttatgttaatagatccattttactgcggaagagcctaatactcaggctgatatcaaccctcatgtttttcatattgcccatgctgtccccacttctgcaggagggaattcactggcaggcatagtcaccttaattccctgttcctaagcataggcctcaggagggtggtgtatttatttctttctggcagagttgtgctcttaaaaccaaccaaatgtcctgatgctaattccacagggtgaagtggccttgttacgttttgtacctcgtattttgatgttggaagatttgttcagacaatccatcaaccgtatctgatactttatctatcccaaaatgcaaattaaagcccaggaggtccacgctgttgattatcttatgtgtcctaaagatcattatccaaatctctgcccactgatactgtacagaattttcaaaccgagttccaaactgctaagataattaccgtgtgaaacaccctctgccaagcagtcatgacacctttttgccaataatgaggtaaaaaaaaaattctcccagaataaaaataacatcaaaaaagtaacctgcttgcaaaaccaatgcttttctttagagaggagacggcagaagaaataggagtaattatgccaggccgtctcgttggctgagagcaaaattgtttacctaagctttttccttatagattggaatcttgtgttgcagcccaatagattgatttaactgcctctgtgacttcctttcatttttaagattaggcagtccatgacaaagaggttaattgcaacccaatagagctaaactaatgttttattaagaaggagttggcagcccgagcttttaggagaacaaatgttctcataatgtcatgaacaacttacagtgcaagcatcccactcctcatagccaactgtctgttcagattaccccatatcgaccacgtctaagtaacatcagcgaattgctgagctgtcaggcgcacagttaggtttctgtagagaggtgggtggatgcagtcctggggagaagtgagaaatgctgatgagtctttttgctttgacctagacagtgtgattgtgtgacttttcccaaagtttgaccgtaacgttggggttggggagatatcaaatagactcacgtagtcactgatggaggaggcagatccagagcacaaagggatagacggaagaaaactcaacatggcgtggtttacagtagcggggaaatctacagacttcttgagcatgtgtccgtgtagcatatgcactgtcaaggagacacaagtgcctaattcttagcgatgatggggagcaggccagaggtgcccttgtgggttggtgggaagccacggagggagggaaacttcaggttgttgtgtttggtgtggcttttgtttcaggtgaagtgtgtggataggtggtgggaggaaggaggtatagaagtcttcagagaaatgccgatgttagagcattagagcagaggattgtgagagggccctggtcagggctcaaggtgggcagtgcttcctgctcttcctctgatgtacatatgaaaggaacatcacacctcggcttggctttggtgctccaccttctggggcttgctgacagcaaactcctacaggatggctccgtgacaattgcccttgactttggtttctctatgccagaactggcccctcatctagccctgccttttttctcagctagtggtcctcaggttctttctgaagagtaggaacactctttaccttctctgctccagagtttgttagatagatattgacacccactgaaagctgagcctagctcctttgttgcattttcattgtatctaaggcaagtgatgtgctaatctctgtttaacttttttcactcagtgtttcacttattcaaccgaaatgtaattagtgccctttacaagttacgttgatcagactatatatagttgtgcagacacatagaaaccagtatttaaattaggaactactgtttccttactatgaaatgcagcagcaagagtaagtgacaatagctttcatggttgaatttttccttcctcacatgccttattgttggcatggttgtaggagaagagtgaattctagcattctgaaggtttgccctcttgctcagtttattgcaaacattcctcttgtatatctcctttgtttccagatttttttttctaggcagaactttattgtgtatacagaatgcaaatgggtttctcttttgaccctactcagatctacagagatctcacatcatcttttttagaaatataagccttgaggggaaaaaaaagatgagctgggaagtttctagaaatagcctatgcaactataatacccagttgatgtaaggtgaggaattatcagatatagtttagcatgctgatgactgaaatagttacagtcatctaagggcatccttattatttacacacaacaccaccccccccatgaccaaggcccactataggaacacataaatgggctttagtctccaataaaattggattagtcagttgccttttgttaacctacctacagctttagtgccaccatgaagagatgaactttagtttacccaaagtaatctacaacagcattgatgttgccactgtcacatgatgtgtatgctatggtgtatgaaggagggcattgcaagtggctgtaggaagcttccagaatgaagtaatccttcaattgagtctgaactgccattagccaaatagaattctagacaggtaggatgagggtaataaagcaaagagtggggtattatagtatgtaaaaggaactctgggaggcttaactatcgtttgaatttgttttttttttaaattaattttctgttggtttagtaaggttggaaacagtaagaggagatgtcaggcgatagatatagtgtaaatccttgtggtcgaaagctaaatgtcctctcttccaaggacataccatgctatcctggaagtctccaaggttgatctgaaagactgaaataggggaatgtgtgctctgatctgtgttttagaaagaattttagcagcatgtggacttgttctcagggggttgtcacctgactgcaatggcagatgctgtatggtctgacatgtaaggttggaaggcattcattttggaaggtatatattcataaattataaactagaaagcttagaagtgtgtgtgtgtgtgtgtgtgtttgtatgggtggcgttgggtttagaaagttagaaatagcaccagataattcatcaagatcagggacatatggtagatttaggatcggcaacacagaaagaaggtaatgatgagatgacttttggacatgttgggaaccagatgtctacagaatatcttagaaaagcatggccaatggcagagatatgtgtgggtctagcacacagaagagaaattgaggtttgttatagagaatttaagtcaattctttaggttgatgctataatttctggagagctgatggtgtctttgttgccttattgtgagactggaacgttgtacagaactttgggtttcacgcaatgctgccttcaacttgactttaaattctagtcactaggataaggtctgctactaaggaagaaaacagggctttccatcaacacatgccagcttacttctgactgtctgtgaacgcacagaaggagcagaattggtagaagcagttctaagcctgaacaactagtctaatgactcatagtaaagtccagtgttacctgtacgctgcgatttgacaggcattagccttctgcaggcccagagtttcttcagtttagtgaatcatctgaaatttcatcaagttcaccccttttgaccagctgtagttttcacttttaaggaattgtttgggaactatcccatcaatgagtaatactgcagaaatgctgaaatgggtttaaacaaatctttaatagagacgagcttttgatttagctagagaaaagatagttgagatagggccagaatatggctggtttttctctgtttgctcacatctcattggtatttctttgaaattaatgattttaataatggcaatttgagtccccagaagaaattttcttcccattaaattcacattcctttttcccaaaagcaacttctctttctgaaaatatgattagggctttagatattccaagcataacttttttagatatcactgcagttgttaatgagagaaataacatttgttatgctacaaggaaagtagaatgtgtgatatgaaccataatatgggagagtggttggaattgagctatttctcctgtacatcactgtgtacagaagaactgttttcattaaggtggtggtagccactctaacaaacaataataatgtagtaatgttatgtgttattttttctaataaggaaaaaaatgatttgacacaggagaaggatatttcttgtttatgtaataattcaaagcaagtggccctggctggcatccttttgcacagccatccagtggctttgccttccccttaggccttaccagttgcatccagctggtagaagggggaggactccttgataccaacttgcttttgaaatagagatacagatgtggcatcatgtttttgcttacagtccattagtgagatatagggacttggaacacacagatgcatggggtgctgagaaaggagttgctggccaggcagctggtttcccttaacaaactcatgcaaagcaaaggaacacaaaggtttttaaacctagtatctaccttgactactgggactgcataatagatctgagaaaggcacagatgttacaaaataccacagatattagaatgtacctcattttagccacacttcaaacatattatgggtgtttacttaaggataaaactgacacttctcagtttttctggatagagtggctacaatcctttgacattctgagagaattcatttccaactcattgtatatgaataactaaaactctcttttcatcttttgaaggttggacgaagtttgcccgattgacacgggctttgacaaatagccgaagtgttttacagcagcttacaccaatgaataaaacagagacagtccacaagcattcaagactagctgaagtaagtatgagaaagactttgttttcaaggtagtggcattgatacacttttccccaaattactcaatataagcaaaattgttagtgattatctatctatctatttatctatctatctatctctctatctatctatctatctatctatctatctacctacctacctacctacctacctacctacctacctacctaactatttatctatctacctatctgttgcgggaaatattaaaaaagaataatttcataaccaattgataatgataaaagctgcctacctagattagacaaattatcccaattattctatcctttatgatatcataactacctgtggttatttaaaaccacaagggatcagtatcttcttactgtctgtttaccttcatcttggcttctccctctctcttctctgagtcactctctgtccctgcaactctttgctctgcctcccctttccctgtccaatcacaggcttcctgctgcattaatattataatgtaattggagcttggaaaatcttgccacacctatctatttgtaaaactgtagaaatttgaaatatttctttttgttctcactaacttttgcatggagatgtagttcatgctatattatgtgatgcttagagagtgtatgatttaattgaacaaatgggacagagcatccatccatccatccatccatccatccatccatccatccatccatccttcattcatttgtgtgtgtgtgtgtgtgtgagtgtgtgtgtgagtaagacattaattgannnnnnnnnnnnnnnnnnnnnnnnnnnnnnnnnnnnnnnnnnnnnnnnnnnnnnnnnnnnnnnnnnnnnnnnnnnnnnnnnnnnnnnnnnnnnnnnnnnnnnnnnnnnnnnnnnnnnnnnnnnnnnnnnnnnnnnnnnnnnnnnnnnnnnnnnnnnnnnnnnnnnnnnnnnnnnnnnnnnnnnnnnnnnnnnnnnnnnnnnnnnnnnnnnnnnnnnnnnnnnnnnnnnnnnnnnnnnnnnnnnnnnnnnnnnnnnnnnnnnnnnnnnnnnnnnnnnnnnnnnnnnnnnnnnnnnnnnnnnnnnnnnnnnnnnnnnnnnnnnnnnnnnnnnnnnnnnnnnnnnnnnnnnnnnnnnnnnnnnnnnnnnnnnnnnnnnnnnnnnnnnnnnnnnnnnnnnnnnnnnnnnnnnnnnnnnnnnnnnnnnnnnnnnnnnnnnnnnnnnnnnnnnnnnnnnnnnnnnnnnnnnnnnnnnnnnnnnnnnnnnnnnnnnnnnnnnnnnnnnnnnnnnnnnnnnnnnnnnnnnnnnnnnnnnnnnnnnnnnnnnnnnnnnnnnnnnnnnnnnnnnnnnnnnnnnnnnnnnnnnnnnnnnnnnnnnnnnnnnnnnnnnnnnnnnnnnnnnnnnnnnnnnnnnnnnnnnnnnnnnnnnnnnnnnnnnnnnnnnnnnnnnnnnnnnnnnnnnnnnnnnnnnnnnnnnnnnnnnnnnnnnnnnnnnnnnnnnnnnnnnnnnnnnnnnnnnnnnnnnnnnnnnnnnnnnnnnnnnnnccccctcccttctcccctcctcctttcccttctcttctctttctctctcttccttcctcttccttcctttcttattttctttcttttttattttctttctttcttattttctttctttcttattttctttcttttttattttctttctttctttctttctttctttctttctttctttctttctttctttctttctctctttctctctttctttctttcctcagtagctgttatcatgcagaaggaagagcactttgtggtatagccatgcttaaataggatatgaatacaatattaagtaattctgttcatacagaacaaagacgaccggcagctggctcacattcgaatccagccaggtggagtttccttttcaagagagctccttactaagtacaacagtgctctgtaccaagtacaacagtgatccttactaagtattccttagcaagcactgcttccttgctaagggtctgagcttgcttctgcgtgtgctgaggtattctaagcagataccctgctggcccctttctctaccttatccccctactagaatgaagggtctgtaggagggaacagcctgaaccacaaccactccaggatgttttcctgtgagcttttgcatttcatcccatcattgcatggccatttcagggagtttttccactctcattcttttcatttggctttcccttttcttttgtttttgacttttgatttttttttttaaatcagtcagtgaattgggattcataaaaccaaatccaatgcaaaactgctttctattaggtctgaggtttgctgctttacagaaggcagaagttgccagactgtcaaatgagatttcctccatggtcatgcagaggggctagggggaatgtgcccttggatttccaaaactagatccaaaagaaacaccaagtgggcgcaggagtgttgtcttttcagttatatgaaagtactaaaacaatttgctcgaggcagtttcctctggaattttcacttttccaagacacataaattggatctccttttcacctgatcaagaattggagtggattctaggatgaaagattctgtccccataaaagcagttaataaattgcccacatgcaccggtatctgactgattaccttcaacttatgttgggtagggataaatactgtcacctctctgtcagggggccagactgccttagcccaggtagcacttagatcttcaggtggaaacagtgtgtattgatgcaaaatcaaattcagaaatgttactgtattctcataccgatctaagagaaaggaagatggtagacagagctgtcactcactgccttatagaggagtacaatgcagagatcaggtagaagacctggcttcctatgtccaaggtcaaaatcccaacaggtgtgcatcgtttcctgtgtcctacccttcccccactcctccactggcctctctcccatgcccttctcctccactggcctctctcccatgcccctctcctccactggcctctctcccatgccctactcttccactggcctttctccctctatttatttactcctcctcctcctccttctcttcctcctcctcctcctcctcttgctcccctccctctggagcatctctcctttgctaatcctgtctgactagctaggattgaaatggaaaaaggagaaaaagataccatgtgagcgctacactggtcacctggaaaagataaaatataggctttctcaaaacccacttaaggccagtgccatgattttcagaggtgaggtgtctaggtgcgaatacaccacacttcacgaaaccttttcagaagattctagtgtgagccagatttaaaacacagtggattaccggtagagatataactagagaaggtgaagatacagatgacggcaaaggaagcattttccatctcttcccccctaccacccccagtggaactgtagctgatgctggctggaaggtaagagagaagccataattacgcaaggttctttacctcaagcactccatctcaacatggtgctcactttcctgctaggataaatggttagtaagtaatttaagaccttagggataaaatatacccagggctccgagaatgtaggtagatacataaaatagccttaaaatagtgctaacagccccaagttaaaaatcataagtatgatatacaactatagaaaatactagtagcatttttaatgttgaaaatagccagatacctagtttttaaagtaagtttgatgtatgagaaactttagaatactcttccagactttaaaaggtacatgaatatgcaagcacacacacacacacacacacacacacacccctatgtgtgtgttatggaataaacaataaagctatacagttatatgctaatgcttaccttcgattattcatgcattcaaatgtttgatgcatttatcactttgactcctccctcctggcttgtttgtttgtttggtttttttttttagaagcactgaatagtgattgtataagttagttaagaaaccccattgcgccgggcgtggtggtgcacgcctttaatcccagcactcggaaggcagaggcaggcagatttctgagttcgaggccagcctggtctacagagtgagttccaggacagtcaggactatacagagaaaccctatctcaaaaaaaaaaaaaaagagagaaaaaaggaaagaaagaaagaaagaaagaaagaaagaaagaaagaaagaaagaaagaaagagaaaaagaaaccccattgctacagtctttggcacacacattacccttaatggcattaatgtaagagatggaaattttggatatgcttcctcaacttgtttcacagttcccagagtccagcaggcaatctaaaccctgtcttgaggtctccacttttggcccttgctggggtcatctgcttttctccttctcttgctttaattagaccccacagagtaagttaaggtttatataaacttgctctgatagttttccatttgttaaagaggtacagagagctaaaccttatactatataatatttagtactttattttgttttccaaaggaagcttgcactggataagaaacacaatgctcattttatatcctggttttagagagaaaaagggaaaatgggctgtatcactccccagttctgtcctgttagccaccaggacagtgagcttgctgagcaaatccagcgagactgccaacatcgaggccattggttcagggagaccattagaagcaaaaggatgttttctaaggtgtttaatatgtgtgaacaatgaatgacagtcagtcacccgagtaactatggagcagtcagtgaaagtcacatggttcttgtcaggcttgcccagtacataagcaggagcatctgaggtgctgtgccactggagagccaggcggatggaccagtaatcagatcaactgttgagtagttgcactcacacatgggtccttcgagcaaactttggggcagttcggaaaagggaatggaaacaatacagaatgattgtcctaaaactgacaatcatgtgactcggtctgtgattggggcatccagcaggtgtgcagtcacagctgtcttcagaggcgtcccaactgtttataaacactgttgctttcttttaggtgcttcagctgggatcagacatccttcctcagtacaaacaagaagcgccaaagacgccaccacatatcatcttacactattgtgcttttaaaactacttgggattgggtgattttaattcttaccttctacaccgccatcatggttccttacaatgtttctttcaaaacaaagcagaacaatatcgcctggctggtgctggacagtgtggtggacgtgatttttctggtggacattgttttaaattttcacacgacttttgtggggccgggtggagaggtcatttctgacccgaagcttataaggatgaactatctgaaaacttggtttgtgattgatctgctgtcttgtttaccttatgacatcatcaatgcctttgaaaatgtggatgaggtaagtttttttggttttgtttttggggtattggagatcagatgttttgaaaacagtcgagttaaaaggatcgcaaggatgacaaaatgtctttttcagtttcccttttgcaaacccacaatattattaagcatgtgccataatcgttttgttttgtttttttttttaaattaatttgtgcctgtgttttcctccaagactttaggctgaactgatgaattgctagataaatggctatggttgaaagttgtgattggaggaagacaggaggaagaggcaggtagaggaggagcaggaggaagggagggtagtgcagggggaggaggaggaagagggaaagaaagaaaagcaggtgaaagagcagggggaggagggggagaaggttcattggagaggttacaacaatggtgctcttagagtcaaatgtagttcacaaaccaggtgatgggtttagggcacagaaatacattttctctgaaagacagcagctttgaagacttcatgcctttacaaacctagtgactttttaaacttaagtcacacatggtagctgtcttaagagttaacctaaaaaccaacatatcttccaacagtttttgagttgttgcaattttgattcatgcttttgctttcaattcattataaatacagatataggtagaaagtgtatttgatgacttgtgatgtctggcctcactcagcgttctggtcttatggtgtttgtgaaaagaggaatatttagaatgtgtcataccttaaaggatcccttcgttcacagctccttctctcaaagttaagggtggatgactcaaaaattactgctccaagcggggaggatgcaatcaataataaaacataggccaggcagtataaaggatagctttttaaaatgttttaacaatgataacgctgccatgttgctttccctaaaaaccctacagtgtccctgttagatcactcaattggaaagttcattgcactgttgtggctctgtgtgtactgggagtagactcaacattttcttcatcgactttcccgtaaattttcttttaatacaacaatcagtcacgtggggatttgaatgaagttgacctcacataagtagagaagtatggtagggcagagccctggggtattggaggaggtttgggaagatgttgaactaagactacaaaattctattcattcagaagaggtcagctcaaaagatctattgtgccatgtgataacacaattagaaatatactctattcttaaaaagtcctgaatgagtggattgataagagagagagagagagagagagagagagagagagagagagggagagggagagggagagggagagggagagggagagagagattatttaaacgtgtatcactacaacaaaatacctagacagattacttatgaaggcaatattctgctcatagtttttgaggatcaagaacaagatttaacagccccatttctttgggtgtctgattaaaaaaaccaaaacatagatgtgagcatgtggtggcacatgctgccacaccttatactagaaatatacagagagggtataggcagggccccacaagccattgtaagaccacattcccaggtgacttcagggcttccccaaggccctatctcctaaatgcctgcagcttaaccctagggaagaagcctgtaaagatgggtctctgggggatggtccacatgcaaaccatagcagggactaaatcttctcaccgagttcccacttatttcaagctcagaactcagaggtctcaccttggtcccttgaagctggccacagtgtgaacatggtggcaagcaacacatgaggagatcaagccccttcagctttaactctgtacagctagttgctaacatcagacaacacactgctgaacacagttgtctgaaggtggctatgttgtgggtctgatgtactgtcacattgaagacacatttcccaaaggtgctctcagcctaagtatggagggagggaggtctgtcattaaaagggacttatttttgatgttgattgtttacttttgagatcgtgttttaattcttctttctctttcttctctccaaacccttccatatatctatctcactttccatcagattcatggcttttcctttccacccacggttattgcatattgcgggcatatgtatgtatttggatgactttcattctggccttctctctttctgcgctgcattttgagctctcctttaccaaattttccattaactttttgattgatgccatatctctgtagtgtctagaggctccacccccaacttcctgtccttcatcctctatatcctccagacatttattgtagtcaaattcttgcacaaggactctggcttggcacctgttccttccaggacctggacagaccaagcaatgtgcagggatgcagtgccatacactggtcaagagagtgaaaataagtcaaggctctgtgaagaacagtaggcggtaacttattttaaatagaataagctttagaggaaaacatttaaattgtttaggtgatttatttattaataatttatttccatgctatcaaggaacacatctgtccacctttcctctggcaattcaactttaggcttcatctttgctttctcatcttggaagctgagctttcagactcctttcctgcttgctacattgccattaacttattctcataaaggtagcacatccctttggttcaataaacattgccaacatgtgtatagccaacagacttgccgtcactgaggtgtccagcatcctgtagtagccttttcttctctgccctttctttctcccaaaggttgctcatttctgtgtagttactatcaggtatttaaccttcaagtttccactccttgattaaatgtcttttcactataccaatgcaagagatatttattcaacttcagggacttaaacaaatgtctcttcactatccttccattcgagagattggttagctgtctcatactttgtcttgaaataattttccttcagaattttcaaaatatgatatttactgtgttctacctttcaatggctccttttaagaaacttgaaactattagtttctgatcctttacacgtgacctgttttctctttgtagaggcttaatgtatctcctgcaaggatagatactggtttagatactgtccagtttagatactgtctgatgacgcgccttagaatagggcctctttcatacgtcttcatagatatcgatggaatgcccttctttgatctcaaaaatcatgaattctgccgtgataatttctttttatgataaatctccctcctttctgtctttctctgttttctcccctctggagcactttttgtttaatgtgttgaacaaaccctgtaatttccttgtttattctaagcagctttccaagccatcatctctatgctgtggtttctggggatggctttatcagtattttctaactctctttgaccataatgatgcctttttgcctgacactaatgcagctaaatttgcttttgcatcacttgtgtgcacttggcgtgtgcattgctatatttaatgttctgtaattgtagactattacattcaatgtatattttataaagactagatagatgctgagagttgtcacactatgcagcttaatttcttcatatttactgtgattaaatgcattctgacttatttagagcatcatattttccatttttcatgctttccctgtctttcttttttgtgctgcctccttgataatttatcctcttctgtatagactgaggtctgaagtttccctcaatacattggaccctttctaatgggctgaatatatatccctgctaacccatgattcttgtatttttatatcagcaactgacttaaatccctaaagcttgtgagactctttacctttctctcaaataacacaaggacttctgttcattttctttataatttcaaacatctattcattttgttattttatgtgcatgagtgttttgcctgcatgtacacatgtatactagtatattgtgtggacctggtacttgtggtcaaaagaggacatcagatgtcatggaactggtattgcagatggttgtgagccaccatgtggagcctgggaattgaacccaggtcctctgcaaaagcatatatgctcttaagtgttgaaccatctttctagcccttcttcactttctttaaatttaatatattatactttggttccacattgttcttagctctctcctttaattatgttattctcccacttcattgtcaatacaatctatgtgtccacttgtttctttgcttgcatggtatttaatgcattcttggcgttcttctgcttcagttcttgaagagttggctctttgttaaccacttattacataacatcccaggaaggttttttttgcatccatctcaacacttctaattaataccttcatatttcatctccacttgtgtgcatccatgtgcattaatgtggttaaagttattccaattttattattagtcttcgaatggcctggactcttctgcctagcacagggcatgctttgttgcgacagggtggcttttcctcagtcttgccttgagtttcttacaagatggttgcaaagactaagtgtgaaagatactaatgcgtttcacttgaaaacttctaccagcccgagaggctgttgttactttatttgttgggtttcctgtgtatagtttcattgtaaatcctgaggtggtgaacaatatgtccctatggtacttctttgttggatggatgcacagggattacatgaagttttactaactcttagtgatttctacaatgatgtaaagatggaagaggaatcacaccagcaagtatagcctagggaataagagactataagtctgggaatcacactttaatccttcattcctgtacatgtacagaataactgaaagcagcttaatattactctattttcaagatctttgatattctatctgaagataattcgatttactaggaatttgtaaactggatacatgctttttagagaaaactacaaggcaagaaagacagaacctattacagaaagcttttggtctgagaataggaaaaatgtatgtcctagaaatcataaaatggaggataaaaaattctctcatgtgtcctaagagtagaatatagctcatttgcaatgtgcatttgaaccagcatggaggtctagcgtggggacatctcaggggagcaggtgggtaaagtacataagaaagattgggccggcaggcaatgcgctggtcagttgcaagggggctggaggggtaagatgatgctggtgagatgatgctggtgagatgatggtgggtatctggctgcatggtaagcctgaaagatgagtccgagcaaagcagaactaggcaaatgattatcacgcacggatgctgcaggcaaaatagatgaatcagcaatggctaagtggaagtagataagagttctaatttttggaaacgtctcttaaaacagtgtctgaattattatttgttcataattatgcttgtcaaagtgccacccacatgttacctcacacatttaaaattgtgatttttatctctcattatcagaataagaactgagactccagaagagggtaatcgagcttgtagatgttaatgagttttgtcagactagaacctctctgtcccttttgccatttcagatccaagaatagtaatagtagacaccattatttaaacaattgacttgctatcatgttttaaatgaaaatagatcatcgaaggcaaaaaatgggaggattaggaaggtgtgcaatgcagtttcttttgtgttatttcttctaccattcacccctagtaatcatcgtacatggctctgggctgtatgaggttactctttgtacaggtgtggtgtgctttgtgtgctgagcaatcctccctgtgcctcttctccttcctcatgatttctccctattttcttagacagtttgtttctacttttgaatcctctgaacataaacgattttatgtatgtgtatgaaataaaggaagcataaataagaggaaacacgcgctattgtctataagatggctcaattaagtttatggctatttccaatgattctagtttcccctaaaggatataactttgttctttatagctgaatcacatttcacgtgtgcacacaccacattttctgtatccagtcctctgtgcttgagtgtctgtgctgattttgtaacttggtactgtgactagtgataacggaatgaacatttatgtacgagtttctctgtgacatattgagttgggctcttttgggtatagcttggtcatatgggaggtctatttttattttcttgaggaaacttcatgctgatttccatagtggactagctacttcctattccaccagcagagtgaaagctttccttttgtccacactctcatagcatttgttgttacttatatttttgatgactggccttctaagtggaatgacacgaatctcagtgttgttttaattatttctctgatggctaatgagactgaatattttttcaaatgtttattggttatttgttctctatcttttgagacctgtctatttccttagcagatttattgatttctttttgtttagctctatctatctatctatctatctatctatctatctatctatctatctgtgtgtgtatgtgtatatgtgtgtgtgtgtgtccccaatgctagtccctagtaatatgcatagctagccaaaatttgctccatccagtacctgacttcttcagtttattaattttttttatttactgagtagaagtttcatattttgaggttccatttgttagttgttggccttatttatggagtacctggagctttattaagaaagtccttgtctatgtgtgagtcttgcagtgctttgtgtaatgtttctttaaaagttttcatgttttaactcaattgttaatgcctttgcagtatctggagttgagttttgaatagggtgaaagatagggatctagttcattcttctataaatggagatacagcttttgttaacactggctgttaaagaggctctgctttccaatgtatttttttgtatctttgtcaaaaattatatgtaatgcaaaagagctaaggatcaaggcagtctatcgtgagattgtgtttcctagtaacatcagaaagaagctacctacacacataatatttcaccaacatgaccacccaaatatgaacaaaacaagatcagcaatgaacatggcacactgcatgggaaaagcccacaaggcctcaatataccaaaagaacaaccggcaacagaagaaatctggaaacaggaaaggtagacttccccagggaagagcattggttattcagtgtcaaattcatccctaaaaacatacatacaaggaacattataaggacagagtagactgtatttagaaacacacagacacacacacacagacacagacacacacgcacacacacacacacacacacacacacacacacacacacacacagacacacacacacacacacacaattttaaaaggccatgaatttgaaggggaggagtgaggaatatatgggagggttttgtgggaggaaaggaaagggagaaaagttgcaattaaattataattctagaattaaaaaaatcatagggcggtagctatggcggtttatatatggatcctttactacctacacttccaattttatgtaaggaccactctggtttttactatggttctctagtttcatttgaaatcagaatagtggtacctctagcattattctttgtccttaggattgctttttttttattggcatcttttgtgcctacatatgaattttaagattattcttctgtttctttaagaaatggtattggaatttaatagggattttatagactggcaaatttgtttaacttaagttagtggccttgctcactttattccaaacagattggtaaattataagtaacaggaatttcctttttggttccagtggctggaagcagggggcaaaggagctgtcatgggggtggtgagggtcttatgtctcacatgcagaagatgggagacactgacttaaatatgtgacattaattattcctgagatggagcactcagggactaaatgtttccccttaagtatccttcctcaacaatgatgcattgagggacatgcttcagcctgtgtcttgtagtagacaaagctatctaaagctctgagaggtgctcagccctttttgcagtttcccaatggacaacaccatatctatattcagccttaagacattgctgattgtaatcagcacccacttggataggtctctcatgtttcctggcttttacctggttatgctttgagtgacctttggatttctagcaagacagacttcataagccatgtcctcttaaccatggactaaaagcatgaactaaaacaatctttctctctgagatagtcagtgtattgtattgtgttagcaaccggtaatagatcgagacatctatgttaccctgctacccaagctttatgctttctgttttttttttattgactatgaccaagcgatttctttttggccttacagatgaatattcgttgttcttactctattaccatttgttgaaaacactgttacaatgttctatttggttccctttgttaaaaattagctgagtaattattgcacgtgggttatttgttatgtatttctaggttacgtgttctgctgtattcatctgtttgtctagtcttttgccaatcctataatctcttgattgctgtagctttacagtaagccttataatgtgctagcatcaatccaccctttgactttgttgtttttcttcaatagtatcctggatattctgttttacttctccaaatagatttcagaattattttgtttatttccactaaaaatttgctgtaatgtaattgaaatgttgttttattaatagctcaaataaggaagaattagtatgaatgttatatcgagtgttattattcataaacatgcgatatatcttcatttttctatccttttgtgtgtgtgtctggcatatgtgtttatgcatgttcacaaatgtgcaggcataaatgtacatgcaagcatgcgtgcatatgtgtgtgcttgtgtgtgagcatgctttttccagttagaggttgtcactggtgtcattctctgtttatttccactttatgttttgaagaagaattctgtctcttggtttagctcagaagcttctttgactagtccagctagccctcttgcttctttgactagaccagctagccatcttgttgcaaacagagattcgctgtctctgctttgtgagtgctggagttagggacgtatggtggtcaggagtataattagctccttgatattaactttatttcctttacttcaaaaatgtattgtttttccttttttcttgtcttattgaattagttgagatttctattatgatgtcacacaaaagcatagagaggggaggcacatctatcttgttcctgatcttagagaaaaaattcctagtttttcactgttgggtataatatttgttgtaaggctttctttagatagccatttttaattgaagacatgtaaatattcttagtttgctgattttgtcacaggcattttctgcattcattgatacaatcatgaaaatcccctttctttaatatgttttttggccttcaaattttgaattagctttgcaatcttgacatgattctacttagtcacagtgaatactattttattttacattgttagatccaattttctgatgtattgtttagggttttgcatttatatctacaagagacattagtctacagttttcttataatctctttagttgtgctgtcagtgtaatgctggtctcacgatgtgccaggcgtgttctggagaaatctctctgttctcattttctggatggtgtagagagctggaggagttcctttgttgaatttctgagaagattcagttctgagcccacctaggcacgctgccttctcaatttagatgttcttcctattcattaattgtatttaatagatatattcctatttagatccctattttatagagaaatattattagagatattcccacttcttatgcggattttagcagatgatataattcataaatttttcttatctcattaaaattatcaagtttattgccatagagttatacataatatttttagatatatttgggacttttttgagattttatatttgtaatggtgttacctacattgtgtctccttccccttttctctccttctcttttccccttttcttgctctttcttctcattggcctagaaacttactatattggtcttttgaaaaaccatcgttgggacttattgattatgttgactttcttgtcttcaagtacatggctttcagatacacacacacacacacatatgtgctttactctatctgtgacttaatttgctcttgcagttttggctaaggtggcagtttggaacactggcatcggaatctttctcctgttaaagcacgctcacttttctctgagtaactgccacgctccactcatggcgtcagggcatcttctcattctttgatacctcaaaataggcttaattcccctgaaaattttcctttggcatagataacatttccaaatatgctatttaattttctggtattgagagattagatactgatttctagtccagtttaatcctcttgtcatccacgttgtttcatttctgctgcttttaacaactattaagtgtcccaataatgacttgtattttatatttatattttgatgagtcatggattcatggtttgcccactgtgatcttccatttccgtgaagaattgaaattgtacaaagatctttaaacatcagagggttaggcactttgctagcttctgaatgtatagaaggaagaccttgtgcttgccaaaggcagagacactttctaactgaacatcttggattttcaattcctgcctaactgccattcaatttctacattgttgctgttctgctgaggtttcatagtttatcatgtttgcttggattgcccatttcttgttattaatagaagtgaagggtcaggaggaaatgtctcacagataagaaaggattccttgccttttgggtactgtgctcacatctctgatcagttccatcctatggataggctcatcttcacatgtaggaaatattccagtttgattggccaaatctgccattccttcacatgtgtttagcgattgattcctttggggtataggtgggacttcctactgagcaaacaaagcatcgcaaggcatctatctagtaaaaggtgatcatggtacagtctcaggatggaaaagctctcaaattctagctttagagaaaaatgacttgtaaacttctcttcttagagaaaaaaagattggacagagtgaaacttaaaggggagaaaagagttgaagggtggtgtcatccttgggttccaaattgccatatggtgagtatggtctaagacattagattctattccttgtgtttactggttgggtaatacacagatttaatgattaacattcttcttgtatctgaaattgaacaatgttgcaggcctgtattattttgcatgagttttccactgagacaaagcggtctgtctgctgagggaattagctcggagagaataggaaataacaagtaacgaggcgcctttatttgatttttctgcttacataagaagacacttttgtctgttctgatgttcattcatgatgaatgcttcctgtctttgagctctggggcatgattctaaaataagggcaaaggagagctggaatacattgctctctgcatgctgtgtgtggaaattgcacgttaactgtgtccatgcttgtgtagaagttgttcttgtcttttgtgcagcactcattcccatgcttgaggatatttttcctctatggatctagtgggaagaaatacctgccttcacttaatttcatgatgcttcctctttcccataatattcaggaatctataggaatatgttcattgctctcatcgctgtcttcatccttaagaagttttgtttaagctggctatggtggtgcacaactttaatcctagcacttctgggaggcagagtaggagaaggaggagcaggaacaggaggagcagcagcgggtggaggaagagatgtggggagggcaggcaagcagatctccgagtttgagtaaagcttgctttccacagggagttccagggcagtcagttgcacagggagatcctgcctaaacaaacaaacaaacacataaataaataaataaataaataaataaagctttgtttattagacattgtgaagagtgaataagtcacttccctttcttcatgagactttgactttggtaaaccttcttcctttgtcgctctagggatcaatgaaggaaatttatctgtgttccttggaagtaaaaaagaggttaaacagaagggtcagcctggtgacctcccagagactgagccactaaccaaagaggataagcctatgcaatatggtccaaccacatatgtagcagagggctgccttctctggcctcagtggaagagaacgcacctaatcctatagagatttgatgcaccagggtagtgggggtacagggtgggtcacctctcagaggtaaaggggaggtgggggggggaagaatttcaagggaaagtaggagggggcagcatttggactgtaaatatgtaaattaataataataaagaatggtcagtatttttatttgaactacaagaaactttcaatcaactctacttacccagatgaggttgctaaggtgtaaagggcgttccatgcatgctgcaactctgatatatccatgtgagacaactacatgggattattgcttttaaaggcattgggtttggttagctagccagtcacgaggctctcactagttgcatgctcttaaatcgctaccacatcctgccaataagacaaagcagacatgactttattactgatcagaggtaagggagaaacttgccttatgaagtgtgggctgtgtcactaggtggataaacaaagacagaactgttgagcagtgcaaatgtgcttcagggttggagtttctaagctggggcaggttatagtgctctgctaagttgggtaatgcttaaagagatgatgcaatgcttcagcgttagtggcagcagcaaagcgaagatgattatttatttttggccccagggaatgattttgggctttgtacatgctgagcatgagctctactgctgagatagacacagttccaagatgtgagttttgaatcaaagggatgaaaggatcttaggagaacaagctgtctgctgatgctctctcctgatgaattatgggtctttggtaatgtgcaataacaggaaaacaagaatttggggcaggatgtcttgggaaataggatacagaggtagaggataaagtcatgcgaatggagacagacataaattcagttatgtgtcaaacggaatgcttggggggagggtaggttcagatctcgtggctttaagtcaaggtagctccagggttcctttctcatatatgacttgtctgtggtgggacgatggggcacaaggagagattccacaggtttctatgaggtcaaatcccacagaagaggcttgttttagcaatgagcagtaattgatatttgcacactttctgcgactgatggtaactatggcagtcctgtgagttgacttggtatattggtcagtactgtgggcacaaatacggattttactttgccttctttggtaggaatatctatcttcttctcccctttgctctcttctttctctcatttcatttttctttcctcctctcctccccattctctctctttctcctgcgtcctctcccctctgactaggtattttaggctagttcagagtcactgcgcatcccgacgtggcctgagtttaacagtcttcctctctcaagcttctgggtgctgggaatatagcgatgtgacgtcatgcctgacctaagacaatatgtgtttgtgtttaggtcagtgtgccaactaaacattagctctcttcagatactcttattgctgcacaaggaattatattaagttttgattggccttcctctaacgattttgtttgattttatagctattgaaattgttctagccactcaaaatagtatttttatcaattctttgagaattgcacacaatgtattttaaccatatttgctacttactccttccctaagtcttctgagatcaaccccgtacctcctcctcaccacctctttctaaaattgtattttattttagtaatctaaggaatccaatctgtatttctcttatattcatgactgtggtggcatcaactgtagtgtagtcagcctgctaagagtcacacccttaaagaaccaattttccttcctcccgaaaccgtttcctgtcggtagcttccctttggggtggggcttgtgattcccctccctcttccattgttcccaccgttactgaggaggtatagatatcagggactgggcaacactattttcttataattccaagtttttaggccaactagactatacatctaatgaatctgtttgaattttagaatctattgtatttcatggtcagtactaaaatctaaaaattaaaattaataggaatatgtctaattaatgacaatgttttctatattggcaaaaccgattatttttaggagatacacaatatctatgttagcatagatgataggtttataccactaacattgttcatgtttctgggatgtataactaataataattgtttaaagtgacttcagggatgttatggtacatttagaaataaatgacccaaggaggacttttgtttctctattgaagtcatccttttggtgtaggaacaaaaacacatcttctttatttaatccatcaacatgcttccaattatctaagttcccttttactctaactgatagggatcttgcagtgggtgagcttgcaattcctcctgtcttcattgaaatagttaagagaacttgtttcagacattactaataagaacaaagaattctttattcaggactattggagagaggttgttgcaatggaggtaggagaatgaagtcaatttgctgagacaaatcctcggaaggtaggtcagtaggccacccgtgcttactgatgtttatcagagttgggactaaggtctggataatagagaggggtctgtctttttactatgtcttcagaaatattcctcaaatccccgatcaaatagtttgtggtttataaaacaggtaaggggttaaaaaattacatattaaaggactacagaaagaatatttcactggatgttttcaatggcaaatatgctctaaagaaagggaagtcaggggcttggaattgagatgaagcctgcctaaagagtaacctagttaaggacattttggttagtttatattctggtgagagaaaaccacagtgaacaaaatggaaaatttaaacagtatatatgcatatattatatagataatgacttgagtgcttagaagttaaaccacgtaggaaggtatgttatggttaaatatagctgttaaatgatattatctgactttaagtgataggcagtttaaatataaggatgacattgttttagagcatagaaaagagaataattattaatctggctcactcagtattgtcctcaagtttttcctcttctctctgtttccaggaatgttacgtttgtttgtttttgttttgttgctgttgtttttatagctctagataagatgatcatttggattagtgtatttgataaaggaaatcaccttcccctaggtggaagagtctctttcagtaattaagaacccaaatggaacaaagatggaacaaaagaggaattccttttcctcctcctctccctcctctcccccttcccacctcttcctcctcctcctccatcttcttctcctccttcctcttctttgttctcttctgctttaatcacttgattgggtctttcatccattttgtcttgcttcgatatggggactaataaagcagctttgattcttagtcctcagacttggattcaattatactgttgactctcctggaccttagctttgcagatgctatcacctggggctgtgaaacccttataatcatgtgagctgatttctcaaacctctttcttgacatagatataaataggggtctctctatggctgtccatatgtcttgtgattgatgtgataccttatacacctgtattttttctctctttatactgtctctatttctacctctatctgtaggtctcctattggttctgcttccctggaacactctgggtcatacactgtcctagttttcttctccattgctgaggtaaaaccctgacccagagcaaactgagataaaaggatttatatgttgtatgctttcacgtcacagtcaaggtagggcatgaactcaagtaggatcccaggcaggaagcatggtagaaagccatttactcatttgctggccatggcttgctcagcttgctttcttatgcaacccagggccacgagaccagggattctcccttccacctggtctgagccatctctcatcaatcccaaaaatgcctcacagacttgactacagggcagcccagtgaaaacagttcctcatttgaggttctctctttcctggtaattctagtttgtggcaagtggataaaactaataggcacacacacttaatgttcccctttctcatttgtttacatagctaattgcaattgcttcaacatttttctgtttcaaatttcattgcctgttactttattctgacagcatttcttggactaattatgagtgctataatgcaagtgtcccagcttctttgatgaaaggaatagctaagaaaggtctcaaaagcaatgatacttaagcccagacctgaaagataagtagaagtttgtcaggcaaaagaagcagttggtaggttagagacactgttttaaacagtaagcttgaagatcccctaggagaaagagaatatgaaatttttgaaggaagaaaaaaagtcctttatgaacagagtacagagagcaggaggcagctgcagattgcgactggggagatgggctaaagcaggctgtgctacagagtttagatttgattataaaggctacaaaatgtatccaagaaggagttccaagtgtcctccaactttgcttgattgtaactataatgtgtagagaaagtagagattttagttaacatatctctttgtatgttgcatattttggtcaggccttgtatttgctgttgacccagtcgttacttttttttttttaaaggcctcttctgtaatggaaagcattaaaaaattaatacattattggtgctaaatggaaacattccccccattaacctgttgtctatctttctgtcgatttgtctatttgtctgtctatctatctatctatctatctatctatctatctatctatctatcaatctatctatgcaagtcattgtgattcagtaagaatacaaattggctaaagcaggtgtcatgcacaagccatttaaattcagatcccctactgaaggatgttgctaatgcttggagtaattaggagaatttccctctggagttcttggtagcatgagtcagagaagaaagttctgaatagaaaggaggcaatagaatttgttatctgggttagaggttcacataacaaatgtagtttgcaattttctctcagtcttcaaattgcactctgcaaaaggaaatggaaatggactatgtagtcactcatgtataaaatctatttagaataagagcccagtacttaagaaacagagcttattgtttatgtgatttctatccatttgtctgatatagtctacctggaaaattaaatatctattcattatttattacagtatcaatggtggaggagttagaaactattatgagagacatctacttactattttattcttttattactgtactatttttgacaagcattcgagtgcctactatgtggcaaaataatacaggatgtcttgtggataaaagaatggacaaaatatgatgggtcccgacaaccacaaatacaaatataatgatgaaaatgtatagttacctttgaaatgacttggtctggataagaaaggagaggttacctctgaggagaagaaagccgtcttctgtgctgagctgtaatgtcttaatagacagggacagggaaggatcatagaacatcttctagagcaaatgacaaatacagagtccttgtgtttgagggagctggtatagtccaaggataagaagcaaggtggttaggggacagaagagtgtagattgaagttggagtgataagcatgagctaagttatgtatgtgcaaagcttggaataatgaaaagctatgatgatgagctgccagtcattttgacgatgaaatttttgtttaaataatgttcacaacagattgaacgcattcaaatcaatgccttgaagcatcttgtagttaaagaagagagaggctcatactgtggtgacagtggggatggagaagagtagacatttgagagatatttaggggttagaaccacgcaatttaaggtagattgggtgtaagaaatattaacaaaaaatgtcacgggtacttcttggtgtctgatttcttaatcaaaaaacatctttaagacagcaaaggggtatgttatcatttttactgagaatcaggacaggaactcaagcagggctgaaacctggaaacaggagctaatgctgagaccatggaaggatgctgtttactggcttgcttcccctggtgtgctcagcctgctttcttatagaacccaggaccaccagcccagggatggatggcacaaccatcatggtctgaaacctttcctattgatcgctaattggaaaatgccttacagctggatttcacggaggcattttctcaactaaggctccttcctctctgatgactctaacttgtgtcacgttgacacgcaaaaccagtcagtacagcgctgtgtaaaaagagaaagatttctgagggttgagagatggggggaagtatctgttgtgtgactgggattgaactactgttgcatcttgtacctgcaaccactgaactcaatagagactaggttgtgatctgatggaagggtttttgaggtcaagattattgagtctgtagtggatgcagtgcacttcagattgtgttcataaggcatgggtatctgagaagtgggaaagttgctgcagttaagttggcagatgatctctgattttgttttattgaaagagctgtttgccttggtaccacttaaagtaatgatgggattttcagtaagattggatttcagattactttaaagatatttgcagacatgcctttgcattccctgttatggagaatttattgttatgaatccatgtaaagtatgatagaacgtactttataatgtaatagacaaacaatacttaacaattacatattcaatattattttaatttgcaactccatatcttacctacttcgttattttggttaaaatctatcgtgccagatagatatttatattctcttctgcacttcaagtatgacttttttacttataactggtgagtctggggtttaattgagtagttatgatttgggttgctttgggcttattttagtcaagttcacccatatatcagtagctggctgcttagttcactggagctgatgatgcaaacggctgctttttcttctcctccaaaagcttgtttagtgttcttcgcatagagggcttctaagaacaggagtagaactgttaaagagatttgtgatccaggtttggaactgacatagaatcattcatatcacattctgctgggcaaagcaagccagaaggctggctcagatgtgagagctctgaaataaatcctatctgttaatgggagggttatgaattactttgaagagggaatctgatacaataagaggagaaataatcccagctgtggtttgaaaaaaaaaattggtctgtcacaaaattttgtgttgcaagatggcaaggtgaaaagccatgtaacaggatgctatgcttcaatatctgctcctttgcattatcttaattgtcatgagaccctaggagacgcaagtcctttgattattcttcttacgttcacacaacaaggaaaggaagaaagcagtaagggatattggctgagttccatgcctactttagtgaatgctaaaacagctgaatggattgatgagtgtttatgcggctttatcattgatagaacttcttaatgtggccatccacaaaccaagggtggagtttctagcacaggatttatcttgctctaggatgttccttgctctcctgtgccctggtggtcttgtgaaggaaggaaattggcagggatggggaaggagatgagaagcctgagagtccagccatttaaccctactgccttctattacacatttgctgtgtttgatatttttttccaccagaagagccccagggattcatgctgtgagatctcagaggttagagtaaggtaaaaagccatggggtgcagaggagggcacaaaaggcctgcaaagtttggagagaaatgaagcagaaaatgaaagaacacagagctctggtggaaaatagagaatcaagaaattgttgttaaaagtatgggtagaataagagatgtttttgaagataggtctgtaaaagtatccagtattatcagaggagtgaaaagaaagttaccagtgaagtaagtccaatttgtgtcccattgtgaaggtcataggaatgaaccataatattagaaaatactgttttagatacagactttggctaatcctgctctctagtaataggatgagtgaggaatcactcatcagaacctgttcctggtgatattttagcattacaggcaagaccttggggtcttctgattttctttaagagaagcacatcaacattaggtaaacagctcatggaacttcacaaggcaaacttctcatcactacgccttccccaacaatgaaagctcatctccttccttctaaacccatagggtaatttatcttcttttttgaactccacacacatggaatcgtactgtatatactcttgggtgatttgattttgcttaatatgacatttttacacttattcctgttaagtataattctagtttagttttagattgtattctactgaatgaagatagtatcccttatccattctacagggataaacatttggctttaggtcattccgagtatttatttgtaacgaggatgtgagattcattttgatacaaagtaatggagaatttctgaacaaaaccaacttagttatttatttattaactttggataacagtttctgattagatagaacaacaataaattgaacaccgaaggcaagctcaaaggtgaagtttggcatgacttttggtagcggaaaggtctgatgcactattgctatgtacaaaaaacaatgggaaatgacccagagtgtagacaaaaatggtcatgtggtggtcaaagcccagcagaagagagtgtgtttaattgtatacggcgatgaggcctcaagaatgtgctcagttcaggagtttagtaagattcatatcgttgggactttgtgggatgtgatggggtacagaccagaagactgcaaagcacgtggttgttgtggagaatgtgttaagtagcttagcgtctgggcctgggtgatgctcacactgcttgcttgctgtgacctggaagcctctctgctctcctgtgagcaacaaaggccagaatcccactactgtaaagtgaaatgacttgtcacatgtctggcgactatgtaccgccatagagcatcctctgtgactcctgctgtgatggagtcctgccaagggagcttagacatgtcatcttcattcttttctatagagaatgaccctcctacaagccagcttgcaggttagtgtagtgctctcggcagactgagtttcaaataagcaaagtatttgaagccacattgctattttgttcttaaatccttctttggtagctatgtgaacttttgaaatgactgagcttttctggaccatgttttcatgatccttatcacatagagttgtttctgagaataaatgaattcacatatagaaaagttcaagaacagaacctggcatgtggcgagtacatggtattatcatctagactctctttttgaagcagcagtgaatgatcccacattttccccggccgagtgcacggagtccatagccatggctgttgaagtctttggtacatcagtctgtgcatgtcagcccaactacgtgccaggatgctcaggttaggtttccaaagaatgagctcaccctcagtcgtggcctgtgtatgggaatgtagctgtgtcctgtccattctccatttcttcagtttcttccccatttcccaaagtctatgggtttttagttctttcccagcagttctctggtaaaccccgtgtcctttgaatatgtggcctggtcagtgtagacatagtgagaatttctctttcctattcattttctgaactctatttatgcaatgtaaagttataatcgttgtttcttctccacattatgctgtcaaatcagtttgttagctataaccaaagcacctagatctatacccacatttgactaatcttaaagttactccttcatttaaggactgcattgtctgcttaatgtagtttcaactgccagattggtagctgtcactagatgtactgctcaaggagtttctagtttcctggcatgtcatgcatggaaacagatttgaactaaagtgtgattgtgataattgctttactagagatgtgcaaagaacgtttggtaacacaaagctaaagacccagttctcagtggggagagaaggcaagagcagaacagtaaggatagcggaggagagaatctttgccatgacacaagatcccagccattaagaaaatggaaggaaaggattagctaagtagcaggaatgacccaattgcaatgttgtatgacacagcctgggatcatgttcactgcagtgagcagttcctgtagtggactagcaatcacagagaggagtagctggggtagattaggacaaggtcatcaaggttcacaatgttataatacaaaaggaatatttaatcctatgaatagtaagctagtagaaaatggcttaaggtcagaaggagacatgattagacagatgtaagttttaaaaatcctatgctggtagcttatagtgtctgatttgggacttgtaggaagtgtgaagtggttgtttgcaccacacaagtgtaacaaatatagcaacaatgactaacacagaacaaaacgtggaactaagaccaaggtatggccataggagcaaaaagaaagaaacattttgatagatttgtaatctgggtaaatgtcattcttgggtgctttgagtgatgagtagcccagggcttgatctgtcagaaagaggaaagaatcaagactcatagagcagattggtaaccgtgatgtgcattacaggacagggggttacaggacaatgggcttgggagaagtgaagcatccctgtgccttaaacaccattggaatctgtggggcagtcacatagaaatgcatagcaggcctttgcctcttgttcaagaaactcatgtgtgatttctgttgagcgttctgcaaagaggtattggggatcatcaattcctagtcataagaccaacgaacccttaaaaggtctagaagcatgcatgatgggactcccagaccatgaaagaaatgtgaagggtggcctcagaagatcattttgcaaagtgtgccagctggggaattggttgaaaataagttaaaaagaaaaaggtggccatggaaccaaatctaagttcacaaagcccatgcactacttaggttgggccaggcaagtggcctcacagcagttgtgcttcaggctggcctggttccttttggatgaatcctctcctcctcttcccagtagattccaattcgtacattctaccaagggtttgtggcaatttattagttcaaacggggtaatgatatctcctctgattttccttctgtttttaatggggaagaatgcaagcagaaattggctatgcagcatttaaagagaagccccactatttttcataaattcaggctacctagaaaacagcattcatgcagcatttacctttttaaaaattgaactctgagttttcatgcatttcaattatgaattcctttaaagcagaggtaagacatatttatctcaatgttcccagccctcagcacagagccccagcatccagaagtgctctgcaaactcctatttcctttcttctttaccgttatgcatctccatagttgagtaagcttagtttcctgagttctcttgaatcttcttactttatataacattgatgtcactgtgtaatgcctatttggcttcttaattttattcatcttccctccctccctatctccccctccctcttttctttccctctatctccttctctcctcttctcccctcccctcccctctccctccctacctccnnnnnnnnnnnnnnnnnnnnnnnnnnnntccttccctccctccttccttccttccttccttccttccttccttccttccttccttccttccttctttttctttcatgtgtttatatgtacatgtttgtgtatgtgtggaggaattgctcctcttcaaacactatccaccttattttcatcttatatattatttttgagacagggtcccctaccagagactggatccttctgtttcttcctccctggtgctgggaatacaagcatgtgccaccaggtctgacctctttttcagggtctccagggattaagctcaggttcttcatactagagaagcaagcactttgtaggctgagttgtctcctgagcctcacttctatgtcttttaactacttaaggtttggcatcttatgtttactctgactgttcaagtggaagggaatttattttatgacctggcatctgagagctggtaagtgaaatccaagcctaaaaagagccaggtggggatgaaaccaccagaatggactgccacttctcatggctccagtcacctctgcatcttgtgttcttctagtttttctttctcttcaaaatctccatgataataagcatctaaaacatgtaatagagcagatgaattctgaaactttttttttctgttttaattgtcaagaatttcaccattctgtgcatagaatcttgttgatgtcatatctgtcccaccctgtcagtcagtccttctgtcggtcagagtaggttaggatggttgctttgcctgccatctaggaaacatctacatgaggaggccatggccctcacttgatttgcaggtgagagcacccacctcattgctttagttttcctctgttttgcaacctgtctaagggatacatttcctgccccttcatcccttcaccctactccccaggtaacctcatatgcttccagaaacctgactatgggatctttcttgactttgagaagtttatcaacaaaaatgtgaatgtcttgctgctctttctttggatgccttctgtaggactgcaactagagaatggggggaatttggagtctttgtaccaactctaggtttagctcggttcattcaggtagttcaggacacagagggaataaggatgatggttgcttcttgcccccatatgcaccgaagcgcttcttgttttctcgctagtcaaacggggtttccttattcagaaggtttccaggttttacctattagagagtaaggaataaatggaaacttatagcaaaaagaaagaaagggcccaggtttactatctctttatctgtaccctatgcagaacacagttgaaaattatacttctcttagagtgaacagttcttaactgatggagatgcttcagctagtaaatttcaaaaacattctatttctgggtgggatggaatttgcattttaaagaaaaatatttatcattgtttcatttctttgcttgcttaggatctgtatgttttggtatatgactgggtggtcagatttgtaaaagcagcccattaagttgttcctattgtcatttaattttttttttcgtttgtacagggaatcagcagtctcttcagctctttaaaggtggtgcgccttttacgcctgggccgtgttgctaggaaactggaccattacctggaatatggagcagcggtccttgtgctcctggtatgtgtgtttggactggtggctcactggctggcttgcatctggtacagcattggagactatgaggtcattgatgaagtcaccaacaccattcaaatagacagctggctctaccagttggccttgagcattgggaccccatatcgctacaatacgagtgcagggatctgggaaggaggacccagcaaggactccctgtatgtgtcctccctctacttcaccatgacgagccttacaaccataggatttggaaacatagctccgaccacagacgtggagaagatgttctcagtggccatgatgatggtcggctgtaagtatcttttttctttctctattaaaaccaattttagtctttacagttttttttttcttcttacctctgaactctgattggattgaaatgatctttctcttaaggaaggttttaattgaaatcatttgcaattggtttacttttgattcatccctagggaataaaaatgcaaggaatgtattttactctttgggatgcattagcacatgaaaaactgtgtgtggggagtgatagaaaactcagattgggaagtctgcgatttgattccatgcatgttgttgtacctggcagctctggagaaagaactagctctggtatctagacaggaggtgtctggcacattctgtaggttttgttggcagttggattcctaaaaaagcagatgggatatatatataagaccgtaagttagaaaatattttagtcaataactgaatttctgaattaaagtggacttcaggatacagtttgatgtattttttttattttaatttttttataatgaagttagcactgtagtcagttgagtttgtgacaaagaatgaaagggttggtgagctgaaagcctgcagcagtgacagagtccaagactcagtgtgcgtgcctgactacagtgacttgacaatgctcttgaaagcagaatgccctttcaaagagctaaagaccatgtgctttgcccccacgttctgactgaatgacagcagagttccagacatgaaagatgttcaaactttagatgctgttttaaaatgtctcgaaggaaagtttccaggcatctccaccttcaagctgacctagatgactcactgaagcccagttcagccaccaaaagtaacttcaagattgtgctgaagacgtgatcagccttgacacgttttataagccttgaagtcattattgctggtgttttgtgtagtaatttagtataagccttcttctcctcctccttttttgaggctccaaattatagagctttagatgtgaacattcatgaaaaagattcagagtctaggccaatgattctcaatcttcctaatgctgcatatctgatatgtgaaccctgtgaggcttgcgacccacaggttgagaaccactagtcaagacattcatgcctcagagagtccagaagctactggtgttatgaaatataatatagcacggaggtacctggcaggctcatggcaaggtaggcccctgagcaattatgttatgcaataaatctgctataaaggaggtttactaggggaagggagaggagcgagggcctggagaaggggtagacaaagggacatgtagacagacagatagatgggagtagagccatgagggtagagatgaggtagggaggcagacaaggacagaaaggggaaagagagaatgtggaaacagagaaagagagagaaaatgtgggaacagagagagggaactggagtggcaggcagtccttttgtaagcagcccacacttggaggcaggagccagatgatgatggaagctgttgctagttccctgagagaagccttgtggagtaacctgaagctaacaattgaaacactagtgttagcaagtgtttagttccctactttagttattatgtattcagccacagagacaagagtacccaagttctgagggtggattagggcttcagtaagatctaagagtagaatgcaagtgttgcctcttctaagggcctttgggagggaggcatattctatacacaaagagatagatccatggtgattcatttaatgggtactcatatcaaaaaggtatttgggcaatagtgtgataaataaaatgttctgtcacatgtagaattcagcactatgctgcttttaacatttatgaaaggcatgttacctgatacagtctagaactggctaacctttctgaggatattacaaatggactagaaattgcagtggttgtgcagagaggggctctatttgctttgtcttgatttccttcttttattcctggaatatggtatcagaatctacagtatatgttttgccacaggtgttgattcttgtcattgtcgttgcagggaagattcagagttgggagttgtggatagaggtccgtgtagtgtgcttgcatagcatgaaaggccctgatcattcttagcgacagcactgtggtggtggcttacacgagatgtcccctgtagtcttgggcattggaacactttgttccctcattgatagtgggaagtttaggagacatggccatgttggggcaagtgtgtcacaggagatggcctttgagagttgcgccatttctacctagctcttcttgcttcctacctgtgcttcaaaacaagagctatcagattcccgctcctccttctgtgcttctgccccaccaccgtggagtctaaccttctggaactatgaccccattccttccatgtgatgctctgctcatggtgttttattactgtgataggaaagtaattgatacaagccctcaaagcaaaacaaagcagaaaaagactcataactgtcttaacaccacaaagaccttctccatgcaattacggccctcccccaaccctccccagtctcttcaaactaacaatctattctacctctttattattttgtgattttaagataataaagataaaataaaaatgaaatcatgtaaaatgcaacttttaaaagttgccttttaagttccagttatacctttgagataaatgtgaatggaatttgtcaatagctttcttctgggttgcattttgtggtttggaccactgctgtttaaccattcatctgttttagaacaccttaattaaattaaacattctaattgtttatgttccctaagacatctccattgtgtgtattcactgttgatgctgtgttatgtgaggatacctcaccacaactgtatgcttttcagcgaacataacccttcacagccttctccctcctcccctcccattagggtcctttattctcttagacagatttcctctgcttttatgacatgtacacatatatgattttatataactatatgaaacccaaggctgtaaatgagggaagacactaagtatttgtctgagtcttgcttaatttaattaaagagaatatctcaattgtacttatttttcttcacataaaacacttttctcttcctgtctctctcacatatggacagtcttcataccatgttttctttgcccgtccttctgttttggggcagctaccttggttgcataacttacctatcattaagaatgtttcatgaatcagtaaacaatcgcagagctttccctttctccttccaagagactgcatgaccctgtggactgcccgtacctctgcctactatgaagatttcccttcactgatatctttcagggttgtcccagaaacagttgtaacactgcagctgccaatttttgtgtggtgattgcataaccttgagaaccatcagtaaaacaagccctagtcttctcttcctcactcaccatggggcacatgaacttacaggtgcactcctggcagcagacagcattggttgtaacaggagtagaaaccatagacaactttttcatatgacttgcttgtgccttcagaacctgcttgggtctgatcatgtatagaccagttgcatttgataattgattactactgtgaacatgctactttatagcttgatgggtcagataaaatcaagcccatgatgggcagatcaggtttcagtaattcactgtcaaatgttctatttctactaaggcccagtagcaggccatgagctgtctatcaaaagggagaagagttgtttgcagatgatggtagaaccttccttcaaaatcccaaatgtctcttctatgattcacctgtagaggcctaccaaaacctccaaacagcatccctatctgccactgataccccaggtaccactggatttactgcatcatatggtccaagtggtagagcatcctgtgcagcagccttgacctgttgataagccttctattcccggcccactcaaatctaacagctttctgagccacttggcatatgggccagggtaacacacccaagtgaggaatgtattgtctccagaatccttataggcccactaaacatcatgcttctttcctggtggtaggacggactaagtacaataacttatctttcacttgggaaggaatgtctctgcatgtgccatatactggactactggacttaagtatttcaccaaggtagaaggtccttcaagattaattggattgtgtgtgtgtgtgttaccaatggatttacagtcattgatatctcctgttcacttggtccaattagtataatgtagtcagtataatgaaccaatgtgaaatttgtagaagaaagagacaagcaaagttttttccaactaagttataacacagggctggaaagttaacatatccttaggaaaaactgtaatggtgtaatgctggccttgccaactaaaaacaagttgcttttggtggcctttatggacaggtacagagaaaaaggcatttgctagatccatagattcatgcataccatgtaccaggagatgtgttaatctgctcaagtaaggataccacatctggtataaatgctgtaattagagtcactacttgattgagctttcaatgttcaactgttattctccatgatccatctgtctcgatggctagataaaaatgttaatgggaaatgtatcgggagccatcacccctgtatctttcaagttcttgatggttgcactaatttctacagttcctccaggaatgtgataacattttttttcattcaatttactcttctccttgaaagagaaaattctaaaggtttccagttagcctctccaactgtaatagccatcactccacgggacagggaaccaatgtgagaattctgccaaattctaagtgtacctatcccaattatacattctgatatgcaggtgggtttgagatttatcaacttggattcctttagaatgtttctactttgaaggaattacagataaaggtgcttggatgtatgcagttatagttttgcatgaacctaagttcttaattctctgtaataatgcctaggatcacaagtaagtacatatttcaatattaaagaatttgccagtctctttttcaagaagggtagcctagaatatcatttcctaacataatcaaagtaaaataaaaacaatgtagaagtgtaaacacattcttatttcctttgttcatcaagctacaacttcctatctaagaccaaatcaatgttgtccgtagcttggaccattgaagtagttccctatattttttcttccatagctattcttatcctagaatctgtctagactctagaagctagagtaccccctttaaaagtaaaaacacagcaccattccttagcacagatatcgctagtggatataaaacaaagactaaattgcttactgtttccacatacatgtagaaatgtatttcattttacttttatttgttctttgagaatttaatataaaatttgataatatttacccctccaaacctcccagatcaaccacattccctactctgatgtctattcttggttatcaagttgactccatctggaattaacccaagtggcaggatacacctttgagagacttttcttaattaaatcatctgaagtgggaagactcacttctaatccaaatctcttgaactggaaacatacacctttgatacaaatcttttgaggtgggaagatccacctttcatctgggccacaccttctgcttccagcctctataaagggattggaagaaggaggcttgctctttttgcctgcttgtttcggctctccctgacaagtccattccttcactggcatgcgatcctgctcctttaggattctggcatctactgaagacctgctgagacatccagcctaatggactgagcaactattagattcttggactctctgtttgtagacagtcatttttggactatttggactgtagcctgtaagccattttattaaatcaatttattaaataaattttgtagtgtatcatccatgctacgatgtgatattggtgatacagctgttgttgagtcatttctgctcctctaaatgatagctcctttatattcctgtaagtaactccaataaaatccattgattcaccaagttagactgtggtggtatccatacatatcatcagttctctatctaggttaagtaggtgtttgtacccatctgttcgtacctctgttggaaattctcacacaatttcatttgggttttcaaaatgccattgattcatagttgattttattttatttttctatgttatgtgtggctgactatatctgcaagatctagatttcctaccctcttgttttcagtccctgattagttttaagcctggccaccttcttccttgagtttctgctatctcatttcagtgcatgaatagacatcttttcatctattctggtacttagcatcttcgtgccaattggctttacatttctgtttaagcctctgtgtgagtccagcttctatagccagactgttccaaggaaatgtattttaatattcttcttagttctgcagtctgtagtgcttttgtggcatatttcccttcagataaacttagagggttataaaagtctttcagactcatgaagtggtataccttgaacagttccaggctttattacacatgtatgtacagaatataaaatatgaacactgcagatgtttgtaatcttgttttttcttcatttaatactactaaggaaactaagcaaaaatattccactgctggtatcagaattgagtatgttctgtccatccatcatggacaagaatttaaagnnnnnnnnnnnnnnnnnnnnccttcccctccccctccccttcctctccctcctctctctccccatccccctctccctccctctcccccctccccctctccctgagagtgtttatctttccatctctttctttctctttctttgatgtgcatgtgtgtgtgtgtttgcatgtgttgtgttttgtgtttattgtgcttgttttattgtggggagagcctcttaaaattttaatgtgatgcaacaatatttagagattttagtggtagctaatccagtttctccatttgagtccttttatccttttgtggtgttttcttttctgattcttatgttcttaccatcgaatgctaagttgcatgttgactttgtctaataatttaaccatatgatcttttgtgagtgagtaccagagaaatctttaaggagaaattatgaatgtaatttagttttccttgggagaatgtaaacacaaatcttttcatctcatatatggcactgaggactgcctaaaggaatgattgctctcatgtctggtttgagattgtttgagttaattatagcagcactagtgactcaaagacagcatctttttcactagaaatcccatctttgtatgtgcgctgattccagaaaactgcagctctgcatctcagtgctcatcttgcagacaacgtctttgaagagtctactttctccagaaatttcgtactgcctttataacctttgaaaggaccttataaatcttgtaacttcctgagtttctcaagtgagtttcatgaacttcctgcaccttctaagtttcctgagcttcctgaatcttagactctgtcctctttccacaaaggctgtttcaatttagtggaaatagttatgtagttttggcccattcctaaggtatctcagctaattcccatgtctctaggataataatgcatctctgttatctgctattggggaagtttttaaacttaaaactcattcaattctaggcttgcccaacgtggaaaatctatttgttcagcctgaattgattttttttttgttcttctcaatatatgttttcattcatacttttatgacttcaaattgtctctttgtagttttggcatatttcccatctggagtgacatctatagttctgggagtagctattaccttaacaatttagtcaggtcttttccagtgttccacatctgtgtatttgtgaatgaatctgacattttgttcgcattcatgaaactcactctcaaaggctgttagtgctgttagtatcacagcagttcagttctccagcggttgttgagaataacagatttgtttttgttaaatcaagaggtgggtaatctctttgctaatttgctcagtaaatacttaatgatgctttcgtgaaatggtttctaatccacttaatttacataatcttgttattgaatcctaataattttccattttctaaagatcagcagactgtctaattttgcagctattcataaaacaccttagtacactgataatttgttttgatggttataaaacaacaggatctgagtgtagatttttgttttctaatgtgattatcctcttaatgtatttttatgaatcttcttctaaagattcatcaagaaagcaatttacattattactaaattatcatataacttacattttagcttaatataaccatcacaaagaactctatatttgcctctttattacaattttataaaacagagaaacacgaatagaaagtgagttacagatgactcttgttcataaatagtatttttctccttgtgcatatttgcatatgtataattgtattaattgtccattgaatatatttttaagtttacagatataatgcatcaaagggctaccaggttggattttgagcattcattttatttaaaacattacttattctttctactattgtttgattaagtttcagattgaggtagcttaactcatatgaaatgtaacagtgagaatttattctgcttcagggagctttgagaagctaagaaaagcaagactgaaagccatgaacataaataaattgttgaggtttaattggcaggcaagaaacccagttaataatgatgatagtgtgtacagttttccaaaatggtatcattgacggtcacttaaacactctagaagctttttgtaatggacaagaacagtttacaatcaagcaggaaaatggtttggaagatttattagaatggcaagcccacctgccaatgggatgtatatgatgggaaatttgactttccatgtaggtagtaagggttactggggtgtgttcggtcacacagtagtcatcatcagagaccagctccacacatccttatcaatagttggtgagctcactcatcatctctgtacaattcatactatgagtcaagtgaggttatggactttgtccttgacatatcctcacttggaaaaaaacatcaactgagcatagagactaagagaatatacattaattgagtacaaaggcctgagggaccatcttacagtcttcaagtctctgtgtgttttaattaatttttcaaatgttaagtgcaagaattgaatgatggtatttccatcactttttttttttaaatgctgacatcctagcgtaccttctcatggtaataccactgttcattgggtggggcacatgattctgtgaaaaggagatggcatcacaaagagtgccattgctctatggagaaaagaagtgtcttctatgcaacaagctgaataaagagatgagaggaaaggttgtcagggggatatcatgaaggtaagaaaacatgcttttgcagtgtatttggaaagggaaatgtttttccacatacaaatgaggcactgggaagattgaaatgtacttgacttggggcacaaaagacattttcacatgcacctgtggagacctatgaggttacctgacctagatggattcacagaacgactttaaagtgagttattgttctattccaatattaaggacattcttccaccaaccgtcatgtaacaattgagttagctcaggtgtaacattaactgctgtgttacacggtctcctgagcctgctctcgaggtgtaggagggaaatggagtgtgaacatgctcattttcacttgggtttcctgcttagccagatggggagagctttaagcttggtgtttattttggaaactgggccagttctttatgttcgctctacccttgcctgtgagaaagatttttgcttttatcttctctttcctttaagaaaatgagtatcccatgaggtgacacattttgtgaagctcacagttcatagttctaggtagttcttttatggttaatactttcagatgtagtccagtggtttaaaaaaagaccatgtgaggtgcattcttgtccccatctccttatcaaaatagaactgctctttgcaggaatgttctttcatatcctgtttcttttgatgccaaatcacatttccacaaggcctgctagaatatgtaaagcttttttccagaaaacagcaagaaatgttcttaatggtctattaagaagcttgggtggggttgagatccaggactcaggaatggaattgtgaattactaagagttctttagtccatttgggactacagtagctgttataaagcactggtatgtggctgccaatagaagcttcttggcccccagtgagcttgttaatattcagtgagcttttcagaacgtcagagagaagtactgcacctctctctctctctctctctctctctctctctctctctctctctctctctctctcccacctcatctctaccttcctactgatcacaatgtccatctcttcctccacttccagcttatctctgtagaccaggatccaagactttgtaggaatgaacaagagactgagctcccagctacagtgtctgttccttttgttgttgtttagttgaaaacattgcctttcagtggatagctgtgttcactgagacaatgttgagtgtgtaaatgaaatgatatagtataacttagaatatgttgccaaggagagagagagagagagagagagagagagagagagagagagagagagagaggaaatactttggctttttggtagaaacttgagtggaaagcagatgtgtctagagagaaagaagggaaaataagatatcaaaaggcttttcctcatttcaggagggctttgactattatcctaaaaggtctgggataagcaaaagaatttggttcttctgtgtggaagattagttcaagaagacaatgggtattggcaatgaaaccacctaataagctgttgtggtagctcaggatgacatgatgaggtgtgacctgtatggaggatgtctaaatgtagagttggcatgttttgctgttgttaaagggtcacatagtaactgttttagggtttactaatgataccatcatctccattattgtattgctggaatgtccatagaaaacacggaaatgaatgaatacaatccaactttgaacaggtggcagactaagcagttcactgcttgtgagagactgtagacttctgaggctggaaacctgcgttcaaatgtttcatcatctcttataagaatttataccagctttctaaggtatgggccatgaccctgtgactgaatgtaaggtacatggaaatttggtatcagtaaaaggtttgggaatgtgcaaagatcaaacgttaattaaatcagttgcagaagggctcagaggtgttttggcagtgcttgctaatgctgcactgcagttctggttctgaacagacagcaaatactctctgaaccctgcaccactaatgggtcctgcatactacatagaaaattgttattttttatgacttattgtcagtaaatattcattttgcatatctattttatatgcccacattcttggggttgcataaaaatacctgagcaaaaaggagaaacaagtggagaaagtttaagaagcttggggataagccttcacccataagatgtagagaacacaccctgtcttgtcttgcagagttatttgggatatccatttgggagagcctatgaaaaattcctaagacggattttaaatttgtagttgatgatgaattgagtgtgtggggtactagagaagagtctaaaaggatgcatagatttctacaaattcagccagatgagctataaagcacatttatgaggcagaagagaaggaattggcagaatgatgctgcagccagaggagatacctcaggtcctcaggctggagggcttggttgggccattggaatgtgctgtgggctttcagagacctgagccacggagaggtggctctaggagtcattgcctatagaaagtaatgggtgttcagacaggagggacatgaagcttagttgggaaaggagagtctcgaagtgtgtaaagaagagagggaacatatgcttaaaaattttctcttgggttataaactaaaattgagcaggagagaactttttactcagaaaagaggtatattttctcattacatgattatttattgatttccagtgagttcaatttgacctctaaggagctgtgcacgtctcaggacagactgacctgggaggcaaggggttgttttttgagaaaagaagcctcatagggtcctcatacaggtgtcatcaagagtcaattgacagataattttagtattgcataaaatattatttttcatagattggaagacttataaatgtacatatgagtatatttagtgctagttaaaataaatatcacagcctttatgctagagtttcaaaatagttttgctgtgcttagagaaggattttccttgagatgctttctaagccaacttctaagtcactggcagccagggatgcagtgctaccgttgggttgtgtgtgtaggaaatatgatctttatgtgatgaaaactacattcagtttgtcttttgagaaatgctggggacatcacaaattctctttgaaggtacagctgccctttcagaagcagtttcaacagctgccttttggactctaccacctttaaagctgaatttttatttcagaacggccagcattcataatttgtagaaccctaatctggaaacattaccaatttgaagtagttgggaaagaaaaaccccttcattggtatctggagtcgggtatagactcctcctcagagagtttgttagaggatttgtacttctggccatgttttcttgttttgagagggacttgagtttgtctaccaggttcctcagagacctgacacctattttatagctgggtttcttcaatgtctttctttatgagttcctaactgagaacagacacctttcttctgtcctcaagtaagttccttcaacccttactgcgtggcatcctcagacttccccatctggatgctcctttctcatctattctaggactcctagcagcagctggaattaggggcaaacgaggtaggtgctcctgaggcctatgtttatcagcattacccttttcaggctcctcccactcggattcgctcttattcactctttctagctcccccaaacctatgaccacccttctttgccttagttggtgataagatggtagctcttacagatggagtttttaaaaattatttcacttttgaaccttctcatacagtctgtgtgtgtgtgtgtgtgtgtgtgtgcatgcatgtgtgagtgtgtgtctgtatgcatgtgtgaatatgtgtgtgtgtgtgtttgtgtgtgtgtgtgagggagggagagagagagagagagagagagagagagaggtataggatagcttttattctgagtcaaatacaaaggaagacttcttgttctttgttatcattgtcttctccttcttcatctgtttcttcatctgcttgttcttccttctnnnnnnnnnnnnnnnnnnnntgtgaatatgtgtgtgtgtgtgtttgtgtgtgtgtgtgaggggagggagagagagagagagagagagagagagagagagagagagagagagagagagagaggtataggatagcttttattctgagtcaaatacaaaggaagacttcttgttctttgttatcattgtcttctccttcttcatctgtttcttcatctgcttgttcttccttctccttctctttctcctcctgctccttctgttcctcctgttcctgttcctgctcctcctcctcctcttcattctcctcttttcccttcttcttttgagatagggtcttgctatgatgtccttgaaccctttatgctcctgccagagccctgaatagtggcatgattttcctatgttctctaactatcactctaatgctgtgtgaaaaaaaatctgtaagggttaaagggtggaagagagcatgatgttcaatagttaaggtaagagatgatggtggtagttggaaatgattcgattgcagacttgtagttgaggcttgtaaatgggatggggctagggagagaagaattcacttttaattcactggtgtacgcagctactgtactgagccaaaggtgctcttttgtaatgtcgtgtggactgttacatatatggctctagaggttagtaaagtgagccaaagtgtggttagatatgctttgtagttggtttctccctacaataagtgctttcatttgattctgctctttggcacctcatccatctcttcatccccatctctacctctagtccggagacatgattttgcctcctcaatccatggaaaagcacacatccatgtgaataaacacccagccttgcatcctccgtctcatgcacctgcccagtcttccatgttcatgcttcctaaaggcttggcttcctgggtccatttactttctgttgggagcgaacctctttccctgtcctgcagcttctcttttttgacaggcttcctagacacgttctccccatcgtgtgaccctttagcgattttcacccttctctgttgcctccttacccacttcccttgatagttctctgtgttgccggattgcctttctccaaaatgtcgaaaactgtgatattggaaacgaatcattgacagaccaagggcagctgccctgagagcctgaacagtttttctcacagttgctacttagtgagaagagctggctctcaggtatttctctgatgatatggtctgatagttctacaattagaaatcctactttgtatgtccttgatgacagaagggcctctgaaactcttttccccaaacagatgtaattctctatctattactagttccttgtcacaataaagcagaaacatacaatgagatcactcaagaaggtggaggaaacacacgagcctggggtgtgccctttgggtgggacaggaaggagctaaggctgctcagtgataccaacaaggaaaagacggttcagactcctttattcctaattctttggtggaaaattaagaaaggcttgataatttacagtgctttgtctgcaacttactaccctgcagtctatgttccctagtcagacggatgttcctgtcacatcagatctcattatcttgttaaagtctgtaactgggtcctttcatttttttgtgtgagtgtttattacttgcctctccaattaagataggagtcacaaagtcagagaaattgtacagtccagatctgttcctcaggagtgacaggaacattattttggaagagatgagtgaatttgatactccatatttgaaaagtggcccaaaccacacagctccataatagtggtttccaatgtatggaccatgaatggagaagcagaaatccacgtctgatttcaggttttttatgaacagaggttcgtccatgtcctctgcctccttttgtttttcaaagcaccctcaacagcactgtctacctgttcttttttgttggctctttaagggattcatacagcatgttttgatcatatgcaataacaaattttatccaattcatcctgcttcctacccagttctgtgtgacttaaaaaaattcaagagccaatttgtgataccccaatattcttgagtatgtcctctactggaggaccatcaacttgccagggctataatcttagagaaaactgtctttcccagtaactaaccattaccaatagctccaaggcactgaggtgatactgtgttcccaacacctctctcgctgctaggatttgttctggcttgggcttgcacaggttttgaacatgctgtcacagctgttgagttcatatgtgtaactggtttgttgtgtgcagaagatgttatcttgtccccaccactctaggctctcacactctttccacctcttctgcaatatctctgagcactccaagttccctctagggctgacagttctgcagccatttatttttggaaccttgggtaattgtaggccactgacagtcacattctctctctctctctctctctctctctctctctctctctgtttgtgccacacacatgtgccacatcacacatgtagaggttagagcacagtctctgcagctgggtttcactttctaccttgtttgagtcggagtcttgtttttgcgtgtccaaacattctcctgtcctcttttcccatctggccatgagaatgctgggcttatgggtgtgtaccataacatcagactttttgtgggttctgaacccagatttccatgattgtgaggtgagtgcttttcctactaagcaatctctgtggtcatgcaggctgctctctatgtaattttccattattctgacttcctagccttctgcatagcaaataggatatactctttgtttttggatttccttcaacctgctttgggtctctgctgtcatctcccagacttgtattttactctctctgcctccttccatttttggggggggggggagtgggagaaagagctaagattttagcaatgaataatagaacaagaacaatagcaaagttattttctatctcaagggcctggcacttaaaaaaataattcatgctttcaggataactgttttggccctaggctttaagatgtctcatccaaaacccaaagccaagctagtcttttcattcttagcagcagctatactgatcattgaaaaatagctgtcagtttccacaccaatcatagaaaaccgactatcaatttcaacgacaggaaacagagtggcaattagggaggcctagggagtataagaggaaacattcctgtgtttcttctccttaaccacaactaaatctggacattaatgaaaattttattattttattttatttatttttgctcattagcaatggaaaaacactactggagaatttaaatggtttgcaaacaattacctgtgtcacaaatacagtttagacaggggctcttgcaggccagattggctttcaactcactctgtagccagggtgatggtaatcctctggccttcaattctgaggtgctatgagtacaggtatatgctaccacatctggttcataccgcgttggtgatggagcccaggccttgcatggtaggcaagtactctattaactcagctctattccaagccccttgagtttagttattcagtttgactattctcttcaagaaaggggaacttaaggtcagcatgatttcaatactgacttttagaagcacaaatatgcttacttatttatttctggttaagtgaagagccataaccatatatgtgtattttaaagaaactttaatcacaacaaaatcacattcatttatccaaggagagatctccatggcttctgatgtttgagcccagctttcctgtgatgaagggaatctacttgatattttcatcatttagagtagttcctagagaaaataagggaagtgatgggatttggttgatatgaaaaggacacaactgagagaaacaggaagaaaccagacacatagaatggggaggggaatccaggtattttgtagccctgtgatttacctgattcttttcttttactcttttcttttaatcttaattctataattcagagtatttgcatgcatgaaaaattaatttaaggggaaatactagagctatagaagttggtcaggaggggatgaaatgttacttgaaggagtaattgttaataatgtgcacttgtatatctaaaaatatcatagtgaaacccattagtttgtaccattagtatatcctaatagaatttgtttttaaatcaaagtaacatgttcccatttaaagagcaagtaagtggatagtaagatttattttgaagaatagaaattatattttctacacatattttcctatttcccagagtgctttaatgaaatttctgggtttttttggggggggtacttattatctatattattagaggaattattttggtgtcaacactgtctgttggtgtctgtctctgaagaattaaattatagtattttttccttttctccatgtcttacatttccatttttacctttcttatgtattctggttataattgtgatccagtcacaatgttgctttcattattactgctatctaaacaccttttacaaccaaaccatgtggtgtactctgatcatgtcccagaacaacactgagttctctctaggctaataattgtcattaacttcttttctttgttttccatgtgcttcctttaattccatcattaaagtttcctcctgtacgtaatttgaaatctcagggcaatcagctggacagttgtagctttgctttttggtttgtatctttcctctcactttatccagcctagactcttgtctatagactgaacacacagctctcagactggtactgccattatggtctccagggtcattttgccttctcttttgtgaatcctttatatgttagatttagtttttctctgatattacatcatgccttaagctcatctcccaaatcacatcttttcctaaccccatatattatatggattaatattgtaagataaaaattatactttaggttgtactattggcctaaccttttcaggttatgtttgagaattaaagaaaggtatgatctttaccagcattatggataaagctggatcaaaatatcttcaatttcttaaacttaggatttgatttattctctatagaatacaagacagcaataaaagaacaggaataaatccattcttagtaatacagctaaactgaagacaattgggcctaaatttcctctctttaatggacaattcatgcctttagttcctgactttaattgacagcattctgtatctgtgagtgactcagcacatcactatttagattttattggcaaatcatagatgacatttcagtttggacttagacaaatatattgtcagatttgaatattgtatctgagctcgattttagttaaaaagcacttggattcctatgaagttgtcccctgtgaacactgctatgtcagcatcactgttaaaatctttggcttgacttatacacccaaaaatagatgtatggactgtggggtctacttaattggagaggatgaaacacgaagtgtcttcttgttgtaccaggaatttttctgttgttagaacttggcctattgaaatgaaagcagaaaaagtctgacaagtcaaagttaccatgattggtagtaaaaggaaaaatttgaaaatattatgattgtattctgtttctgtggtataaactgaaaactcatacgcaggggtagaagatgacacagtgggaattaaacatggtaatgaatctagggtaagcagtgctcatgactattccaatctgtagatgatgagctattgaagtctctgagaataaaattacatgatctggcatgttgaaaagagtcagactgatcattgcattgaccctaagttctacagtgacaaggtcagatggggaagacaatctagggaggttagtgaagtagttgtagtgagatgtcatgatttcttgacccaacaaagtagcaatggtgagaagtggttggacactagttatgttatgaatatagagccaacgagacttgttaacacatgaaatatggggttaaaaatatttgtgtgtgtgtgtgtgcacgcgcgcgcgtgcgcgtgcacacgagtgtttgtatatgtgttataaacatgcaactatcacagatgttagggaactatcgtatttcctagagctacagctaggtggttgtcttcagtctcatatgagtgctaggtatcaaaaccagatcctttgcaagagaacaagtgctgttaactgctaagtcaactctccagcccctagatgtagggttttaaagtgatggagaaattaatgatgaccacgacatttgcttggcctacatacatctaaggaagaggaagaatctcagagattctggagggattgatgtggtgaaatgaggggctaagttttgaaaaggcatattaagtttgagatgctggttaggcatataactacagtaatctagtagctctttctaatgatgaatctaggtttcaggaacagctcctgggatagtaacagatttggaaatggtgtggtggtgatttaaaagtcaaaggagttgttgcagcctcctcatgatagaggataaatagaaaagaatctcttgtgacttcccatagctagcagttggcaggcagagaacaaataaggaaatggaacacgaagggagcattcagaagtcaaaaggttctgtgggaggaaggtgcactggaggccagcaaagaggcatttgcaataggggatgtgtgatcagttgaaggtcaagcaggacaggatctatagaagttgatattctgcaaggagtgggatggtcatcagtgactttgtgcagatctggtataatcccgaggaccaaagctcttgccgacttaccagttacttcatttgtaaagtggggtaacacttacttcatcaaattattgtgcaaactaaataaattaatccatacaaaatgcttagaacagtgcctgacaaaaggtttgttgcttttggaaatgagtcttcaagtactcattcgctgtctgtcaagatctcagtgagggcacagagctaattaggaacctatctaccttattgaacatttaatccacatataatccagtaaagctaccagtgaacctatgaccagagtttaccaaaacagaaggaaatccaaaccatgtctactgactaagcaattttgaagttaccattacatattttctttttttgaaagagagtctcttattgtcatggagtttgtcaattaaactagactgcccagccagtaagcctcagggttccttctgtctatgccaaccccaaactgggattacaattgcatgaccaaatacccagtaattttatatgctttctgtagctcgaacactggttctcctgcttgagagacacgttcgttcatctacggagctatctccccagtacgatttggaatatgattatttattttcccttgttgcctttttttgttttcagctcaggttcatttgtctcttgtcagccatgctaattatgtatgtaatctagtgccaacattattctatgagaaataggtgaaggggagagtgggagatgaggttgcatgttccttgtcacccttcatcattgacccatgccaaagaagcaggtgctagtgattcagttctccccaactccattcatttatcaaagccctttcccttcacataattgtactggagataggcacctttcagaagtaagaaagcttaaatgagcccatgagataaagttcaggcttgatggacctgttgtccttacaagagaaggggaaggggtggtggaggtggagcccagaggtagagcacttggttattatggccaaggcggttccttaatgacaaacaccatgaagaaaataaaacagtgaactggaagagacaccaaggctgtctttatccatctggagcagacatgtgggaaggcagccagccattaaagccagagagaaggctcccattgaaaccctgtttgccggcaccttgacctttgctttccagccttaagaactgtaaaagataaatttctgatgtttaagtggcagaattttgttatggcagcctagatgagacctttcttctgttgccttgacaatcattctgtgaagcatcggtgtcatgtggaacttttcctttcctgttagtcaattcactgtaagcatgggacatttttacatagtcttggatctaatggagcatctttaactgaaaaccctaaataattcctactgcccaagacatcagatccgcagcatggacttttctgcttcttttcattctcccctcctcctttcttctccaccattttccttctaatctgttgacttgcactgtttcctgtggaacgttgactgtaagatatccatccctctgttgctttgccattgttaatgtttgtgaaagtcaaatggccaaaagatcttatcttcctcggtttgttcattgatcccagatgccaagttcttcaaggactcttctagattgtcccaggtcatattttattaatgtgagaattattatatcagaaatatacaagggtttttatttacaatgttgaaacccataattggaaatctgaccgccagttacaggctagttttttttaaaaaggtattgtggccccatgttacagttgatggatctcatttgtcatctaggcacaaaggagatgtgcacttcactggcgatgtggggcaggtgctcatgacaggggcagtaggaaatgattggttactgttttattcatttctcttgtaccgtgaaatgcaaaaaggttatgcatttatacttacacccctatgtaactttatacacattattatatgaatatatatgtaaatatgtactttggactgacacaaatctaatgttgaagaacatttattatgacattcaacaggaaaaatgaaacagtacattttccgagaatttttaaagagcaggaggaagcatttagatgggacattaaatatgcaagctatagtcacacaaaagaaataccatatggtttaatgccatacattggtttgttttaaacctttagaggtttattttcaatttgaaatgagagtgtgccttaattagtcttgaagtgggctagcataacatatgtcttaaacagtcatttacatagtagttttcctttcctttatttatagatttaaattctggtaagccaacaaaatgtagttcacagacaacaggcaaccaaatctttttcactcacttgctaattattttcatatttcattgaagtatggttgacagatagaacatacatttgaaggatattacttgatattttagcacctattatgcatattatatttttcagtaagtgattgtcagaaaaaaatctaattttcatatttatcacagttacactgtatatgggggtaagaaatggggagaatccttcagatctagtttcttagtatatttcaagtataaaagacatggttattaattgtgtttactatgctgcatattgtttctccaagatatattttaatcctgaaagttcatgtcttttgatcaatctccccattttcccacaccctggctttctgtgaccacatgtctactctgtttctacaatgaactgtattgagttcatatataagtgagactatacattgtctttgtgagcttggcttaggtcacttagtgtagaatcctctgagttcttctctcttatttcaaacagcagggtcaaggatgaacccccacccccagtctctttatctgtgtgcaggctagttttatttcaacttgacccaagctgagtcattttggaagagggaacatcaattgagaaacacttccaccttcctgagcaataggcctctggacaagattatagagcattttcttgtttgaagtgagggggtgggtgaggcaatttaccatgggtggtgtcctgtgctgatagtcctgggttctataagaaaataggctgagaaagtcatctggatcaggccagcaagcaacaatgcttcatggcttctgcatcagctcctgccttagtgttcctggcctgacttccctggatgatggactgactacaagtgtaagatgaaataaaccctttcttccccaagttggttttggtcatggtgttttcacagcaatagaaatcccaagtaagacaatcttcttacctttgatggacactgcagttgtttcaatttttggctattgtatataacactacagtaaacatggcagtgcagatatctcgtcaatatgtggatttcatttctatagataaatattcagaaatggtatttctagctgtatggcagtcctatttttttttaattttgtgagggtagtttccataataatgtcatcaattaacattcatcccagcaatatgtaagggtcccttttctccttaccaacacttatgttactaggttttgttgacagatattctactaggtaggagttgacatattgtggttatgatttgcatttctcccataactggtggtgatttcaaacactgctcagccatttgcatttttcttttttgttttctgaaacagggtttttctacagccctggctatcttggaacttgctctgtagactagcatctactcaaatgcaaacactacttctctgtattgtgaaagacaggcttaatttttctttcttgtatttataatagttataggtctttagcacttttttccccctgtagattaatgagtagttttcaagtagcaagagagagaaaaaaaatctctgtgttcctgaaaccttgtttaattatggagcatgccaagcccccatttgaccaattttgttgttgttgttcttggtggttttgtttctcacctaatgtaagcttctccactctgccacaaaatgtgtttcacagttctagaataaggataaaaataaagtaaatgtttgggaggcactgtgagacagctctaggtagagagccacacaaaagtgcacagttactggcaggaatggctaattaattgtgctgcatttaagggatagcatggagcaattaatgcatttaactgcttcattgaaacagaaagctcttttgcagcttgcataacctctttgtataatgagaatgcttcatgaatttataactgactgtgtgacctctgattagggaatctggatatgcaactatctctacatttttattttccagtgtgtaaatccagacctgagctctggactcttcattttgagttcttaggaggagatagggaaaaataggagagtaagattctttttaaaaaatttaactcatttgtatactttgtatttgtaaacccatgatttaatgaatcttattaggcacattgtaatttttatttactgtgagcataatgccaatcatttgtattttaagaaaaaaattgattaagggcaatatcgaatttatctgttttagagttggatgcaatatagtcaaggtccagagagctcaccctggcactagaggagaggtggggatgtaaacaggcagatgctacattacaaggcagctaggaagtgagccccatttctcacacttagcactcttggtatattgtattttctagtcatgagaggttctctttttccgacttatcaaatcgcaaccagaataagttttccagagaccagaaatggaatttcagctttcttctctaaggttgttgacacatgggagctgggatttatcagtattctggctcctgtgtgtgtccctggccttccaccccattcgtcttcaccactggaagcctccagttgccttgccagtttttcccagtgggagtcagaatttgaaagcagggttgagcacagttcatttccccattcatttggctgacttgattggaatgctctctggatgctcttgagtccagcttaaatgcaagccttcggctatgactttacatagggatttgccgatatttttcagagtaattaatactactctgcaaaaggttggtctcttggggctttggttatgaagttcagctttttatccccacaccaactgtcttttctaccttggtactggagagactgtacttacagtaatccctttcagtaaagtacctggttctgagaccagggaaggtgactgtttctctcgtagcatccataggtaaagcatgacagaagttggtgagaacagtgataatcgttgacttactcccaggacattccaggaggactatacatcatctcattttacagtgagcagctaattctctttctagactatcagctaaggatgtaagcccttacaaatactgactcattgtatacccagaataacctcatgagaacagagatgttattattcaggttttgtgggagaacagcacagagacttggcttgaggcaagcacctggctagtaagacgtggaactttaccagttttgttccagtgtagagtgagctgctcagtttaaccttctctgcaggcctacacttttcctgtctgacttcccttttatcctggcacatctgagaatgcatttctaactttctaattcacacagaaaaaggcacacaacaattatatattatcaaaatagcccatctccgggaaatagctatatttgttttataataaaatgaaaacaacttcattgttgttttgggggtataaaaataatatgtgcttgtaaagaggtatggaacaatacataaatgacaaaggaaaaatgatcaggaccagaaacttcattatacaggagcatttgtgtaacaggcttcctggtgtttctcagcgcacacgtgcacatgtgtctaatttttttttgtaggaattcatttgttgtttttaaatctatttccatggctacaatgtaatggggatatatttctgtgacactgggcataagtatacaccatttttaatatatatctttagagaacttttcagttctaatttgcttagaagaggaaaacttgttaaattgtgagttaatttttgtattaaaaaatataatttaaaatcccaactccccaagttaaatacacgagataatgggaaaatcatatatcctctcccctcctttctttctctaattaaaaacccttttatttacttatttttcttttttatcaacacattttcacaccatatattctaataatgccactccaactcttcacagattctccccacctcattagcccaactccatgatatctctctctctctccctctctctcccctctctccctctcccctccctctcaaaagatgaaaagtcaagtaaaacatcaaggtcctttgattatatattgtagttttcaagtgtgtgtgtgtgtgtgtgtgtgtgtgagagagagagagagagagcatgtgagtttctgtgttttcttaatttattttttaagaattatatatataaagattacatttatataattcctttttctcttcaaaatttcctatgccaccctccatgcctcaagttcatggcattatattctttacttattactgttgcacacatacatgcatgcatatatacatacatacatgcatgcatgcatacatacatacattaacacaacctgctgagtccatcatgcatgcataatacatacatacatatatgcatacttgcatacatatattaatacaacttgctgagttcatttaatgttgctcacgtatatgtatatgtatatgtatatgtatgtatatgtatgtatatgtatatgtatatgtatatgtatatgtatatgtatatgtatatgtatttacggcttggcttactgcttggcatgggatgacctatcagaggactcaccccaggagcagactcatgcttccccactccacagttactattactgcctgtagcttttgacctacacatgtgatttcctctgagaggtctctcccgcctacatttccaggtaatcgttatttggtttgcttttgttgtgtgtttaatgtttggtacacagttattttcaagtattatgggttcagacatatcattttgtatacaatttctgtttatatcatgaattgaagagggactggaggtcatgggaggagttggaggaggacagggatggggtggggatgatgtaaatactgtattggtgtatcaaattctcaaaaaggaaaaaaattgaataaataagtaaatgaggtactttagagaaagaaaggaaggtttctatctttgggaccaaccttaacaatgccctctgtatccacatagcagtagcttttttttaatgtggcacagagctggagtgggaagtcatttatatatgtaacaaagttcacaaagaacattgacaaatgctttcctatttagttcaataaataaatttcttggatgaggacaccaggcagaagagactaggtaactcatccgaaatcccacatcttgtgaaattagaatattcgttcagcaatgctgaggccatgctgttagctgtgctcaggcacaagtgcggctgcctggtggaaaaacagagaaaaagaaaggcggagagtaaccccttattgatagaaagattaggaaagaattcttgactgctactacgatccttcttgtagtaatcggattccagttgagtcttttgaaaggaatctcagcggaaaagcagttagatgttaaaagaaaagagcgattggaatgttcaggtattaagaagaatgtggggtatgctttgggcttaagaattaagaggatgatgtccaagtagttaaatgaatttgcgaaaatgggtcaacgaaaaagaacctcaccagaatgcctggtccattttcaggcaggcatattgaacaaattcttttctcatctcatttccagtaaatagtcagagcaagtattaagcgggattttatatgtacaattagaaaggattttatgcttagtattatactggatttgggtgcagataaattcgcagaacactttcagtctttgagtcagccttccctgttaggatagaggggtatatagagaggtttttagcagttatcacatcaataatgaattattagtgcttgtgaggatacagtgatgttttcagaaaagcattgtacttgagagaatgcaacaaaataaaaagatgttcagcttttcatcctctgccaggggtaaatttgaagagggagcagtaggcacggctcctggccttacacagatataaacagaattcaatttcttcaagggaaaaggactgtgtacaacaaggtagcatgtgggagacaagcatattttacttggatggaaaaaaatgaagcattgctattttctaacataccacatttggtattcagacaaattttgaacagtggtgtaagctatgattttcatatttattagtttatatccttatttcattggtatgaacctcaaactctaatttctaacatttctagaagacagtcctcttgactttccacgtgtataacttctgtatgtatctttttggactatctttagcaatcaagtggacaatggcttattgatgtggatcacttggcctctgcagttttccttttcatctgactcccttcctttaccactaaacgaaggcaaactccttcccagcactaagagttcttctggtgagagttctgtctgctgagtcccaacatttatttatctgtgccaacctgctgctgagtggtgcttcattcctctttgattgccaggactatccaagtcctcagatcccattagcgatgtttgctagcctggaggttttcagggcttcatgtggcatcagggcaagcctttctcttccctcaccaatagaaaaacagaaaagatagctcagtggaacaacaaccttggttgttttagtgctctgatgaaatggctccaagactaggggatttccctgaagttaattactcctcacattaggttggttcttcctaataaaatagcacagggaccccaatgtgatgctgatcatttgatgaggtttaaagaatgcatagccagattggaaggctcaagaaatgtcctgtccttttaagtaagctgtgtccttcagtaatatcctgaaatgaaacaattattttaggcatggttgtggttatgaatatgaacatcaaccacagctggcttcatattctgactgagccacttaccatgcaggtgatgttgggatacatactcatttctaaagcgcttttttcatttattatgtggacgttacatatttattataacaggagttagagcaactgttaagtgaggtaagctctatataatgctttcctactatttggtgtcaaatcaagatttgataaaaacttccttacagctttaccaccttctagtagcaccatgagctagggaccaagcctttgatgtatgggttcctaggtaacactcaagatctaaattacagctccactctcaagaataggaaggaatgacctcagaagaatgtacagagtcatgcgatgagttggtggaatttgagaacgtggtatttaaaatgagagaaagagtgcaattcatcttagagaaagttttggtagaactccccatgaagtttgaccagtcacaaagccaactagggatatagattagtattttcctcatatggcttgatcagaacaggggagagccctacctttcagaatgtcatgcctatcaaatgctgttgcctacaataaagcccaatgtgctttttgttttttctcagctcgagatgcaccttgacagatttgggaatgcatgatcttaattaagaaaattcctccctaagtcttgcctgtagataagacttttgtgcattttcttgatattggtgggtctataccagtgaggggtggtgctcctcctggacaagtggtgtagtgttgtctaatgaagcaggtggaataatccctgaggaggaagccaataaacagtacacctccattgcttctgcctcttgcctccaggtatccaccccgacttctttcagtgacgaagtatgaccccagagacagttgtaagatgaaataatcctttcctccccacgttgcttttggtcatggtgttttatcacagtaataggaatcctaacaaagacaccctcccttctaaactaacatattgaggagtaggatattgacttgtgagtttttatggagcacaaatatccatacatatatcaaacatatttattgtataagatatctgcccaagtgatatctgctagataggaagacacttaaatattcctacatacagttccatatttagagatagaatatctaatgtaatggccaggtaactaaatataattttaaaatgttcccgctttttttaaaaaaagaaagaaaatctaacataaagaagagaaaaaggaaacaaagaaaaaatatagtaatcttttatgttcaagctgaaaaaaataacataaatgaaaactgggaaaaacatgacataacctctagactatcatcactctataaaatattattaaattcaggtcaatatctagacttgtatctacaggctggaatgagaatatgaaatattattcttctaaagagaaatagaggcactgggagtgtgtgggctcttattatggcagatatatttttcttctacttgacttatttaatacaggtactgctggaaaattgactattgacttgtgctatttttcttctttacattcatactttattatttgaaaattaaaaccgtcaacaatagtaaatgtcctggtctttctccctcatttctcctgtgtttgttgagcagctatttctcatggagaaaatgaaggcatgcctggcaagaatgtttcttttggatctcatgcgtaatgttcaatgtgggtgtctattgtggtttaagtggtaattgttcctcacaggctcatgtgtgtgattgtggggcttcccagttggtggcagtgttttggggaatgtacttcgggaacatgggaacttgctggctgtggaagagcactagaaggacttgaagggttgcagcacattccatttccagttctgcttttctcttgagcatctaggttatgaggataaggagctttggacacacatcttaccatcatgagctctgccatgccttccctgacaacgtggactgaaaccctgataatgacaaatacagatgtggatgctctcatccaaccattggattgagcatggtgtccccagtggaggagctagggaaaggactgaaggagctaaaggggtttgcaaccccataggaagaacaacaatatgaaccaaccagactcccctagagtttccagtgactaaactaccaaccaaagattacacatggagggacccatggctccagccacatttgtagcagaggatggtcttatctagcatcagtgggaagatgggcccttggtcctgtgaaggtttgatgccccagtgtaggggaatgccagggcagtgaaatgggagtgggagggtgggtgggagagcatcctcatagaagcagggataggggagatgggatagggggtttgcggaagggaaaccgggaagagggataacatttgaaacgtaaataaataaattatccaattaaaaaatgatcccctcttctcttaatgctgttttgatgaattattttgctgtaacaatgaggaaaactacctacctgtacactttctacacttcttgtttgtgttactttgggttatttacttacatttataagctttcacttattgtagatgaaagattaacatctgccttgtaattgtttctgagaactgcaggtgtataccctcagtgtctataggggattagtccctagaactcccttagacacccaaatctgcacatggcctgcctatcaatgtgtccttaaaatcatgtctagattatttatgattaaaaagttgtatcatactatttacagaataatgataagtctgtgagcaatctgacaatcttttagaaagagtgaacatagggtgccatggcctttgagactatgagattgtgtctgccatgttagtagctgaagaagaacaagttgtaggttagtatgactggtggagggcaagggtgaaaagaatgtgtaagcatatgtctgaccaatgatagagaatagccagttgcattggtataacaagagagaatgaatggactgaggcaggcaaactggttatgtgcagtccttgtccttgaacttacattaaggtcacatatacaatcaatacaccacccactaattagtctgtatcttgttatttagtccttggaagaaaaggcaccagggatcacattggtctgtttcatcatcataggaacataactaattaaaattgttttcaccaccaaaggtggccattgttatatccctctcctgctgataccaagatggcatttatatatcttcagggaaatacatacacacacacacacacacacacacacacacacacacacacacacacacacatacacacacacacacacacacacacacacacacacacacacataaataaacatatacatatatgcttttatattcgtataaagaatatttatatctgtgatgggaaacataaggagctttcattgacttccagtggaatatttcaggataactaatccttctggtcacatattatatagcatagtgttccctgcttacctttgttataaagtttatatgatatctttattttctgcatgtttctaattgcctctttgttagaatcttgtttccccaaatccacacattggctgctgtgacatgctgttaaatccttgtgacactctgcctcgatttccttactgtatcttttgcagtttacagaggtttgggcctcctgaaaatgtaaacacatgtaagattacttcagagtgcatcaaccaatgttagagtgactcactgtgactaactcaattgaaatgcttatggaagattactatttttgtagaaggaatatggttaacatctgagagctcattatatatcattagcaattttaattttataataacccttgatggagtccccagttttaagaaaatgcattagtgtatcactcacctaccactgaaaatgcagcccctctcacactgattatccattacaatttctgtggatgtgtttctttttggcactctccatcttaagaacaaagtaggaactaatcacgagttgttctctttttaattttgagattgtaattacaattaattacaacacttctttattccttccctccctctaaaatctttcatctatacatctctccctacttttctttaaattcatggcttcttttttcatcaattgttattgtgtgtgtgcgtgcgtgcatgcgctattaagtccatataatgttacttatccgtgtacgttttcagggctgcacaactacttggtgtgctagggtgctcttccctgcagaagactatctcctcctcacagccttaccccgttgcctgtagttatttgtgtagggctgaggccttctggcctttcccctatgtgatctgccatgtttctcagcatcatccttgttcagctcctgtttaagcagtcatggtcagattttatgggtggggcttctgatgtcactaggagacacaatctcacagcaaagtccctcatcttctagctctcaatatctttctacccctcctctataaagttctctgaggctcaggcgtaagagtcttttgtagatatatccattgggacttgtctctgttgtgatcagaaaaagagaaagagctataagaatatgttctggcagggtgtgggggaagggagcattctggcggacccatgctgaggcatccttttctcctgagggaccagacacacaccagtatagtatagtatagtatagtatagtatagtatagtatagtatagtatagtatggaacagagcttatttagggcatggggaggggagctaagagggtagcagaggcagagaaagtcagagaaggagagaatagagacatagatgtcagccatgaccacatggagagagggggaagggaatggggatagagaggacacaaggggacaagatgcaagagagaggcaagagagccaagagggtaagagagagaggaggggccaagcagccccttttatattgggccaagcctaccttgctgttgccaggtaactgtgggggtggagtttagacacaataccaacagtttccacaactctgaatttttattgcttgtgttttttcaattctttttgagaaattcatacataagttcaatgtttctttgtaaggccctctcctccttgttctccagctctttctgtgtccccatgacaacatctccttccaaattcatgtttgtttctctaattacaaaggcatgtgttctcacacaggaatgtgcacacacgtgtacacatcatgtgcacacatacatacacaagtgtgcatgcatatgtgttcacatatatacacactaacataagctcacaaggaaagaaatcaaagaattttctaattacataccaaaatccaacgtacccttttatattttagtttttccagggtactataattattctaggtggttatataaattgaatttagagagtctctaccaattagacaaaccattgctatattacctaaaaaactggaatcaactgcgaactcctagtctccaaatacagacgtttcatgtttattttagcataaggtctgctgtttatttatgtgactattagtggatcattttacatctaagacccagaggaagggtttgttgttgtctatggcttcatttactttgataaattcgatccctccacttgcctacatatttttactccttacaattttttttaactaaatagtgacttaaaagccatttgcagacattataaaacataatgcagttgttaagggaagaaaaccgcagaggtttcattttgcttttggtgctaatttatattcttagcaggaatttagcctttactggaacgacttgccaatctgtacaacttgaaagaaaattcaccccactaactgtaattatttcagtattaaggatgtgccttagtttccacagttacaaagacatagaacattagtcttatcttttacaatgtagtacttgagcacagagggttacttttctttctatctatctatctatctatctatctatctatctatctatctatctatctatctaacctatagatgcagtagatgtagatgaagatgtagatataagtaacagatattatcaccatataagtgaaagcagagctggcagtctggatcttgaatgaatcctgcagatattctacagcatcaaacacaacaaagatattatttgatttgtagttgttgctatgatgatcttgaaaaattcttgtttgatttgttttgaggtattttgtggtcattttcttgtatgcattttaagatcacctttctagctcattgctaataggagaatttctaattccagtgtgttgatttatgtcctgtcgccttactgaacctagtgctagtattttgctgattccactttggctcctgttaagtgacaatattctcaaatgcttctgctcctctccatcctacactgttttcttctcacatgatcttctttcatttcttggagactctgtagaataggtcagagtagctgtgaaaatgagcatgttttctctttctcaaatgtaaatgacatgtttttttttctctctgtttcctggccactagctgaacagtttactttgcaatgaattccctcctcttccaccagtaaatccatctgagccttaatgcagtgggtgtgtccagtcttggactaaaatctccaaaataaatatttccctttttacactgagtacttcagatatttcactgcagcaacattaaactaagactaagactaagaaagaaatatatgtaagtgtttgcccaaagtacaacaggcacagacctgataggtagagctggggtcgagaaatctacctccagtgaactggagacttctgaccaattgcatataggaaatggaagaaattaagatttttttttgtcctttagtgcatactattttgttattagagtggcaaggagaggcctcatcatgatatttattatcttatgtctatgtgtattttggctgcacatatgcctgtgcaccacagtaatgtcttgcgtctgcagaggctaaaagaaggcagtggatctcctggaaatggaactctaggaatggttttgagcaacactataggtgctgagaatcaaatttgggtcctttgtaagagccacaagtgctcttaattaactattgagctatgtcttcagccccgactgtagtatattctttaaaaatgtggggaactaggtagcccaaactttgtttccatctcacagagagctgcttgcctctgcattagagtactgggactcaagacatgtcacttatgaaggccacagaatcaaagagcaaggagactctaacagactgaatcatcttactcatccagttgaaagtaggtaggagattcttatgggtaagatgtttggtaattcattggaatattgtgttgactctatagtcaaagtaaaaaatctgaaaagaatagcctcaacattctttctcatgtttttagaataatttactttcctagacaaaagtcacatctagaaaaatatttgctcttctttaatatcaacagtaaggtcggggttcctatctgttttacccaggaacattctaactgtttaaactataaggtaagctatttgataaatcttttgctatctttgaaatataaaggctgcagttggaatgtattgtatgactgaagaataaattaaattaaaagaatgtaaaggaaattgtcttagtcaggatttttattcctggacaaaatatcatgaccaagaagcaagttggagagaaaagggtttattcagcttacatttacacattgctgttcatcactgaaagaagtcaggactgaaactcaagcaggtcagggagcaggagctgatgcagaggccatggagggatgttctttactggcttgcttcccctggcttgctcagcctgctctcttatagaacccaagactaccagcccagagatggtcccacctacaagggcctttcccccttaatcactaattgagaaaatgccttacagctggatctcatggaggcatctccccaactgaagctcctttctctgtgataactccagcctgtgtcaagttgacacccaaaaccagccagtacagaaatcatgcaattcatttacagcccaaatattttgcttcatttgaaaaacatctgaaatgaaagatacttgtattcaacaacaaaaaatacacataacaaaaatacatttatttttattttgtaggtgtatagatgacacatgagtgtgtgtgagagagattgagagacagagacagaattagagatatatacagagagaaacaaactgagagacagagagaaacatagtcagaggtagagacatagagtctgtgtgtgagagatacagagacagaaagaccaaaacacacacacacagcgtgtgtctctgtgtgtgtgtgtgtgtgtgttgctgggtttcaaactcaggaccttgcagctgctaggctggtgctgtgtaattagctgtttgcctagcctctcagaggtctttatttttctgtaaggcataggctgttagcagttctactttgtgttaatctgtttgctactctagtcattgatcctgaccttgagaaggcccaaatgggaaggaacatcagaaatgcacctcttctccttgagaagctatttgtgtattcttgttgctcagacttcctgtctaggtgcatgaccctcacattctagaactggaggtgagcccaggggctcacattcctgtgctgcatggccatcttagagctcaggtcccttgctagtttctcagtttagaggttgttatttcctttagtccttgcctgaagttgtcaatgataccatagggtgggagggaataaaaatgcacaataaactagcaaacagcatgaagacaaatcataacagacatttcatttccttctcagataaactgacaggcctcataaaccgggggggggggggggggtaatcgacaagctctatgttgcttgcttttaattactcctgaaacacgcaggatgtgactgggccacactttatgtttccacagagactagaacgttctaagtaaacaagaatttttttagctatgatgcccgactaatctgtctcacttccctgagtccccacatcctacctggaggaaaatgatgacattaggatgaagcaattaaagacagagaccttctgtctagagagacaccgaagaagctggagtttgtaggaagttacagttcaaccacctggaggatgtaagattgtaaaggtacagataataggacgtgaaaatcaatgctgtcttttaaaaaacaatctagggaggaacgagatggcagtgtaaagtgacagaatgtaacaatcaaaaaaattagacacaaggtatttgagaatactttgaggtgggttagatactgagctttttggaaattttaatttatttattttattttatgtgtataaactttttttttcttgaatgtatgtatatgtactgcatatgtgtatgtatatgtactgcatatgtgtatgtatatgtactgcatatgtatctgatgctcagggagctctgaaaaggacatcacactccctggaactgaagttacagagagttgtgagatagcttatgagtagtgggaactgaacacaggtcctcttcaaggacccactgagcattctctttagaccccagagttcatcttaaatccattaaactgtccttacaggtaatgtactagcttataggaaaacaagaatgagatacaatgtcaatgtccccataaaatgagacaaaggataaaaggtcatcttcctataacacaaacaaacaaacaaacaaacaacaaacaacaaatcttaggattggtatgctttagatagtggcaagttaggtggccctttcatgtgagtgatagaccattcacttagtatttgagtttaaatttcaacttgaaaacaaaggagataaactctttgtgttctctttgttcaactaaaggatggttgagttttatgctccccattcaatctttgtttattgtttttaagagaaggtggataattcttatcatcaacagaaactttgaacagtgttgatacaaatgaagaagagcttgtataaaagacttgataaagaggtgctttgagagagaggaacttctttgtttcttttttgctttagctcagttactatctcagactttccatactttatatggtgacgtacagtggcatgaataaatcatatcccaatgagatagattgtaaactcgacgaaatacacacaacacacaagtttgattttactattttctaactgagcatggtgctagacactttgtagattctcaataaagagaacaaatgagaagttgctctcaatgaaggggccagtgaatgaacaaatgaatgaatgaatggacacatttttttttttgatacagaatgatttaaaacaacaacaactcaacaaccaacaatctcttgaggctgaggaaagccatagtcattgcctattgaaagggtttctggtgaggatgggcgatgtcccaaacatgggagagggtgttggaaagagacagatgggtgatggatgtgagtgggcctggtcccagcctcagccttagtctagttttgataactgttcccaggtatttttctcttttatcacacttttaaaagcctatttaaaagcacactggagattccttttgatatagaaagtcaaagtgatcaaagcgtccaggagtagacattgttctttcactctggaaggcaggctcatcattactcttacttcctttgcattggcagttgcttcctctagtgggaagctgggattcactcactgaagataagagagatgccagggattgtcacaacaattgaacacaattggcagtaacttccaacctttggaagttcaagatgctttctcccttcctgtcttccttcctgtcttccttcctgtcttccttcctgtctttcttcctgtcttccttccttccttccttccttccttacttacttgatgctgacagtcacagcgaactgataaaaaaaatcatctagaagtatcagggactgtgtcaggggttctgtgatcagtgagttactttactgtgacaaagaaacggggctgcatctttcatgtggcccgaggaaattgccagaaacaaaatgatcggccacagaggagcagatgactgactctgcttttgaagtcgtcaatgtcatgaaggatgagtactgatgtcatggtagctacaatacaaaaatgattatatcatatgtaattaatgcctttataccacagaccaaattggtatatttttcagaaaatattgattatcagagatcatttcttaagtaaaaaagtatcatacctaaaagagtttnnnnnnnnnnnnnnnnnnnnctccctctccctctccctctccctctccctctccctctctctctctctctctctctctctctctctctctctctctctctctcactttctgtttttattttcattggttattttatttatttacattacaaatgttatcccccttcccagtttcctccccacaaaggccttttctcctcctgcctccacccagcctctatgaaggtgctcccccacctgtccacccacccctgcctcagtgccctagcgttcccctttcctgattaatcaagcctccacaggacctaggggctcccctcccagtgatgcttcttaattgtcccacccttcttcaacccttctcagtgaaggagaagggaataaaggagatttcatcaagggagagaaataagatgaatccaaatgttttccatgttctatggagtgaagtggaggatgtaaaaccgtattcgttctaaaggatccaatgaactgaggcgattaggagacagcccagaaagggaagtagagatagagactacttgtgcagaccacgttatgaagaaggtggtatttttcttagcttagtacaggaaaaatgccatctaaacttggagcaactgtgttgctgacttttcaaggatacctttagttaatcaatggtgagctcaattttgagtttggcaaatagaaagactttctttgtcctctatgacattagtcctgtttgcattaaagtttctttgtatctcatacacagagagcttgaacatgctagctgggtattagaatgggttctagggtttagggaagttgggtatcatcgtgctttagactcacaccctccatttggcttgtgatagggaaaatgacttgaggtgtacatcacagctgaaaactctgttatatagaactccagtgttgggagtatctttagtagccatttagccctcagtaaatcattttggaaaaatataaaatttctttaaaaatactgtttgtaactttgatgacatgctccttctatgatatatataatatatatatatatattatatatataattgaacttctatgaatatttacacacacacacatatatatacatatatatacatacacacacacacacacacacacacacacatatatatatatatatatatatatatatatatatatatatatatatatatgaatgattgggaatgaggggcaggtaacacatatgcttccccatatgaggggcaggtgtagttatgaagaagccattgggttttgggggaatcaggtagagcatatgctgtgattcctctgtgtatgaaagtgtcccagtaggatgagaaaaattaaaatgtctcattaactagaccgattctacatttcatctgcttgtacttctgtcaaaatagtgcacaagcatttcaaaacagctcaattctatgtgggggctccacgcttgtagactctgacagattaatgctactgaatgaaaacatttatagtaatgaaaagagaaaggaagggtaattttaatcctaacatataaaggagtcagtgaggctgaatttattgtatgcccacatgggaacacgtttttgaattgctttcactcttaataaaaattatgacttcagtgtggactacagttgtgacaaattcgtcaggaacagtgtggaaatacttttaaaaaggtttgtttactttattctgtgtgtatgtatgcttgccttcaagatgtatgtgcaccatatgtatgcctggtgcccacagagcccagaaaagggcatcagaccctctggaactggagttagacaaagactatgagcaactgtgtaagtagttgttgggtagcaatccttggtccttggcaagagtaaccagtccctttaaccactaagtagctccccagatttagaatactttttttttataaaatactaaaatttctgtaatatcaataaaccacagtctttaattgtatcctctgtttcagttcttgtgaaactcttttaggtatgatacttttttacttaagaaatgatctctgataatcaatattttctgaaaaatataccaatttggtctgtggtataaaggcattaattacatatgatataatcatttttgtattgtagctaccatgacatcagtactcatccttcatgacattgacgacttcaaaagcagagtcagtcatctgctcctctgtggccgatcattttgtttctggcaatttcctcgggccacatgaaagatgcagccccgtttctttgtcacagtaaagtaactcactgatcacagaacccctgacacagtccctgatacttctagatgattttttttatcagttcgctgtgactgtcagcatcctgtatatggttacataatggcagaaggcaagtataggttgaatagccaacactgttcttgaatctggggttcaaaggcattgagtaaattaaatggggatgtgaaattcttcctgtgtttgctttagctgtctgcttttctagttcttgtcttttccttcagtccagtaaggcaaatgatgtgctgggttgtacctctctttcctagaattgaggaattctatgcctcctatgaacatttgtttgttttaccctaagatttgttggcaaaattgacactgagaatggattggcatatggcatgatatgatatgatgtgtgtgtctctgtgtgtgtgcagtgtttttatatttctgaaaataatttaatgttccttgagataattttaatatgtctatgaataatttgatatttttatatttcttgcaacatgtataaatgttgctagcaatgctggaagttgaaggtctgatttgtaggcaaaggtttgttttgtctgttgtaagtactagttttatttagtttcacatttaactgcatatcagtttctttgaccattaacttttttttccttttttcttagatattttctttatttacatttcaaatgttatcccctttcctagtttcccctccaaaaatcccctatcttctcctccctccctttgcttcccaacctatccactttcacttcctggaccaggcattcccctatactgcccctatactggggcatagaaccttcacaggaccaagggcctctcctcccattgatgaccaactaggccatcctttgctatatatgaagagagggccatgtgtgttttctttgattggtggtttagtcccagggagctctggggttactggttagttcatattgttgttcctcctaggggcctgaaaactccttcagctccttgggtattttctctagctccttcactggggaccttgtgctctgtctaatcgacgactgtgagtatccactactgtattagtcaggcactggcagagcctctcaggagacagctatatcaggctcctgtcagcaagctcttgtttggtatctgcagtagtgtctggttatttataggatagattactatgtggggcagtttctggatggtcattccttcagtctctgctcctaactttgtctctgtaactccttccatgggtattttgttcccccttctaagaaggattgaagtatccacactttggtcttccttcatcttgagtttcatgtgttttactgtatcgctgataagcagtgcatactttaaatataataaactagcccatgtatatatttaaatttactttgtcaacctttgctttttaaaccaaagattttaatccatttatagtagttttccttcccaatatttagatccatatctgtgatcttattttgtgccttcagtgtctaagtttttaagacttcttctttttcagtagtcttcttttctgtattccccttatgctatatgaagttaaatctccatgaatattcctgtcatggtttttctagataccctagtggctaagcttaacagagtctcttgttcatgactatctctattttctcccagggtagcataggaagtttaaaataagatccattcactcccctctgaaatttcatgctgttttcttcattctatttagatttttacctccataaattaggtatcatagtgagcgaaatacaatcaccatgacaactcatccttcacttttgaaaatataatcttggaatttgactctttatgatctataaattatatttatattttcactgtgtgtctctaatgtattcatagatatcttaaaccaagtgtctggtgttgtttattcttcattaatctataattccaggacagtgacatgtcctgagcaggtgcttaataaatacattctgactcattgatttcacatccgattatgctcataagttttcattaaatgagaaaatttagcctccaaatggaaacatttggaggttcttctgctgtggttagcactgatttgtcgtgcctcactggtgtgatactgactcagtggaaactttaattactaagccagtttggcactggaagcagtgggtgaaaagactgataaataaacaatgaggaataaagaaatagtatttttttttgtgcctttgggaatgcagtaagcataatctgcttccaatttttatttgctacttgtccacctaactataccttttagttcttatcatagtcacactttgtagaggaagctctgatacattgtatttctttgccttctgttctatcctataagatcattgtagacctaagattctccacaccctctttctatttatctatcctgttctttctcactatccccgcatctttcaaatgaaaagatgcttcttcttttgttatgcattgaacattcttgctaaattttagtcttgtagtttccctttggtttatctagaaaaaaatgtttcccactcatagaaacttttttcttccctaaccatatctgatagaaaaaatagcttagaaaccaactgaattaacttagaataatgatggagggacccgatattagacttttcttaacttatattgcctgtggtcaaaggttaataggaattacttctacttattttcaagttatttgcttaaaatgttctttagccacatccaagtttattttgatgcaattaaagaaagtaaaagcggaaccattgtattaatagaacagagggattgttatcataaagaacaaacaggtgacaaattggaccaccttttctgctcccttgcagtgaccatttgttaccgtggtcaaattttgaagagaagtgtgctcttctaacctttcagtatctgtttttttagatgtgaggtaaggtgctgagtgagtagagaccttgcctatagatgacattatttacacatattcaaccttcagtcatttataaacttttcattgcaattcttaatgtagttgctggaaccaaaaaagttcactagagtgcttcctagaccccatagagactttaatttgggaaagtgttaaaatgattatgagcagaatgactgcataaacaacaacaacaacaacaacaataacacaagaattcacttgagtagtaatttgtggtgcatgctctgtcaatcgatggacaatgtagctgctccaagtataaaagagatctctggagacctccttctagagctttgaaagacttggagcatagtaggaggatccccagtggagaatgactgcttaggatgtgcaaggccctagattcaatccccagcagcctgtgtttcacacacacacacacacacacacacacacacacacacacacacacacaccacagacttctactaaatattgaaaatatatatactttttctttaaggacattttctaggtaatgggcacatggatatatgttttctcctaatttctagtgttcattggcaatgtattaccccaaagaattttcagatgcagagtagagcttatgtagatgcagggctgatgcagagctatagcaaactggggctcactgagagtttggattggcaaggaggatttgcttgaagctccccacaatttttcttctagactaaaagattactataaggaagagcaaggttcttggaactgtttctacaggctcattccagacttacttgtggcccattgaagacacagtggagagttccaacatttttacttcctggagtgtttaaagtattattatcagttttttttttctgtttatgacttgtccctcagtgttacctttcctcttacaaggatacatttaaaatatgtgtaagtctagtgagaattgcaacagagttcatagaagggagcatttaaaacagatgtcccatgcatgagaagtcgtcgcttagtaatgttggtgaccctttacaagatgtcttctttgagtttgtttgtttgtttggtcttagaaaatgtacatctctgctgtttttactgtttttttccctctaattatatcattagttagctttcttgttgctcatagcattatggtgatgggaacacatggttcgggtttttttttttttttttttttttttttttatacatcatgggcagggaaagagggaaggagagagagagggagagagacagagagagagagagagagagagacagacagacagacagacaacagagacagacagacagacagagacagagagagcatgaacattcagggaaggagaagagaagagagaaataaagaacacagaattacttctgccatctaggtccaacctcctagacattttcaaaaactcccaaattgtatcatctgaaaagcagcagcctcgcagtgtattcaccttttctggaaacattttagacccaaatcactatatttctactagtaagatgacctactaacttgatatacatgatgcatttcaactctttgctccatttttattaaagaagtggtttactttattacagtgatgaggctgaaggagatttttttttgaagtagaaattagatgtagtgtgtgtgtgtgtgtgtgtgtgtgtgtgtgtgtgtgtgtgcacgtgcgtgcacacatatcatgcaatgattcagttatggaggtcagacaacttacagtaattagtcatctccttctactatgtaggtcttgtggatcaaactcagggtgtctctcttagtggcatgtacctttagcccctgaactattcctcaatcactgactgagttggttttgactaataggtttctaggtctgtattactatcttaagggttaaaatttctggccatagggctattacaatctttctataatttcctaggagactgaataaagtacgaccaaggaatatttaataaaatttagagcactttaacattttaaaaatagaaaaaaatttcccttctcacatactcaaagctttaaggcttatttagaactaattgagcatattggaattatgtgttatttataattttattagccgagtctgaaaaccaaagaaagggtaagtgtcaagttcctttccattattagactgtgttatgaatttaaggtcttttgctctattttggagttatcattagaggagattatagggctggctatctacagattcccagctgtgggagagagagccatgcattcatttagagctctaaaaattaaattaagaggagttatctttcgaaacatccaaaaaagtttattgagcttggtgagtttaatttcagtgcatttaatgagagtcaaaggtggattcatttagtgaaggctgttggatgggagcagctatttcatgcagagaaaggaagagtggagaatatcttacaattaacattttgcttctaatatatcagctatacaaaggctattgagagtttgttgaatgttaacacaatgtaaatcattggcagctaacctcaacttccatgtgttgaaaactcagtttaattctgcttttacaaatacagcatcatcttctggaataagaaagttgtattaattcagtggagatatttctaaatatgcagtctcaacgtgaaggggctggggacacacacacacacacatacacacacacacacagacgattatcactcagtcataaaaaagaatgactcttttttttccatttgaattaaatggatggaactggatattatcaccataagcaaaagcaatcaggacatagaaagctgtatgttgcatgcaacttttcttatatctggaaattgaaaaaaaacacataagcaaaaatatgatctgaaagtagagggagtgttgttatggaaggagaagtgcatcaggaggggaggaagagagagaagatagggcaggaagggtgaacaaggagggtagaattaattaaaacactatatatgcacatgcaaaaaagatcatgactcatttgcacacataattaatatgagtaacatcttatggtaataacaaaagagaaccagagaggcaaacaccagggcacagatagcatcagagactccacccccatccccatcagatgctctgtgcagtggatgctctccagatgtctgtgcagcctcccctctaattcttagtagcttcgcctatctcacctatcgctgtctctcactttgctggctgacacttgacctgccattcctagcgttctgctatcctgtccctgagtttctatagggtactctcttggttttcttttgggctcccatgtgatgctctgcttcattaagggagcgtttccacttgtcttgttcagcgtggtgctcttgttgcctggaacagtgctggaagctggcacactcctcattaacagatgttgaacagagcatgtttctatcaattcacttccttctagcactcgcttttgaattaccgtgggtttctaatttgtgtcacctagaagcaggtaccaaacctgcaaaccaagtcccctttttataacagctcatgatgtccactgctgatgctaatgttttctggtgtttcatctactaggacctattagaactggtgcttttgtataaatattctgtaagttactttggcttcttccaaaggaggtgttttctgtgacacctgggttctgttttggtaagaagagatatttctattatgttctaattggattgaggtcctgagtgttttctgaggggcacagacgaaaacggattctgccgattactaacagacattcgtcaatcttaggaagtctaacaacaataacgacgttattttatgggtcaagatatacacacaccctggcttttaaatatcctattccaccatttctcctatgacaaatataatacagttctctgaggggaaccttaaaattctgtaaagatgtctcttatagaaatgtgtgcatgtatgtgtgtgtgtgtatgccctgatttaatgcaagtgcgccacacacacacacacacacacacacacacacacacacacacatacacacacacacacacacacacacacacacacacaattacttttaaatttaataccacagaaagctaaaaatacaggtcatagcatgaaaggaactaaaaaacaaccaccttcccatgcctgtccacctgtaagttgggtggttagagtttcagagaacgtgtctgagacgcaaacatgaactcttttctcatcaagaatgacagagcaaggctaggctttattttaaatctacagtctcaaagatagtaggtgcatgattcacttgtataaatttctttttcctgttcgcttgccccacaatctcctgcatcataagacctattttagtgtgtacagaagtttctatctttgcagttttaactgctagaattagaggacaaattaaaatttagtctttctctccaaagaggacggctacagaacacaaaagcaaataaatcagtccaggcacaaagggacgcttcacgatcctcagagtcttgtttgaaaagtaacaggctatactatttatttattcattcatttatttaactatttatttatttatttaactattcattcattcattcattcattcattcattcattcatgtgtacttgtaatgagtttacttatttgtcaatgaggtttgagtgtgccttcatgtatgtatgacaaagtgaagactttgggtgtcttgatccattgctctctaccttagttttgacagaaggtctctcactgagcctggacagcattgattcggctaggctggaaggccaattgaggtttcagatatgcaatcactttgcctagcttctgcagacatgctggggatccaaatgcaaggagctcgtgcccgtgtaaggggtatttcagcagtggagccatcttcctgttctttgtccatacagttgtatcatgcgttgtataatgctcagtgttattttacatgatgcttcagcttttgattgtagttatgtgtgtgtgtgtatgtgtagtgtatacccaaataaattttgtagcattgataaaaatgaggtttttttcaaaaaatacttttaagttcaccacataggcttcaaacactgactttttattgcatgagccataaaacttctggccttaagtcccaggcagtctttaagttttgttatagtttttggccatactacaatatgtaatgaatacaattctcctccccctttaataaagtctaatgaaaagtgtacaaattgggtaatagatttctggattctccacaaagagtagatgcttaaatgaaattgattaaaggtgtattttatcaaatgtaagtgatgataatagtaagaaaaaacacctcatttcagtaagatatcatgatcacattaggagcaaggggctaatataccattttcccctttaaatgccatttcttcccttttcagagatacaaaattagataaatcaaatctgagattctgtttgatattttattttgtgtagaaatattgtacactcctgaaaattccagcatcccttatcatcagtattgcttccaatttacatatctaaattactgctactcgccttcagcatctgctgctatcttccttgttctagtcttagttccttacttgttataatttttattttgttttctcctcctgtttttagatacagaaatgttgtagtgcttcacacatttccaaagtgttccatgtactcaaaactatcctgtgctatccttgagtcttcagtaggaagcgcacatccagctatgtggacagaagccatgtttcctcataaatgcaggattgatgaaatcattttgcagccaaagagctcaggaacaattcctttcaagcttcaaatcaattttgacagcatgaagaattttatgtagcaaatgaaaaatattcatttgaaattttcaaccactatcagtctttgcctacttccacatacactcacaccaagctccggagcgcctcctgaacaccacaagaggtcctgctgggccaaagcatcatgtggactgtccttaacaggagccggtggctggttgagttcttgagagcatctacccagagaattctgaactcttctagctttgagtgtagacaacatgattcaatataaaaatcagagcacacattcattttccctaaggtattggatttgttgttcaagacacatcatgcctggttgctatatcttgggttgataggatccagaggaacccatgcatgtaattagagatgttttggtacatctgaactaacattgtagtttgaagacgcccatagtagtgtaatctctctctctctctctctctctctctctctctctctctctctctctctctctctctttctctctctctctctctctctccatgtctgtgtctgtgtctgtgtctgtgtgtatactcatgctatgtgtgttttctctctgcaggtgtgacattctcagggagagaagtgttcagagtgagcaaacatgactaatgactgtgagatgtttgtttgcaaacaggcaagagtcagctgtgcagcatccgtagcaaatgtttgcattagggaagtgctgttgagtttggactccaaaggctttccttatagatccaggcctttctttcaacacactttctttagaatttcaacattttatccatgataaattaacatggtaccaacatttttgtgtctgtttatttacttgactacgtgataataaattctgactaaaactaatgcatacgtaggtgacaggcttcatcactcaggcaggacatgccttttcttatagtttttacatttattaatttagtgtgtgtgtgtgtgtgtgtgtgtgtgtgtgtgtgtgtgtgtgtgtgtatacattcacatgcatatgccaatcagcgactacatgggatcaaaggttggacccaggtcatcaggcttggtagcaagtgcctaaactcactgagaattttgttgagcatacttctctccttatttcaagtacttaagtatttatctcctcattctctctgctggaggctgattatgtgaaggcaaaagcattccaagtctccttgttgttcattcattctgtctgacatagtgtctcacaggtattttgaaaatatgtataataaatagatacacattttcactgtttcctcagcatattttaaatagttaaaagttttaagatgtgacatgtagcataattttccattatccaattcttaccttacataatcatgtaaaaacacttgctaaatgagtatttaaactaagccctttaataattatatgtgagtctgagtaacagtgaaataatattagttattatgaacttagaataatttccacagaaagagcagagcaatgggtttagttactgtagttatcccaaaggagttaagaacctcgatgccttgaaggacaaaggacaaaggacaaagttaattcagatctggaaaatgacatttgttttttgttttattttgttttgttttgtttgtttctgattctgttgccatattatatagttttcctttttgtctgtggttgcttgattatatttttaagcatttcaagactcttttccttgcacattgaaatcaaacatgcaactacaataatcactgtagtagttaaactccctctgaggacctgatacatgtgtctattgaagcagaatttttgtttttagagccctgagctcaagattcctggggcttctttgtgagttcccttgtgtaaagctgctcctaaatcacagggtagtcgctcacgcttcccagtgctttccctagaaggctcttaagttatggttggattcggctttaagtgttatccttttgggttacagaattcctgtgaacattttctgtaatttgtatatttagttactcaaacttatgttttcatatcttcactatcagtaattttcacttgactgactgtaagtggactcctggtcttcatgtttgtcttttaccctttgacaaccagacagcccatgcatttgtaagcatctgttatccatgtacaccttgaggctgtgaaaatggccaactggagtgctacttttcagtttttatgattatatactttcataggctgtctcaatttcatttttcatttcatgtgctggttacaaatacagtgtcaacaacactgtattgccaacatcccagtctagaatttagatattcttgacttatatcccatgagcagtagtagctttgtcattaaattaaccctggagagtcaccttaattaattaaaatcatactatgcagagaaaagacttctgtctttcatagaaaatcctgcatttctagggataagtaatagactcattcatttgctagttttccagttcagaaagttgtcccgattgggtcctgcagtgaaatggaggtgcgagaaagacactgagaaagcagaaggcaagcatctgctgtttgtcccctggattgatgagttcagctccagcggaagactgggtactaattaactcattaaacagctcccgctgtgatgcctcaatgtaattttgggttggactgatgtttagagacttaaattctcatcgtagaaacttgcctttgtaaaccactcatggaatgcttagagatatcagaaaaatatcatttgctcatacaatagtaaggaagtgctaccatcctggagtctcttagtatgtagaatagtataagcaccccccctttttttgcttagctgtctaaatgctaatttagttaataaatatgaattaaagtggcatgttttattggtagtacaaacctcagttgactgtgagtttgtatctgtgcccagttctgaagaatttcactgctcagttacaattcacccaggaaacatagccagcatgtattctaatggcaaggctgatgtactaatgcactgttataaaaggaatgaaaactgtcctgaagtgatttattttgtgaattacaatgggttctccagggtacacatcacactctgctttcgaaccatggatacaggagccccagtgtgcagtctactatgcagacttccgcattgtcacagttgagcacctaagtgtcacattaagcacaagtttggttaccatgtatgtggcacattgcttgtgacatttggctgatgttcaattggctatgcatgtgtcacggagcatagctattcagcatgcagctcaatcctggtttggttgcccactatttataccgtcagagagaactcctttcctgagggagatcagtggtcttcatttgatggccaagaggatggtatcaaaaggttcttagtggattctagaagatttcttaaacatgatcatgtgtttaacaccagccttctctgtgtgtggattgtccttatgggtatgtgtgtatatgtgcatgactagaggtcagaggtcagcattggtgtctttctcagtcaattactatccaccttaagttttgagatatggtctctatcagtaaaaatggagctcagccattgggtagactggctgcccagcaagtcccagttttattttcctgtccgtgctccttcggtcctggtattctgggtgaggtctttccttacccgactttcacatgggtgttatgtgtctaacctccggttctcatgtttgtgcggtaaatacttcactgatggctgtgtcaccagctcagctcctaaagtcttgtaagggtgctagagatatagtggactgttaatgtaattgaaacagataatgcatgcacttgatccagagggaaagttttgaaaataatctgagataagtagtagtatcttccatgaaaatctttaagttgtaagcatttagtttcctctaattatatattcatattatttatattacagattatatatatattattctttgaaaatttcataacgtgtacaacttttcttgatcacatccatccatcactctcttcccaccaacttcccccaggacccaccctcatttctttttctcaacttcatgtcttccttttataatttttattacttttaatttttttcacccattgggtccagctaaactgtacgtgaacatgggattatctaccatgttcacataccttccaatggaatacaattctaaagagaagtcagtctccaccctagcagccatcagctgctatcagcttctcaactagggatgggatctcaagaacccctcccaactcaaccctgggatttttaactggcttgttcttgctcaggtctggtgtaggaaaccactgatattttatcattttaatatagattaacctctcagagcctaaacatcataatggagtactactagctaccttcagtacaaatctcgctaaagaaatatggtctattctgtaaactgaattaccctttccacctaagcattttattgagggcttaaaggtgtttctgtactatgccaacacaaacaactgaaaaatgacaaacggatcaggtcaactcatataaaaatatcacagtgttgctcttctgtgtcaaggaaaggtttagtcatagagcgccttcgtcagcctcccagtacagtgcagcctactcaggccatgcttattttccaccttctaagaaaggaccatgtttctgaagtatttttaaatgatcagacattgcaataaatattttattggatattttatttatttacattttaaatgttatctcctttccagatttcctctcgggaaaccccctatcccaccctccctcccactgcttctatgcgactgttaattattcaacaattgataaaaaaggtagagtgtgccacgagaagcctgctactaggatggatttctcaccgttcacttttctgctctcctctgacccactttctgaaattaatactcctcttatttaaggaatattgacacacccttattttactatcatcctaaacatttttatgtagtttttcatcacatagaaagacatgtttttgtgagcctttcttcaggctgtcgggtgccacactattctaaggaacatgcacacacattgagatcagatctcctcagagcctaccaactttgggaaatcaggttctgtttttctatttttgaaattttttttttttttttacatggatggcaggttttcttttttgataaattcttacatttttctttggaaaaattttttttcattcagtcttagacattagtatggaataaagacagaattgtatgcttgtgtgtttgtaaaggaggcaggatttataactctgtcacttaaatgttccactaaacacctgttttcaaatttcatagtcaattctgaagacaatataattacatatagaattgaaaactctccagcaccattcactctgagcccgagtaagaatatgaaaaaagcttttgttgttcactgtctttcttatgtagtcaccatccaaaacattactaaatttcaatagataaatagattcctacttcaaaaatagtaatgtagttaggcaatgttgctgtacttttaataaaaaagtaaaaatacatatttattaagatttccctacgtaagcttttcactaatcttttactaagatttcactaagggaaataatcttgaattcaaatgtctttatgtagcaaaaggtaggcctatcttggttctataaatttaaacataaacacacggggtatattatgatttaaaagctcacagggcattggcgtttgcattgagccaaattacgaacaatatattttctttacccataagtttgtttttttattttgaatttcttctgttttttgctgtgagatgagaataagggttggttccatttcctatggaaaccctgttgtcctggggactgctaggtttgctccatttaactaccttcagatcatctgacacacaagtttggctccattcctgccttctattggattcacttatctgtctaagttatccctggcaatgtcatcctttattgtctaggctttacaaatatttaaatttccctttaaatacttcatggtacttggtttttaagtgtctttgttttctaatttgtcattttaattactttttttgtgttataaaaataaagtcagggaccagcaagatgagtcagtgggtaaaagcccttaccacctgtaaaagtatcttttattcacctgatgtaattgttggcttggaggatcactgtgaataagctcaccctttccagtcctttctaaactctggctggctggttcaactcagctgttctggctcaaactcctctccaaggtaattcaatctgaattctctcagcttcctactgaattgcttcaaattaactctgacaatgtgttctaatcttctggttccttcttactctctggctccaactgcctctgctgaccctcactgaactacatgacctcatgaacaaactccactcccctgcactgcactcactgcactgatccccaactcactgacagaactgactgaattctccctgtactgctcttaaaaagcatttctcctgggtgtatcctatctctgactcatcctgtcaaatctgaaatcattcgtcactttgtctgtccttcaattagataccatggtttgggattaaaggtgcttactgaggctgtgctgcattccagccaggtcacatattcttggaaggtctctggatgtgttcagagcagccaggtggctggattaaaagtcctctacaaccaccacacctcatatcgtaagttgaaccctgggaacccacttggtagaaaggaactgactcctgaaaattgttctctgatctccatctacacagggtgctgaatgtgtatgccctgccccaccctcacaataaataaacaagtaaaacaatcaattaaaaaagaaatcaaactagacctttgttttttctctttgtgtcttacaatgtgactaaatgcatattcactcttaggacttttggtgaatctctgaataatgtgtctttgtacagtcatgctatttacatgtagacactatttcccactttcaattagtatggttgctatagtttccttaaatacttcactataaaatatattgtcatctacaggttttaatagaccacctctaccatcattaagttatttctacccatttctagtcttttctttttttctctttctctttctctctctctctctctctctctctctctctctctctctctcnnnnnnnnnnnnnnnnnnnnnnnnnnnnnnnnnnnnnnnnnnnnnnnnnnnnnnnnnnnnnnnnnnnnnnnnnnnnnnnnnnnnnnnnnnnnnnnnnnnnnnnnnnnnnnnnnnnnnnnnnnnnnnnnnctccctccctccctccctccctccctctctctctctttctttctctctctctttctttctttctttctttctttctttctacattaagactgggtagtatatgtatatcaaggatagattactgtcctaacatgtagcatgggtgagtcttaggttcaagcagagagatggggagcccttttttgaatgttttgtatatattattttatatttatatttataatgtctttaattttctctctaaactaaatgaacattatgttattattttggggtgagggtatttgaaagtggaaacttgacaagactaaataactgtgtgctttcttagagttggatatggattcaactggttcatatctctcatattcttattctcaatggctgcttaaaagacacacatttatgtgcaaggtactagcagatggctattagaagagcttctttttgagtgaatgtatattatatgttcatcaatatataatactgtttatatttgcatcacacatttctagaagcaaatatgtaaaatctctgtcaaaacctgtatttctttataaatgtaagtgcaggaagctaactttaacctgggccccgttcttctttgagtgaatttgtttgttttaaataaaatttatttttctcatcatgtcaaccctcctagtggatcagaagacactgcacagccctcctaaatgctaccatgcaaacccaagctcctggctagaagcagaaaagctgggctctgagtatctgtgaggctatgggcatcagctgacctgtacagaccttacttagcgtctatcagcagaagactggtgacagtcagtcaggtgctgcaaagatcctgagagggttgtcctgtttgagctatgtctgcatgctggctgtgtgtgtgttttgctctaattattattattattattattattattattattattattatcatcatcttggagataaacattgagagggatgtttgagcactgactcgaaacagacaagaaattttattatattattctacaccaaatctttttggaaagcgaacaagtgagtgacatctatgcttccccattgagtaatcatctttctgaaacgtgatgagctaagtgtttctacagctcacagttactgaagtctggtgggcatggtacactaatacatgcttgggttagatttgcatattgttttcatcttcagatacatcatgcaagtttgtttgcctaatgaccaaagcaaccactataaacatgacaaaagctattactttcccttaacaagagacacattccaggccaataaacagtaacagtatgaacagctgccttccacgtgtactcgacactttaaattgccattatttcttatactagtgcaagactaacgtgcctagttataaactcacattttctcactcccttccaactcttctcttcatatcaattcccatgttatttctacatcctctgatagtttggtatgcttgccagtatctctgtcagtgactagagtgtaaattcttggaactttataataagtaacataatacattcttatttattcattgatccttagtcaacatgcataccttcaaatatttgcattatgtaattctattgcttgcatttgtcagagccatctacaaaggaagagttgaattactcatgagggaattgtcattttgattgttgctatgtaatataacgaagcagctcaaaacaagggcagcaggcataaaatgagaccccttgtttacctctgcattaactatggttaggatggcatctgatacaaagaagcgatttcctgtagtgtttgagttaatgaatgattatggcatgaaactgtaaaagaaaaaaaaatgtcttcccataagttaatagacttacagaaaaatgcaaagtctcttctggaagaaaaaagattccttcttcacaagggaggaggagatggggtggatattgtagggataaggaacttgatgggctccaagcactggatgagcagatctgagagatgcttgaataggaagtgcctagggttcagactgtgattcctgtgaacttgcttgtctggttttgataaagctctccctgacttacatagacagagttgctgcccccaaccaaacaactgtgcagcttctaagactaccttgcagccatggaagtatctatgactttcctcagcctttacttctttgtctttgctcacattcaacagagaagcaggattctgttcacttcagtttgtcatttcccaagacccttaacatagctaataggtgacacagtcagatctaaacctcaacctttcaactcatgtctacttttaagacaaacctttcaatgaaacggtgagaactcgcagtgtgttacacaaggaaagactaattgcttcacctggatggaggctttaagctgtgacttgactgttgtgactttgtgtgactcatctgtcatttcatgaaagccacactgaacaactttagaaaatacttaaaaattgcctcactggataccattcttgctcaagtttggtgagagatcctctctccagtaagttcttacagcacaatgtaacaattttgattatgaacaaattatctttttggctattactggatatagtgtcactcattatttaataaaaaacattctccttcctttagcttaattttagatatgagagctataaaagtagacttttgagtagaataaaattaaatgttttaaattgaaaacataaaacgaacatctctaacatccaaatttaaaactttttaagtgccaacatgattttccaagaggaaaatttcacatctaacagcatacaacaggctgcagccaaaacagccatacacagctgaggaaagctgacagaaggagaggttgttctccccagggaagtgcacaccaactggttctctagtaccaaacagtcatccctgagaacatacatacatacatactatggattcaacagggtatattaggcaaatatgtgtatacctatgttcatatatgcatggaacaataattattggaaaaagaggccatgaatttgaaagagagcaaggagggtatggtggaagagtttggaggaaagagagggaaggaagaaatgttgtatttaacttaccatctcaaaagaaaaaaataaaccattccaaacaaaagaaaaaactgcaaatggttttaaaaacaaaaccaatcaaacactccaccatcaccaacataaaaatacaacaacaacaataacaacaacaacgtcaacaacatcaaacaaacaaccccaggccctctaagaatacttgaataaagttattttcaggctgtgtgtaagatgcctatggaatgaatgaattttattttcagacttgggtcttatagaatacatatatacataaaaatttcagatttggaaaagtatgaaatcaaatatttcagatgataggcactccagcttgcttatttttaggggtataactcctcatgtgtcccatctcattctattggcatgtatctactctagaggtatgtttccaatcaaacgattcattagagcatactttcaaatggcaaaggcttaattccttggagggactgacatccgtttgggggcaagttcttcacgtacatttgatctatggagtcaagtcaataaaacacccccttctctgggaaatgcctgagaacgtttgctgaaacattcctctatagaaagtgccaaagaaatctatgaaggctaatattttggtaacatgttctaagcaaatgtctgttttacttaaccaaaatggcaactatgttgaaagcagtatagaaaaagaaatacagcagaatcatggatttcagttgaaagaagtccatattttgtagcaactatgatatcaagcacatgtagccatggacaaaaaaaatcccataatgttaggtttgcacctccacttattaatcctttcctgtttggcccattgcttttgaaccctgacatattgacttgatctgattagatgtcctccacatggcacacatagcatcaaagatggagggtgagagttgagagaggggatgttccactgggcatgtggtggaggtcttgggaggaatgtggagacttgaatgaatttcaattgaaatataagacagagtaatgcaaaaacatcactgtagaaagtacattgttggcctagaggcccaagatccacaaactcagctatcatccattcatctatcagtccatccgtctgtctatctatccatccatctgtccatccatctatccatcatctattcatccatccatccatccatccatccatccacccacccacccacccacccctccatccatccatctatctatctgtccatccatccatccatccatccatccatccatccatccatctactgttgtgggagctaatgtctgaaaatgttatattaagtctaacagatatcacatctcacaggctttcattctggagagggaatctggttttatagacaacaaacagatgcacagtacaatgtcaagtagagatagtgtgtactcccaggaagataaagcaggaggaagcattggcataagtgtgttggacatcagaaagagaaagacagtaactgctgaagcaggggaatactgagaggcagggcatctgagagtcaagtgcacaagatggctagaagatgaactcgattctgtagtttggttttatactccatatggtagaataccctagaaacttctcagcagcctaattatacaaaattgacttggtggaaaagccttgtaccactgttgtattgagaatagacttcttgaagcaaagctgtaagtaaatagccaggtaggaagtctttatagaagtgtaaagagaatagatgggtttgtaaagcatgctctctgggtatggatagaagtgtgaccacattctgattatttcatagaatatcaaatgtaaaaaaagcagcctagtcttcaaatatccaatatcatggaatgtggagggtcaattttggaagagaagaggccagtggtatcaaggaactgcaagaaccacacagagtggcatgaaccatttatattttagccagtctggcttcatggagatcgttgtagcagagctgtgttcatccctcaagcattctgtgtactccagcactttcctagccagcaagtgttggaattgtgttgcaaaaccacctgatcctttcttaggtgatgatgctaaggagcacaaacaaagaatgaaaagcccctggtgagagcaggctggatttctgtgttcctgtttggagcatcatcactgccctgcaagtctgtgtgatcctcccctctgccatagggatatgaaacatgggagtgcttgctcactgataaaccatcacatttgcaggtttctgctttcttgttctagtctcacctatttcttccagttgtcatgtgaccattggcaagaatgtccttaggaagtaattccagtaatacagctgagaaatgtgagtccctaaaatcgctatatagactggaagaagagacagatttctgaagggatgattaacttcttaattttttccagaaagattaagtgggtattatgaaggccactgtataacgtggaacctggtaaatgctggtagtgtatttcttcttcacagcgttaatggcagctgtcagccccagttacccaacttcttcatgtagatgttcagtcttaacctactgtcaggttatgtactacctgacaagagccctgaagatcttttccatcacatgcttattatagctgacactcctgccacagtgatgtgccctgtaggatgagcttggtatgactttcttccatgcatgtcaaaccttggcagtaataatttattgaaaaggtgaacatttggcaccaagagttagacaagaatgaaacctacaagtgtggtaactggtaagaaagaagatatattcaggaatatatctttcagggtttcatgggatatacaggttttcataagatacacagccttcaaaattagaaaggtggagacagatttatctagttaagacctacagtctttgaaactttgaagtattaacctaacaagtatccattggttcaagcaatcataagcaactaagaatcttgctttactcttgttgtccagctcttgatgacttgacagaaggtcaaaatttagggtgggcagaacactcagtttcttaggactaaagtcccagccatttattctacttttccagtttgggggtagtgggattttcttgtcacatgggtatgagttctaatttaatggtgatatagctgtatcctgagaatctctgcccatgcctgacaaatacagaagtggaggctcacagccatccattgcactgagcagagggtccccaaggaaggagctaaagaaagaacccaaggaactgaaggggtttggagttccataggaggaacaacaatatgaaccaaccagtacccccagaactcccagggattaaaccaccaaccaaaggaaggactcaaggcaacaactgcatatgtagtagaggacggccttgtgggacatcaaggggaggagaggcccttggccttgtgaaggctcgatgcctcagtgtaggggaatgccaggacagggaagggggaaagggtgggttagtgagcaggaggggatgggataggggggtttttggagaggaaatgaggaaaggggataaaatttgaaatgtaaataaagaaaatatctaatacaaaagaaaaaataaaacagtccctcgagaatcactctttataagaatcaatcttgttggaaaatgggctaagacattattattcagtcaaggaagggccccatcatgtgtgaagtaatgcacagtacttcaactaccaagggtaagttgatgttaactaatgtgcctggctgtcttagaaaatgcacacatcatggaaaatcttgtcttgcctaaagtaaatttccaccttgtgcagagtatctagaagcacactgaaatgattgtcagaatggattggaaaggcataggtcagcacaaaggaagatattacagactgcaaatgaatgtgcaagaggaggtcagcgatggttcttagctataactgtgctagagtcttgcactgttttgtatcaggactctaacaatggcagcagcctctcacatacccagtataagcacctgcttctcctgcctgttgctttgattgtgaagttgttttccatggaaatctgcaatgtttgtagatttccaatgatcaaaagaggttcccaaaacacagaagtatggaaaaatggtgtctaccatgaggcttcttagtgcttttgatatgctaatattcattgtgatatgctaatgtggattaggactctccaagaaaaagaattaatatgcaatgttaatgaaacttatttgattcagaatccttgttggtttttttgcttttgtttttgttttttaagagaaacatctgttacaatcataagccattattatagtgttccaatagattaaagcttgcagatgttggctgtttcatgaaatcaaatttcttacaccttgatcaactaattttgccttacttaaaaatacttttgctttgccaaatttccttttttcagaatttactctccattttaaactcagaatccacttaattaatctgtatacaggcctagcaaagaaagaacccatggcagtctagcaaagagccttgcgtttgtattttgtactcagtcatatgactataagaagtggactagggaagagtactatattctaggctggaagaagatgccatgatacctttaggaatgacatcaggccaggtggtggtggcacacacctttaatcccagcatttaggaggcagaggcaggcagatttctgagttagacgccagcctggtctacaaagtgagttccaggacagccagggctacacagagaaaccctgtctcagaaaaaaaaacaaaacaaaaaaaaaacaaaaaaaacaaacaaacaaacaaacaaaaacgggttgggggggaatgacatcaggacgtttgagagggagacacagcatcctaaatcatatgaccgtggaggcacttataatgttgatgtccttgcatataaacagggaagtcacaagaattcacatgctacatggcatcctacaaatgggtagattttgtcacagagtgcattccaatgtgtagacaaggagctgaaggccacagaccttgctccttgaatagaaaggactttaggaagtaaaactgaatctggtggaataaatccttaatcccatcattataaggtagatatgaagctgcctccttttcttcccagaagctgccagttgaagtgattagtggtgagggcacctcagaaaggggaggagaggagagcaggatcagaagcagaggaggtagccctgcttgagagaagagggggattggcagggtcagcttaaagttagtaacagtgaggcttgagccagcattttaatgtggatccatttcagtgggaaataaggacagcttatttagttttgacctcattagccctttcagaacactttgccaaatttgttgttatttaatgatcagtttttatattgtgctgggttttttttcatcatatttctgatacattgcttagaacattttaactactctgagggaattcataatcatataaattttataaccaaattgcttcaagtagttgcttaaaggataaaagtatgtgtgtaaaccggcatagccatgcattccccataatgcttagcactgtgtttacacatagcaagcatgcaatgaccatatacttcaatgcattaatcttacctgttggtcaatccaaaaagacctaaatatatttgcaacatctctaaaagtcgatttagaaaaatttggtcatgtacatgtaattaatttagtgcctgtgctcacacaagctagttgtgtatttctcaagataatctaactttgttgtataagttgcttctgttaataatagactttgatgatggctcttgagctttggatattatgaaggatggacgatgcttagcctggttgaagagtttagagaacaagttgactcatgaatcatcttgcttatttcctaatggagtctttgttaggtggcctatgagatcttaatgtgcggtaagataatttgtgcattgtgtccagcaactggagatatagagttatgctttgttatctatacacagataggaaaagctttatacctttcttttgtagtatagcgaggccaatttatttttcattcatttatacttgcagcaaagctgtgacatgattgaagatgaaggtaagggtacagtgtcttgtttccaggagctaagtcagtggggggaagtgacaaggtatcgcacagggaaatacaaggtactgagcatggtagatgaaaatttgtgcccatgtgtagaccatgtttattgcttctttggcataggctacagttatttcttagcctgtgaggacacacagaacatttttaatgggaagaataacataagacttttattttgggtttttcctttggttatatacagtctagactcacaactatctgatgagtgtgaacagctaggaggcccttgtgctgatcatgagaccgtaggatcctagacgctactggaaaggaggccacgagtgtaaagacgggatgctctgtaagaagaatgcaaatgcaaggagaggctttatatggagaaccgacagcaagaggagtggaagtggatctgagggcctggttgtgtccttcatctaggtagttacaaaggttcacatgtggaagctgtgactcgtctgtgttccaccatgtaaaaactctgtaggtgccacgaatgttcggagaatggaattttagaacaacccacctgtctccacagctcccacacggagacctccacttcacccaccccaaatgttatttacccattctgaaaacttgagggttttgtggcttttaatttagaagctaagaggaaaaatgacgacagtttgaaagctctctagacacgggctagtaaccaccccccaccccaacctcagtgctttaacaaaggggctggaagtcactgctcaaacatgtgtttacctgctcctgagttcaatggcctggccttatgcctgacacatggagagactgtctttgcagcccatgtgtagcttcgaagctagttttttgctggaaggtttctaaatacagtgatgatttaataattcagaatataaagtggcagtgggaaactataaatgttaggactgtattattcatgttccctgggcagtttgtactctgagattcactaattagaaatgccattatgccacaagcatatgtatctaattttcttgaatttaattcactgaaaataaaaatcaatcctgattagtgttgatatgtaccctaatgaataagttgccattctcagcgtaagtggggtgaactgtaatttcctttttgtttacaaagctattagctaacttgcttttctgtagtagaaagggctggcttttttttttttttttgaaagtaggaaccataatagacataaaatcttgctgtgtcccagcccagcccagtgaggtcctcatgtcatctcttgacatgtatcatttaaaggatgtacactgtttctggtttgtgtacactctagttcctgagagctcttctttgaaacctgctgttcatgtgagaggactctgagcccctttcaaggatagaagtgccagtgttacctttggttttctgcggagtcgggagagtaattgtgttcagttgcaaccatgaagttgctatgaatgctgggttgaatagctcttgaaactgaagctctggcttgggtcagattcacctccaggatctgttcccggcatttacaataagaatgtaatgaagacgtagggagatagtgtgttagagatgcataaagctcagagcaagcacagcaaaggctgccatcactatgataactctcaggtgtcttgtgctgattctattacgtgtattgtacctgattcttctctaatagtatctatgctttctacctaaaatttaactatacacatggtgcatgcttatcataaaaatcagaacatacaacctaaagttcccaagatcttaaaacttaacattctttaaaagaaaaaccaccatcagtcctattgccttgataacagctgcccagatgttcacaactgtccagatgtccacagatggcccataatttaccaaccaacttgtagttactattctaagtacagctctaaaccactcacccccatgcctcagcaatgtctatgaaaagtgcagatgaaaagggtatttgaccaatatataccaattaagaaagttgagggtgtgatataaaaagctgtgaagcagatgctgtgaggagagctcagggtgaggagaggtatatgaaaaagagatgaaggggcaagagtctgacactaagaaacagctagaggtttttaaagataatgtacattttttatatttatttatttttgtgtgcatctgtgtgtaagagtatttgtgcaggcacatgtgtgtatgtgtgcaggtgaggatacatctgtgtccataattgtggaatccagaagacagccaccagcatagttctcaggaactccatgtacctctttggagatagggaatctcactgggctagagcttacctattagaatggactggcaagtgagcttcacatatcctcctgtatatactcctatatgtgcctatatactcccttgacccagtgatggggttataatctcatggcaccatacccagaatttttctgttaacttttgggaatatgtgctttatccaggtcactcagaggaattcaggtctatgtgcttacaaagcaaacactttgttgattaaaaaaaagaaaaaaaaacccacactagtctaataacctgcagtttttaattcccagttcttttggctgcctgacaattgatacatctagggattatttgcatatgtaaccccttagaagtgatctgaactgatgaaaccaatatattattcagctagctttttaaatcaacattataaaatctataactgtataagcaaatgtggtatactatttcttttaaagtctacacatattgtggtggattagagagaataaagaaaatgggtttacttggcataaaagaaaaagaaaacacaggagagaaaagcaattttggtacttaattttactttctttgattttttttttttagaattcttgtttctaattaaaatctttttttctacttctttctaactcactcttccttctatctctgatataacattagtaaagggtaagtgcaggtttacgactttcttcttaactttagaggcatcttagtgatatagagaccaatgccggttactaggacaattttggtgaagttggttgttataataaagacaagatcagctctaggctagtgaaatctctccaaccttatgctaaaatttgatatggaatagaatgacctctcttctatcccagtttctcttacaagtggaccttgcattcaaatagtttttcatcagcttatattaccttattgaattcctttctcaaaattccagtatctctgaaggttttaaatacttttcgataggcggcacacaacacaaagtatttaatgagagtcacttctaagacacaagaggtacagtgcagattctggctagcatggagcatagactaaatgaagactagagaaagacaatgtctggctcacatgtgaaggtctggagaggtcctatgttaatggttcattgaaaagatgatccaaggaaaacagggacctttagaggtgaggtgggaggagagccattctggcaccagagacttctgaagaagaaccttcgtgttgtatcaaagtgcagccactacagttgctctaatggaccacacaaaacccacacacatcactgatgagtctcattctttaacctctgaaatatcatcaataaaggtgggcttcggggaatttaataggaagcaaataatggttaaaccatgatccccagaattggctttccatgtcagtattttaggtaactccgtctaaggtcagaggtcacatctaagactcataaatggaaggtaattagaaaaaaatcagggttgatgtttgttgcgaataagcacaaaggtgtccataaagaaaagattgttattaagaatttagtgagtgctgcttgacctaagaacaaacaaaatggaatgaatgcagaatgtattttgttccgaaccttccctgacatcatgactttatctgctgccattagcaactcactagtggaggcctctgcagttaattgctcgaatatagatttttctttcctctacaaattattcagttctgaaaaataaactactgatcatatgctttgaatggttataagtttatttgtatacttattattatattattatatttaaaatgtaatctttcaaatttcacattttcaaaaatgtggtttgggataattaagattagtatttaactacaggaagttgtgcatactctttgaagctgataatctcttttttggcatatttcaaatacatgggtttttgagaatatgacataactataacattttctccttcccccttctctcttcaagccctcccatagagcctccccactccacttcaaattcatggcctgttttttttcattaattgttattgcatgcacatatgtatatgtatgcccaatggaaatgatgcatctataaaacattcctgcatctactgcttagggaacaatgtggaagggggcatggaaagatagcaagagctggagaataagggattttgccgtgatattgtgtgtcatagtgaggtcagaagctacatccatagtctcaccagcaggactgcccaaatgtcaacagaacaaagttgataccattgaacattccaaactagacagggaacggcccatggggatctaatcaatcacaaagaactaaagacaatccatcagatttgggagtgaagaggtcttcttccccggggaaaggtaccccaattggttgttcagtgccaaatgttttagccctaagaacataatgtctctttaaactttagtcccagtgtactggctagtatacaatatgtactccattaaaatacagtaaatctaacagctcttacgtgatactgatatttagcattacttatactggcatcattcaattttttcaaaatatttgcatgaatcctttgagaatttcatacatgttatttagatcatatcccctcccaatttcttcattaactcctctgagatctacccaatctgaatctattttttttgcaaaacattaagcactcacttaggactttataagaagaatgggtactttcagtgtttaaagcataaaaccatatttaatgttgaaaagctttgtttacaaaatcactctggcacaatgacatgtaggataagaggcactctaccttcctgtctcaggttctcgccaactgagagctactctgctttattgtggtttaaattattatagttgcatatctaatcagacttagtggcttttaaaaaagaactacaatttattatgtcacgaatctgtgacttatggaggtcctggggacatgaattatttctatttcatttagtattgactggaatgatttgattgggcctgagagagccaccctttaagtggctcacctgaatagctgctatgctgatgcagttacactgtgtgctgtacacacaatcacacttcagtggcctcatctttcataacttgaatacgctgaaaacggatgattagatgtaatcttaaatgttatcataaatgcatgctcatatggatatttaaaattatttggtctaaggtcaaaactgttggctagggttctttattcctctctatgaaaatgtatctaggagactttagcttcctcatgaaatggcaactaaaattttcagagatgtttaaataacgaaaagctagaattaactaatttttcaaggcttgggcctagatattattgtgaagccacagtcaacccatacaattggggtatgacaagatttaaggagaaagggactctgcctctggatgacagggtatccaagtatttatcactatctttaatcatttataattttctctaccgcaatctttttataacggctaaagcaaaaagtaagactttatgtaagacatttattaacacataggccaagattattaaaaccaaagattccaaaattagcagttgtgttttgtctaaaagaccacaaaaattatattaaaaacatacttctgaaattgtcacatatcatgttgtcattattactatggtattgactatctctgctcagagagagaaaaacagtgtgaggtatctccacacagctggagaaggagccatctccatgctgagcatttttggttgctaagtagcaatggggttttccaattcatttattatgtcaatgtgactcggccaaatagaacttttctttttggcaaactgtctcttgtttgtttggttttttatttgtagaatagaatttactagaaaaatattaaacagctgctatatttggggaactgtatgttctttgaggggaaatatagaaatgagggtaaaggaaaagggctatgctcattttgtagactttgcctccccagtgtggaagatgaataattaataaataaacacataaatataaattagaggagagataatgatgcttcagtcagggatcttgagaatactggtgcaagagaatgttcagccagtgtgatcaggggaaaacccctgagaggaatggagttttaagcagaggagaagaggatactggtgaagcaaagggaaaatagatgcttagcggggtagaaaagatgaagcacatggtcatttgtggcaaggagcacatagttgggtattgcttattatttgctcagtctccacatatattttgtggggaattaagttatttacatttcacataattattaagtaatatcttgcttctgtcattttgtggctggttcttcgtttttctaatatctttctccttgtatggtcttctttatcacgcttgagtgattttttttcccctaagaggaggttttgattcctcacttattattattagtctgttattgggttttgctttggctacagtgggacttaaaaaaacaagaacctatttgattaaaaagtaaggctttttgaaatgagagtggtataaacactgatcataaaatgcgccaagaaacaagaggataaagaagagggagaggagagacaaaaaaaaccactgtttatatttacccgtttctcatagtgagttttgatgtcctgttgtaaatctttctatattacctacttcaaatagtaatgtagttattaattttgattgctctgctttttgtgtgcatgctagatgtaactggtttatgtactgtgtttatgtgttaggaagtttttagtttgtgtagctccttttactaatgagttttaaatgtccagtattttcttgctggttagcagcttttctatttgaagaatttagttttcttttccttttttctttggacatgtcaggtagtgattttttttcagcttctgtttgtctgaggatatctttatatctgaaccccagccttactaggtatagtatcctttattgatagcttattttctcctagcacaatggtttgtaaccttctaaatgctgtgaccctgtaatacactttctcatgttgtggtaatccccaaccatacaattattttgttgcaacttcataactgtaattttgttgctgttatgaattgtaatgtaaatatctgagatccaggatatatgatatgcgacccctgtggaggttgctacccacaggttgagaaacattgtctggcatgtgtgacaatctcatcatactacttgtttctagcctatggtgtttctactgaaagtagataattgcaacatgtatgtgcacgtatatatgtgtatatgtttgtgcatatgtgtgcatatatgtctatgtacattatgtgtgtgtgtgtgtgtgtgtgtgtgttgctctcttgcattctcaagaaatttctctttgcattgaaactctgagagttgatttggggatagatttcattgaatcgaatcaagcatggtgaccctggaacccaagtatggtgacattgaccttcatgtaccagtatttttctttcttttcattttgggactgggcagttttctgttactgtcattttgagtgtgcttttctctctttaacaatcaacagactctcttgaataacacaccataagtggctgctcttctaatgctgtctcaaagccactatgaactttttctgattttcattcttttttctttcttctcctttgatagtctgttgtgagtttgctaactgtttattctattatccatttcgtattctgtgtaccttatgttaatgtataagttactacagtcctcttagtcttctttgataaaatattgagttgtttctctatgtttccttgaagtttgcgcaatctccttaaaggctttaaaaaaaaatcccatggctgtgtataaaaactgattactacatagtcagttattggcacttgattttgtcctttatcgttagttgaagatatggctttgtttttgtctgtctcagaagtttagcatcttctttgtggctgcagttatttcagcagtggatgagaacttaggttcaggttagccacaagtctacactggagtactcctgtctctcacgggttggggtgaacccagatacctcatccaaagttatcgttgtgtagtcagaagccacgggattattctgtctctctctggactccatgctgaggggactgttcataagctcccatgagccatccatgctacaatactattgtatccaaactccaaattcatctggggctcatctcaatgcaacctagagtcacagtccatgcaactgctgcctgtggatggtgtattctcgccttgtaaccccttaagctacacagaggtaatgtccagaatacagatatgttttactggggcctcaggtctttgtctggcagcaggacaagtccagaagtggcattagctttggtgtagaaatttaagctctgatggttaactacacataaaggatacgtaattccatgactactgacaagttttaaaacctgggaattattatagaacataattagtgcacagtctcattactgtgtagttattcattatttctttgaaaaaaattcactttgcttgtttcttttctgaaaacatatatttgcatattataaatgattattgtctattaatttgttcatcttgttgctgtttctgtgcttaagtacaacagtgatggacaggggatatcatatctatgattacctttgtttgggatggggtgttgcttttaaataggattattctaacttttaaagacccaatttagaaatatttctacccatttttaattaaaaaccacatatttaaaaaaatcatccttctctgttattcaaatccctaataacaacaaaaaaaataaaaactatgcaaaacaacaacttatgttgtggaattacatgttacactcagaggagaacatctgatttcagagaaacaatgaccatctaccccaaaatatagacaggatcccaagttactttgctagttggattttacattatttatttctgacagaatttggctgtgaaacttcaaaggcacatagctcatgttttcactcaagaagtgatcttttttttttttccttcaagtgcttggaagatgatagaaataatctctgctgctcacacctgttggtgagaagcttctagaattcctgcacttgctacatggtgtttattgaaaaccagagtacagtgccacctgttttcaacagtgtttcctgctcataagaaagtgatggggaagaggtgatgcaggataaagctgtggatgcatgttcagttggggtttgaacccagtgtcttttacaaagtttccccacagtaggtccttgttagcagactgactgggtccagagagaggagagccagtatagtctaggttcatacctaggcagcactcatttccattcataggtccttgtagacaaatcacaaccattgcaaaatgatgggctcaaaacatgtctacgtctttctgtacagacacgagtgtaatgactccatcactctgacagttttatttcagcttttagtttcatccctgcttatctacacaaagttccaaaagtggaactttagtttgtccccatccgtgtatttctgctgttctgtcaaaaaatatttacaaccaaagaagtactccaaaagctgagggagtcagctggaagagaagtgtgcacttctaagtgagacttgattaggcttcccttgggagggtgtagctgggggaacaaaaggccagaaatgctgcaggctggtgggatggcatagtggttaaggcgcttgccacataagcctggtgacctgagttctatcccagagccaatggaaaggtgagaggagagacctaacgccacaaagttgtctctgacctttatacacatggttgtgagtacgtgtacatgcacgctcacacgggcacacacactcaaatacacacacacacacacacacacacacacacacacacatgctaaggcacacatgctaaggcacacacagtaataataataagccaagagaacggggctagagattttaacaaatttataaccttgtgccacttgattctttatgaaatattcatgtcactttcatggatctccatgttgtttggcatggtgaagcccactgagtgcatgactcttgttttgtggtaatctttctagagagcataccaggtaccaagcagtgtagtcaggacttccttcataaatgttaacctctcgaagttaaccaagatatttctgtaacatgatttactgatttagtcaatgtaagtttttttttcacttgagatatctattttatttctattgtttcttttatttcagctcttctttatgcaactatttttggaaatgttaccacaattttccagcaaatgtatgccaacaccaaccgttaccatgagatgctgaataatgttcgagatttcctgaaattatatcaggtcccaaaaggccttagtgaacgagtgatggattatattgtctcaacatggtcaatgtcaaaaggcatcgacacagagaaggtattgtagtttttattatttttattgctattattattattagttatgtttaaacaggatatttagatgtatgtacatttcccattcacaattgccctgtgcaattgctttagaaatgttactatattttttgcaagtgacatttcaatcaatcacatttattgagtgctcagaaggtgcggagtatccaaccattaacaatcaattagtaccagtcatgatattcaatcgagaaaatttagtttctgaatacagctcattgttccattcccctgtgatactctgattaacacttagtaattttctgctaaactctctgagcaagcactctcctaaaagaactgttgtcagttttccctttgacttgctgtccagttaaaaatatcaggggctggggacatggctcagcagttgagagagctttctgctcttgctaccatctggaattatgtttctagtatctatgtctggcagcttacagctgcctgtaactcttgcttcaagagatcacaaccctcttctggcctctgtgggtatctgcatatatatgtgtgtgtgtgtgacttgtgacacacacacacacacacacacattcacacactcatacacacacattttaacaagattgccttatttagtatcaatgggaggggaagcccttggtcctgtggaagcttgatgccccagtgtaagggaggggtgaggcaggagtgggtagatgagggagtaccctcttagaggcaaagtggattgggggataggatgcagggttcccagaggggagaccaggaaaggggacaacatttgaaatgtaaataaataaaataaccattttttcctgtttatgtagccagtctgttagtctatgtctttttattggggaattgagtccattgatattaaagagatattaaggaaaagtaattgttacttcctgttttttattagatattttctttatttacatttcaagtgctatcctgaaagtcccctatatcctctccccaccctgctctgcaacccacccactcctgcttcctggccctggcattctcctgtactggggcatatgatcttcgcaagaccaagggcctctcttcctattgatggcctaataggccatcctctgatatatattcaactagagacacaagctctgtgggctactggttagttcatattgttgttccccctatagggttgcagaccccttcagctccttaggtactttctctagctccttcatttgggctgaagagatggctcagctgttaaagactaggctcataaccaaaaagcattatttttaaaatggaaaaaaaaacccagaatgaaacttccctgttataagtgaaatttttgtattatcttctatcatattttcttctttatttctatcacatgcataagcaatttttaatcttcccttggtttttcattcaagtagtagagacatacctcttccagttattctcatgtctcatttcttggttttgaatgggagctgcttcctccccgcccccatctatcttatccttggacaaagaagaacccaaagttccccattaagagcaaattaaagtctcctcactgtctacatacaaaatatatttttatatacctataaaaatatgggtatatttttctataccatttgattaacataaaatgaaagggatagcaactagagctggcacacaggaagtaagagccaatcctgagttattccacgtgataagcatcagtgaagactggcttttgtagagcacctacttctgacacctgacagtcaaattgcaagagactttccttgccatttttaggtggtatgtgttttttgtcatgtgtgtgcatatgtgtgtgtgtgtgtgtgtgtgtgtgtgtgtgtgagagagagagagagagagagagagagagagagagagagagagagagagagtcacctagttaaatgaccacagaagaaaaatcaattaaagtatatttcttcgcaacttgattaatattcattgatatgtggctagtgggaaaacatgcacagaacctttgccacagagacaaaaaggcaaaatcacaaacactgttaaggatgttgaagaaaggaagcatttatatactgttgcaatgggaattagtgcaatggctattgagcacaggatattgcttcaaaaaactaaaaccaaatctgccacaggacctatctgtcccacttctgggtaactatgaagttaaaggagaccatcatacaaaggagatgtctgcacccccgtgcttactgttgcaccattctcaatagtcaagataagtaaacatttaaagataaacaaggaaatcctgttatgtgaaacaaaatgggtggggccagagaacattatgttaaatgaaattagacttagaagaacctagaatgagaagacctcatgtcatctcctattcagagaactcaaaaagacaatttacatgtagaatggtagttatcagggaaggggaatggagaggagcagaggggtaagtcagaaggaggttgggtgaaggttccaaatcacacttcgagttgctcttgaaaacctaggaaagcagatttgagttgatgtgacaaatataaaagctttgctgtgtgtgcatgtgtgaaacatgtcatgagtaatgatcccgttcaacctactagggaactccccactcagatcagatgcatgttagctccggtgataatgtacataatgagaacaagacacaagccaattctgggcatgaagaggctatgtgaggattcctagtaattacatctgcagtgagaccatgtttaaaagcgcttcatgccatatgctcccaaacaagaagaaaacaaaaatctatatccacttctgtgacataagtcaagaatctaataatagaacagaagactcacaggcctgctggtcatcttgttagctagtaaatagtaaacataacacataacattaaagttcaggtaaaataaaacacacaccatttaacataaagatgttggcaaaaagcaactagaaaaatggctcagagtttaagggcagttacagctcttgcagagaactccattttagttcccagctctataatagtgagtcacaactctctgtaactatagctgtagggcagtggttctcaaccttcctaatggtgcaagcctttaatacagttcctcatgttttggtggccccaaaccataaaatagtttaattgatacttcatagctggaattttgctattgttataaattgtaatataaatatctgtgttttccgatgttcttaggtgactcttgtgagaagggtgtttgatctttgctctcaaaagagtcaggacccaaaggttgagaaccatgactctagagggatacattctttttgtctctatggagtcccccactaacacacacacacacacacacaagagagagagggagagagagagagagagagagagagagagagagagagagagagagagagagagagagacagagagacagagagacagagagacagagagacagagagacagagagacagagagaaacagagacacacatacattaacaaaaataagttattgaaacattttgagtagaaattaagcatcacagcaaaagtgcaaaatcagtttttataatttgtaaaatatttttataaatcagtaagtttaaaatacattggcaactaagtgagccaaaggcatgattaaggttatttaaacactgaaaaatgtaatgttggttgcattatgctgacttagtaaaatagtgcttgcagattctcctccaataactgcgacttcactagcactaagaattagctaggttttcagtaccagacatggttttacccttgttgagtgtgtcttgagtccaattagagagctgttggctaggtatccatgccactaatgtacacttagggttactgttccaggatgattgttaatgtggttcacaggcattgtaactggtagtaccttcctcctttcgaagctctcatagcaccttctgataccatgaaagctagtcttcagagagggagcatttgggttaccaacatgactgctcaaatgggagctagacaatgaggacaccgatgataatgttaaactggacagagtttaagccataacactacaaccttactttcccagagacgagcacaccaattggctgtctggtgccaaacaatcagccctgaaaacacaaaagatcatactgactgaacaggttatatttgggatatatgcatacttattatatatgtgcctataataacaattagtgaaaaaagaggtcatgaattggaaagagaaaaggaagggtgtggggttgaggaaaaggaagggagaaatattgttactaaagtataatttcaaaaaatataatatgaataaagggtgtatcactagtttacattaaacaaagctcaccttcctctctaacagtaaaaatcaagtcattaagaagccatttttaggcagatacaaaaatgccccatttttgcaaagaatgtattgcctggccctggctctactgtgtaattctgtatactgtgtgaatgggttgagtattttctaaagcaatttgaatgagctaatatgtattggggctggcactagagctcagccctgtggctttctagttttttgtcttttgttattgcagtgataccagcccttgttgtgactttaaaggcatattctaataacactccctccagtgtcccagttcaccacagacccgatctcaaatgaaaactctgctctgctctgcaggcccaaggaatctgtccaagaattagactgctcccagttatcttttaaagatatgttctactgatattccccaatccatttaatggaagctgcaccttccagttccttaggacaaccctccttagccctatctaccttcacttcccttcgcttccattgtggtccctagatccaagccatcatcttgccctgctctgtgcttctgtgtaggatgttctcagcgtagcaacaaagaacctatgtggcttttctgtttgttgatctaatcttgtcaatatatttaggacattatatgtgaatcttgctacaagtacttacagtggaatttattaaaattatcaaaatataattgtggagtgataaaatgaaaggtggaaaacagtaattatatcagtcctgtactcagggtgcatccatagaaaagagtatcagaatttttaacaattactctctttgattcactgtttggttcctatattctttaatatgtgaagtatgttgtcttaacatatgttaacataattttttattgcatagctcacttacattttctttaaaatatttttattaatagatattattatgaaacttatacaagcacacaccaaaacaaggaaaataaatgaagctcaatatcttttgaaatgtctctttctctgttggttctaaaatagttattttttttcagctctgtgtacaatggaatttaatgatgcattgcagctaattaaagaaaaatctttgcttcaattattgtgatttcctcctagcttctccacatacttagtttgtagatttttgaatttaacattaacacatgagcaaattaatcccagtgatttaagtcagccttaaccagcttctgtttagtccaattactatattcatgtggggattagaacattttttaccaggaaaatttgttgtaggtgattttttttccactgggcagtgtctagactaattttatctactggccaacagtttattgactatcaatcattacaggtacttagtatctttttaatttaataacaaaaatccatcccctgctctttgccactggctgacattttgtacttaaaagagaaagggttggaatggggggatttaaaacaaaagaagattatggggaacaatagaagggatgatgactaaagctcataaaatttatcctgacatttgaaatacttttcaggaaaacaattcaaatgaaatcagtgggctagcactatattttcaatttgcaggacgacttataaaaatgtacaacttatataatgttttatagatcaggtaactctcattaccctagggtgtccatgacctctttaacaggttagatactaaacccttatgatttttatttacaacttttactacctttctagccctaacactaattttaataaccagtatgaattctcagatcacacattgtatattatgtagtcattacatctctctctacgtatatatgtagactagacaaaagctacaaaggattaaagagaccacagcatccatggaattcaacaaggccttaatggccccctagacagaggctgatacaaataaaaaaggggaattcaaggtcacagggttgatcttggcatcagcatagactgtagcttcagacataatatgcagaaccagatctagctggcctaatgaatgtatttatggatggcaatttctgtaggctgtggcacaggtctcctggaacattcaggagccctcttactgtcagttgtgtgatgttttcttggcatggacaggtgacaggctcataggagctgttgtgacttcagtgttaggtgtcatttctattgtgtccagatgggagtactgtatgtgtcctcagtctggtgtattatttttctgccttttttattgccttatctctgttccatagtgacaatgggacatgctccttacacctggaggaaaatactgtactacaccatccttcataaagagctctgactagtgcgctctgctgaatttatcatataaatatatcacagggatataagaaaggcaacctggctcaggctgaagattcagtagtatttttatctttggtttaaaagaggtaacaattgccacaatagagttcatattaattagatcaataattgtgatcaccttccaactagatatttcaaagaaataacatcaaagggcaaaaacttactcaaagatgaacaaggtgatatacaattctgaccatattaacatatgacagacaaataaaggaaatgtaaatattctatctagttaagaagagagttgaagagaggggtggaaggtagcttcaaaaaactaaatctatttgaagaacagatctctctgcttcagaaaaaaaaacatatttctcaaataaaggatttagatagacacagcagaacgcagacccagtgcactctcaggtcctgcacactactcttgctgcctctccactatccggttcttgttatctctactgaatgaatttaggtggagcactcaggcctagagtagaaaaaaaaaaagactgtattttataggatgacatgaagcactcccaaagttgagagacggctcattgtataggaaagtataattacgggttgagactggacaacagtgaaggaatcactgtgccgacctagaggtttaagtagacgtggtgctattttcttaaggaccaaatagcatcctgagaggtggttttctgtgcaaggtgattgacaggactatttgggttaacttttaaggaagaagcaatgttgtgtctttttttttttctttctttctttctttgttagaacgcctccagctagatagtaatcttatcattgtcctagaagttcagaaagtcatgtttctatgcagggattcagatacaattcttttgatcagtttctgcttttacaagctgataaagaggtgggaggaagagagagggaggaagggagggaggcagtgatagagaaggaagggagaggaattggggggaagggaaatagagagagatgataggtagataggtaggtggatagatagatagatagatagatagatagatagatagatagatagagagagagagagagagagagagatgattttagatgttgataacatgccagagagagagagagagagagagagagagagagaagggaagggggtccttaattcccttagaacctgctcctatgtgaacactttcctaatactgactatgagagcacatcagtacatcataatatctgtgccacttggggttctactatttgtcacacctggttcaaggacagtcattttaaaagttctgcatgaaatttacagaaaaaaaaacaatcctatgataatttaacacttgttttcagcacttgttttctttttccattggtctgtgtgtgtatgtgtgtgtgtgtgtgtgtgtgtgtggttgtgtacatggatacatgtggaggcctaagctttatgttaagtactaaccttaagtgttcttccaccttccttattgaggaggcagcacctctcagtcacttccagagctctctagtgtggatgctgattcctccttctctcatcagaattatagaccaacttccctacacatccaatatttttgtgggttctggggatctggctcaggtcctaacatttgctagctaagcactttaactactgagccatctctccaactctgttctcaggattcttttattaacgtacttgaacggataggttcacaaggatagtaactagcttactgaagatgataaaagaagtactcacttaaaaataccatggatttatagattctttaatggagtcaaggtagggcagccatggaatgtttctcctataggcctatgttaactgcttattggacaagagactatatgcctattccactgcttaaaattaattaattgattaattaattattaagcaactacacgtttcaccctaacttttaaatttagaaaaatcttttaagttttcaatctaaccatggtaaaggaatgccacaatcatcacctttgcacgtgtttctcaattgtgacctcctaaagagcgaaaaagggagaatgtgggcttgggatggccttttctcccttttagctagccttcattcctagctaagaaagtaaatttcatgtgcagcttctcccatggagcagaagttgaataagatagcactccagggcacattagaggtgaatataaacacaatacattatattcacatattaaagtgtcataaagaaaatcatcattttttatagttattacacattaataaaaattctagaaaaataaggaggcagaatggtcttagtaaacacacaataaaattattataggcaaataggaatgttaataatttccgtaataataatttagaatactcaagtgtgaattttaatttctcatggcttttgagaattcttcaatacatcctttgtattactgttggctaatatcattacttttaagctttgtgcatgtcctctaatagacaatgttcttttgctatgcttattttaaggaagaagcatattataggttagttaagtccaaatgacttaaacatttctctggaaataatactaaacagaatctttatatttttgctttattctgttcatactttagtgtaacagtgcaggctagtttatacttcattttctcaccacttggccattagcttctgaggaaggtcacaaggaatcatatgatagctataatagagaaagaaacagatggagtagtccacatgacgccatgatgacttagtaacttggcttgatctagactacaaacatagggtcccatccttctgggtccgcatctctgggtgtgaagaaatagagccacatttctgacctaggtggctggagcataaaaggggtcacatcatgccttcagggggtaggcagtaataaaaggggtgaaccatttcattcacaatgataatcatactcgtcttttcttatctagtcataggctacaaagtttgccatatggctagcatcatatttttggtcttgaaatttagtgagcatgccattgtacttaaatatacagatggaacatgacctgcatcatattttagataagcaaatgtttttatatatgtatacattgagaacaaatatgtgaacatattctagactgtggagaaaagttaatgagtccaatttgtgtgcagaccatgtcatactgtgagttggtgtctctatccagcctgttattttattctgagctgctgatgggtctgttttcagactcgaccccaaacagagcaaattcccagcaatagcacctgcttttgagtgaaatcattaggttccttagaactggacacattttttttaattaaaggtagaattatgcaatcagattttatgactgctttacttaaaatgtgtgttctttccctggagtttctcttactaatattgccatggttttactgtgctgttatttttaaagaaattatttattttattttatgtatatgtgtgtgtgcacctctgtgtgtgtatgtgatccatgtgcaggcaatgctaacaaaggtcagaagagcacatcagatccactggaactggagttacagatggctgagagccaccttaaggatgataggatctgaacctaggacttcaattcaagtgctcttagccactgagccatatctccagcctgattatgttgttgtttattattttccttcagtggtcgtgtgacttccttttctctacccacctcctatctctttcttgagttttatgataatgaataaaggatgcttgttttgggttctggctgatttaaagaatgattttattcattctttaaaaacaacatttagttcctttacttgtcatgccaagtaaccatgggcatctctgcctgacacaacaggaagtagagagaagatggataaagatgtaggggctggataccttaaatagagaaaatagtctcaatacaaaatagttttccttttagctgtgtgttaccctccaatgctctggagcccctcctgatgtgacctcctgatgtgatttttcgcatcaaggagaggaccatatggcttataaacttgatggttttctctcaactttgcctttcataaatctggaattttctcaagtccttcagttaatttcccattttctcacattagcaacctccctcatattttgggcatcctcaaggatgcgttcagttctctagtttcttccagagcatttcagttgataggagacatcaattgaagagtacctgtgtagcagcagattgtatgaatagcaaggtacccttcaatgttcatttctgcataaaaaatattgtcaggctttgtaaaaatagttgtagagggataaatacaaataacacaattatcgctcttatgttacttggaattaatgaaaggagaaaagacaaaaactatggagaaaaacatgcgattgtcaattgtgttgatgcttggactataatgcgggtgctacgctagagtctgatgagcaagattaatctaattcagtttggaaggctgtgtggtggaattagaaaaaaagcataatagaatttggacaacagagattgttagaaatagaaactttgctacctttcataaccaaactcaaattacctatgtgttgatagacaactggtctaaagatgggaaacagtgaaaaggataaagagtcgggatcttaggacactgttaattactgaaaaatcattagttaccctttactatctagatctattcagctaactcttcatgttaaaaattttacacttaatccaataactattccgaatggtacaacaactttttggtacctgaatctgcctaaattccttagcatataattgcttagaatatattaaaatcatgtggatcttctgactttgaggtcattaatcagggactcctgtcatatgctttaatgagagaacagacaatacacagcatcaaggatatatttgtaaccagaggacactgttatcacatctcaatgtgtgagtttgttggaagagtggcacagtccctttataaaaagttgacatgtgctattcctgaaatgtgacttttcaggcaaaaaagaaaaaataatcttgtgattatataaccattttatttctaaaaatgttaatttaatggaaacagatgacttttatgtaaaattggaaataagaacccgaaaaaggagaaagtacattaaatccctcataatctcattccttataaaactacattctggcacatttactttctatggcttcatgagcatctgtgtgttgtaaatatgtatagcctgaaggtcttgcatttgaaatggaaagttgaaattttaaagtctttggattttggatatgttttagattgggaatatatatgtatgtatatatatgtatatgtacgtataatggtatctataaaattcatttttatttcatgtacttcttaagcatataaactaaaggtaatcttatataatgttgttactactttactgcaaccaatctcatgagttcaaatgtagaactattcatttggcatattatatttcaaattaccttttgattcttgtaacagtttgaatatattttgtttgtagaatttaagatgttcaacccctgttgtggaaacctctgtgttcttttctgtgtgagtgtgtgtgtgtacgcatatcaatatatttttatttccctgtgtttatatatttaagatttctgatttttacattaatataaacagtaaaaatggaggtttctggatcatagactttgaacagttcataggttatgctatttttatggttattttttctaaaatatcaaatcgaaactctataaacaatataaatttgtgtacgttcttcttaagaacatcactctcaacacttggtattgaaattgtgaaattaataaaccaattagcagcacattcaattttctctttctttcaacacataatacaattgctgccaacaattacaattacaacagtgtctgtcttgttgaaccaatgattttatttgggtgacttacagaagcgtgggttaggggttacacatttgtcttattaagggttattattgctgtgagaaaacaccgttactaaaaagcaagttagggaggaaagagtttatctggtttacacttccacaatactcttcagcattgaaggaagtcaggtgaggaactcaaatggggcttgaacctggaggcaggagctcatgcagaggccatggaggatgctgcttactggcttgcttcccatggcttggctcaaactttctcttatagaaattagggccatcagctcaggatggcaccacacacaatgggctgtgcctgtacccatccatcactaagaaaacgacttacagctggatcttatggaggcattttttaaaatctgaggttccttcctttcagaactctagcttgtatcaagttgatgtaagattagctagcgcaaatggagcatataggtgactttatcagcagaaagcccctcttgcaggcagctctatgagagatacactgcttttataaccttggatagttgcctggtagatcttgtaactttctaattgtcctcagtcttctgagactctcctacctccagagggtaatgtttcagttcaagggaaacagctacatttacttctccacaccaagcatctggctgtggtagaccagcatgtcttgtcataccttaactgttcctgttttcacatggtctaactcttctgagtaagctttctgccttagcactcaccactatcctgtggctacttaaatatttggatagtattgtttgacatatctcagagctaagctctaccacagaggccatttgaagccatttctagctgctgaggtgaagtattgcttgggagatgtagttggtgatcttgcacacatcccttctaatacaggccagaggttacatcaagaaaccaatgtgaagatctaaggcttcgactttgggagtaaaaccagacactgtagatgggatacaatgtgtaagagactctatcagcattgaagaatctcaggttctagtatgctagtcttccactataattttcagatgatcagtcaaacttaagagtgggattgcatattctttattgatcttttccatggcttgtaagattaaactataaatacacttgttgaaaacatcttatgagaaataaatatagttttctcttagtacccaggaaaatatcagaaagcttggtttaaatgaatggtttagtattctaacacttgtagtaaactctaccttgacaacaaatgaagaattaatgggaaacctcctggagaaaatgagtcactgttgaaacagaaacagagcagtccagccaatggcctccatccagctgccttcgttacaatccctttatctgaagacagtttacaatgatagtgcctatagagattttgtctatctaatctagtcattatttcacttcagagctccctgtaaagtctaaagtcaatggccgtataattttagtatatttgtaataacatgtaattcaataaatcatagggtgcagcatgattagaagtttttcatgtattcagccattctcaacacagttgaaggtccctcttccatatgataaagtgtgctttgtactgtgaatggcagcatatcattatcacgggagctgtttaggaaatgataactggtccacgactggataactttgtaacatacttatacatgactgaagaaaaaagtagaaaattctcttcaaagctgaaagaaaattctctttttttaatgctgaaagatgagacctgacaggaagtttaggtaattcacaaattcttcgaagcattgttatttactttggagatacatttccctattctggaacttaataataagtgttcattaagcatcagtctgtattcggcacattactaagtctttgggatggtaatggtgactatgagacagctcctgccatgaagccgccactctacagtgggaatgactaaatgaagccccatctttggacctctatactggctagttttgtgtcaacttgacacagctggagttatcacagagaaaggagcttcagttgaggaaatgcctccatgagattcaactgtaaggcattttctcaattagtgatcaagggggaaaggccccttgtgggtgggaccatctctgggctggcagtcttgattctataagagagcaggctgagcaagcgaggggaggcaagccagtaaagaacatccctccatggcctctgcatcagctcctgctttctgacctgcttgagttccagtcctgacttcctttggtgatgaacagcaacatggaagagtaagccaaataaaccctttcctccccaacttgcttcttggtcatgatgtttgtgcaggaatagaaaccctggctaagacagacctcccagaactggttttaatgttatgccaacagtactgacctagagtggggcagtacctggaagaatgtagctcaagagtctactgtgctttgtaggactcctaactgtggaagcaggtgtatttttgactcttttgcctgcttttgggactcttctcttctcattagtctgccttgtccaacctcgctgtgaaggcttttgccttgacttattatattttcttttgtcatgcttggttgctgtcttttggaggcatgctcttctctgaaggagggagaacagatctaggaaagatgggagatggaggtgggtgggaggagcagagggagagaaacctgtagtgtgatgcattgtatgagagaaaaatctatttgtaattaaaagaggaacgaacatgttttatttcaaatgtatatgtacgtacatatacaattaatgagaaaaagaggccatgaatttgaagacgagtgggaaggagtgtttgggaagacttggagggagaaatggagtatgccactttattataatctcaaaaataaagtaaaataaaataaaataaaataataaaataaaataaatacaaagttaaaaagagcaagagagcccagcaaaaaataaattacccaagatgccagagctaagtggccaaaacaatttgattctggtttctagaatttcaagtctacagttcatgcttcaggccttatatcacctgcccactcacgtacttcatacctagtagatcccagataatacattaggcacaggagatgaagctgtgaggcagatggcaatctttgcagttatgaatcttgtaagtgcgtatgtgttggggggtagatttaaagagataatagccttaataatattttccagttccccaagaaagtctcggatgatttctgcattgttatcatttgtggtagcagggcttttctgctaacttcgttttctcccttaacagatcgaggaatgatctttcctcactctgataatgagggaaatagactcttcagaacgcactgtgctttgggatacatgaaaacaatattaatccttatgaatgtattgtagttacatgatctctgattactactttgcaagtgttctgaagtcaagtaatagctatgggtgtaataatttttatttctaattttattaatgcataaaagatacgaattttattgaactgaattggtctaattacaactgggaacaatgaagcctggaattttagtaagcttatctggctaatttgaaatgaatattagattaatatcagcatttttcctaatattgagaaaatgttcatacactcgtactagtattatgcttataaaaagctgcttgtatttgtataattagtagagaacatttacaaatatatgcaaatattattttcttgaattccctcaagaaattaagttcttttcaaaaaccataatttaatgaaccaatcgctgagcatcatgaaaacagtcaaagccaacaagcatatggtattccaaggaagcaaccaacgacagtattgataatggtatcacaagcaaacctgttattcattcaaaccatagaacaaaacacacagaaaaagttttgggtttgacatcaacatttggtagaattttaaaactcacattcttgatgttacatttatttgtagctgatttgaagaagtgattgtaataacctctcactaaaaacctttgtttggctttatggggtttattacaaatatttaaatgtagcagagataaaaaaatgagcaaataaacaaaaacctctggtagtctaaatatggcctcctgccaatgtataataactcagaattacagactagccagggggagaagggtcaagccctgagctactctgcatttagacaacaagcagataagaaagagcccaagaggatgataagagacatctaggaataaggtaaaattcgcaattatttgactgagtggaagccaaggcagaaagtgagcaactcttctgaagttttgtaatagataaataaaatataatgaaaagtatcctactaggactttgcctccaggttacaagtgagcttgatgaaggagattgattagggtgctagagacggatgccaccctggagtgaggtaaggagcactgatacataactaagatggtgtagtttcatcagaaagatgatcacatcaacttgtgagagtggtccaaggtgatccgaaaaataacttcaagcacatgtgatggatagatagatctgcaggagagaaaagagcagtcaaaaatgcttatgggatggatggttacacatgtgggaagaaatacagttaggtatttcttttgaccatgataagttggtacatttatcctatacggaaacataaagtagaatttgaggcccacattgacatgatttctttgtactgggatttctcagatcctgatggttttgtgtctgtcagatgaatttaaaagtcttcttccctgcatttgctatcaagctttgtagttgttctccgtggaaagattagtctgctgtaaggtagcttgtctagttggatgtctcctatcttctgatgatgagaggaagtcttcaggctgtgacttacagttagaacaggaaggtctcgtgaggaagggggtgaatgcatgaaatagtcctgttgtcaaatgtgaaggtgtagaagtatgagtgtttattttagaatagttctaaccagcagcagaagtggattgacgtcatctatccaagaaggtagagattatataaatataggagtttttataaataatacaatgagtggaaactaatccaaatgcatacagtgctagcacaaatcaacacaattcaaaatatgaagagaggaggggtagtacatagtgggacagagctgttagatctttaaaaagtaatgaatttctgctaataggtactgtgcctgagtgtgactattgaacatttacaaatatttaattccacagtgactccactattcacccatctgtgaatgttctaataaagtgatccgtgacagtttgtatctgatttcaaggaaatgtagtcttttctcatttagacaatctgaagcagaaaagcaattgacaaagggaaagctaagtgcagaaagttgatgcattcattataaagctgaggaagataccatagagattgaggagcagaaagaacatgaacggagagagtagttggagtgaggcatgctggccatgctgtggtgaacagttaagcatgctgtcaggtgggtcaggagccacagggggagttgaggtctttcagaatgcttttccaaaggactgggtgtcatttgtgagccaggctgagcagtctttcaaatgacaacaaggttctgtagttacaagtcactacaagtagatgcaaagtaaaatttcttcactgtacctagaagtagttacagaaagaaccggattagaaagtcactcaggtcatgggtctacttattggcctttgtaaattagagctaagtggaactatgttgtaatgcttacaataattaaattgttggtgtcattttcctgttttctttttaaaggtttattttattgttaagtgtgtttgtgtgtgtgggggggggctgtgtgtgagcgtatgaacatgcatatatgtgcatgtgtatgcatgcacatgtatatgtgtatgtgtatatgtgtgtgtgtatgtgggtttgtgtgtgagcttatgaacatgcatatgtgtgcatgcacatgtatatgtgtgtgtgtatgtgtgcatgtgtgtgtgtatgtgggtttgtgtgtgagtgtatgaacatgcatatgtgtgcatgtgtgtgcatgcacatgtatatgtgtgtgtatgtgtgcatgtgtgtgtgtgtatgtgggtttgtgtgtgagtgtatgaacatgcatatgtgtgcatgtgtgtgcatgcacatgtatatgtgtgtgtatgtgttcatgtgtgtgtgtatgtgggtttgtgtgtgagtgtatgaacatgcatatgtgtgcatgtgtgtgcatgcacatgtatatgtgtgtgtgtgtgtgtgtgtgtgtgtgtgtgcatgtgtgtgtgtgtgtacaggtgcaggtgtatacagatccttgtaaagaggcttctgatccctccaagaactgaaattaacaggtgattttgagcctcctgatgtggggggtaggaactatgtcctctggaagggtaagaaggctctaaaatgctgggtcacctcttcagcgacctgtttcctgtttatttcaatgtctgagccaattccatgtaaaagaataacattgaaaaatagctgagcataagttcacctttgggagtgagaagtttggtctgctcctccacaaacaccaaaccttgtgctcgtagtgtaggtaagagactgctagttctctagtcattctcatcaaggccctcaagcccttgaactcagtcagaggaggagctatcttctcttcttgattcaccttccttggtatgttagtcagcttgctgttgctgaccaattaaggaaaacaaaatgcccgaggggaagcttccaaagtgggcagatttatctcaggccacagtttcagaagctgagctctcacagtggagtgctttcaatgacatccgtctttaacgaagttagatctcacagtaatgtgtcgggggctccacgtgtgaaaaacgcctgttgatcttggcttaccagagactctagttatctgaaaagttaccaattactttctgcaaaggcccggatatgagaattctatcttttctttctttctgtttgagatacatgcaaccatcagatataaatggaggggttctctaagctcaggttctctacatggtaccctcctgcacacctaggaagtcaaaattaatacgtgttcctaaggctattcagatctgtcagctttataatgactcctctctctttctcttcctctagtctctctttagctctgtcattcaagaatgctatctatccggaatcatataagcttattctgaaatgcctatattaagttgcaagacctagaagagctaagaggttgagtttactatgtggatcataacccactcttctcctcacttctactcaagctgttgcgtagggcaatgctttgctccttcatatttctgagtgcaaccccatgatacagattcatcacagttcagctattcactaactgaaagaaattgtgttgtttcctgtttggaactattacactagagtgtctataatcatacatttgttgttatgttgcatgaaataattatttctttccattgggataatgctcaacactgtaattactgggtcacatggtcagctcacattatttttgtaagaagctgatgtgctccttttcaaagtgactgtggcattctgcatatccactggcagtatatgggacacacttccctggataatctcttagataatcagtatttcctgtgtaggtgagcagtagaatagtgtgtttactctgtgttttcctaatttctaataatattgagcaaattttctcatttgtgtatttatttgttcttcccagtgaaatatctgttcatgtgttttgaccaccttataacagaaatgttaataaatttttgacagtccttatgcatcttagataccagtcccttggtggatatgcagtttgtaagtatttttccagtctgtagtttgtcttttcaatatttttacaacatcttttctcagcacaaaagatttttcattttgtgaaggaacagttaaaaaaaaaaaaagaactctgtttggctttagattctgaacatattctgctatgctcctcaaccccatgtttttgtagcccagttttaaattttattaagtccttttttactttgagttagcatttgtgagatgtgaggttcaatatgggatttcagctttttgaagggaggttcaataatgtccagttgccctgtttccacttgttgaaataggatggtctgtcatccactgagctgcacttgaacctttgtaaagaaatgaactgaacataccttgctctgtgttttacatactctttcattaacctgtgattttctgctaagcctatactttagcactgtggtgtgtgtcaccatgccacacttgctttgtcccccacccctaatgaccttatctctcctaggtcttgcaacttaacatttgaattttagaataagctcgctatgtttgcaaacagatgtcatgggattgtggtgagattgttgtcaatttagattggcgtagagagaatttgtgtatttaccatgctgcagctcctaggttcttgatgtggtatgtcttcattgttttagatgttccttgatttcctgtcgttagcacgtcaccattttaatattatggatccatgtttagctagatttgtatctaagattttcatttccttcagagccagtgggaatggaagtataatttttcattattgaagttaattttggcgtagctttttgaatgctcctttggtaccaggctgtcatctattgtttttctttatatgtcaacatgtcacctgcagtggtgtgtctattcatctcctgtgtttgatcagccatggcagaaatgagattatgttcacaggatttgggactttagtcaaattctttgaggctttgagaggcatctgagagcctctgtcacatgtaaatcttacacgttggtgacagcttctcctcacggagcattcttacttgtttcagtactcatggctattttcttggagatgaaattgtgacaagtttgatttctaaggaaaaaaatgctattattgacatgtctagtttctcagctggaaagtcactgacaacaaattccagcataaataatgtatgaactcaattcaaacccgccccccccccaaaaaaaaaactatctttataatgtcacaatgctgcttccaaaggatgattgcttaggatttaggatattgaagactaaaaattagttcaaaagaatttcttaaacttaaaaaagtgactattctactaaataggattctgtatgtaagaaaagtttggttccaaaaaatattatatcatctggtcaccataatgtcacttgtagtactaagtcaataactcagtagctatcagagttgagtgcttgttttcacatcttatcaataacattgataaaatcctaattaaaacaagtagccctacattggtaatagaaatttccatttacaaattacttaaaaaagaaaaaaaaaacggtttccactacacacagtgaggaaggactttatgattgcaaagttatttgaacaactataaaatgattgcattttccctttaatttgatctgtatggccatctccgtgatcctaagagatttctgacttaaacccccccccccacaagccttcagtgatatctattatttccctgaaagctagatttgtgctgcaaaaaggaaggcttcctttgtaaatttgacagcttaataaatttgtactggttttctggtaatggagataggcaatctgcatcagaaattatctgaaactatgtttgatacacactctcatatattttccactatgtgtaatgtacacagtatagtaatggacactctctgtgcacatgcacgtatagctatggggtggaattagatagtaatgggcactttctgtgcataagcacataatgctatggagtaaaatcagatactcaagcacctcaaagtttacaaatgacacgacttacatttgaacaaattgagttaatggttgtatttttttgtattggagaatgtgagtagtgatatttcatatagtattttgccagagaaatgtctacacacaggtgcacacacatacatttaaatgacacataggcagacaaatgcattctatttatttatttatttatttactattgaaattttaaatttacatttcaaatgttttcccctttccaggtcttcccttcagagaacccctattccaacccccttcctcctacctctatgagggtgcttccctacccactctcctcctcccaccccagcatttccttacactggggtattatatatcctcaggcccaagggcttctcctcccactgatgtccaacacagccattctctgccacatatgtggccggcgccatgggttactccatgtgtattctttggttggtggtccagtccccaggaatttggaggggtctgccctgttgatactgttgctcccttcatggggctacaaacccacttggctccttcattcccttctctaactcctctatctaggaccccggatctcagtccaatggttggctgcgagtttcctcctctctctttgtcaggctctggcagagcctctcaaaattgcttcaagtttctctccatttagtttaatgttggctactggtttgctgcatattccttttattatgtttagttatgggccttgaattcctgatctttccaagacttttaacatgaaggggtgttaaattttgtcaaatgctttttcagcatctaatgaaatgatcatgtgtcctggatttcctgaatgctttgggtttggagctttttgaatttcacattttctttgactgttgtgtcaatgttttctatggtatcttttgcacctgagattctctcttctatctcttgcattctgttggtgttgcttgcatctatgactcttgatctctttcttaggttttctatcttcagggtcgtctgcctttgtgatttctttattgtttctatttccatttttagatcctggatggttttgttcaattcctttgcctgtttggttgtgttttcctgtaattctttaagggatttttatgtttcctctttatgggattctacctgtttgcctatgttctcttgtatttctttaaagtagttatttatgtacttcttaaagtcctctaccatcatcataagatgtgattttaaatcagagtcttgcttttctcgtgtgttggggtatccagggctcgctgtggtgggagaactcagttctgatgatgccaagtagccttggtttctattgcttatgttcttgcccttgccttttgccatctggttatctctggtgttagttggttttgctgtctctgactgtggcttgttcctcctgaaatcctctgtgttagtactcctcctgggagaccagttctttataggaggaatttgggtgtgaggagccttggtacagggttagctctggggtgcatacagaaaccagaaggatcctgtccccagctcctccttaatttctgtgtcctgatggctgtgggaggttccctctggggccaggaatctgatgagaagtggtggtcttacctgtgcttacaggcttgtctgcactcctgggagaccagctctctctgggcagtatttttgtatgtaattctgtggcacagaatcagcttctggtgcagacagaaactggaaggctcctgtcccaggctgctccttggttcctgggctctgggagggttcatctgagcagcagtggtggtgctcatagacttggctgcactcctgggtggctagctctctcctggagcgatttgggtatggagccctgtggtagaggatcagctccggtctgacagaaactggaaggtcacattctatttatttatttatttaaataccatgtaagtgttatgagggtcaagatttttttttcaatgcctggcacttttgactcgtttgtattgacatctaaattttcttcagtgccttattcttttctttaaaaagactatcttaaaaattgaggaataggtcacttattatgaaatgcacagttcaatggtttttaagtatattcacaggattctacaactgttaccagcatctgatttcagaacatttttatcatttccaaaagaagtcctatccttttttgggaatatctatccatcactcttttgggacagatagcaacaactttttgtctctatgaatttatatatcctggacctaccatctaagtagaacactataatttatggtcctctgtgacttgcttcttttacttaccaggttttcatagtttgttcacgttgtggcatgttttagtacttaatttgcttataactgaataatatactgtacacatttaccgctttttttaaatcacttaatcagttgatatgtatttggtttgttttctgtagtcactattgtgacagtgaacttcatatagttgaacccacacagtattttctagcattaaattatgtgactttgataaaggctgtcagattatatagctgactgacattggagctggttctaattttagactattgctcgctgacgatctcttatctgacatggttggggatggatgtatttcagaattttagaactggtttagttttgctatgttgcatagatttttaccacttgagtttccatcatttgaaaaatgaaattccagaccatgaaatgtttaacattatgtcgggattcaaataattttagatcttgcagtattttagagtatatttttttaattgggggatgttagacactttgtatgaccaaaggcagcatggaatccttgtgtatgtctttcttaaagcccattgtacacattcatgtaccttaagcagtggtgactccaaaaagttatagccagtaggaagattattatttgtattcttctggaaaattaatcaaatacattaaaatttttcttcctaattttgtaatatttttttcacataaggagaaaggtatgttttacttagtgaaaatttagcatataaaaatgacaggtgagagtgaggtcgggacaatgatacctatagcaattgggtttgttcgtgaatatcgaggtcgtagaacagttctgtgtgttctggggatccaacacaggcctgcaggcatgtcctcaggcttggcaatcaatgcttttacctatccctccatttcccagtcccaacacagatcatgtttcatttgagtcctgtttcttacaaagttactacttctcagcatttgaagctttggccagttaagtagtaaggacagcaattgctccttttttttttttctctgctacatagggcactctgaaagcaaggtcctagtagagacctcataggacgatctctctctatgtttacaataagcgccttgcttcagaattagagtctcttctcaggaaattaatctctgaagtgaaaccaatgggttttaacttatgattcttcactggttattacactcttaagtcgataaaaatgaccttttacatttaaattaagggaagttaatttgccttagtgtcatttcattactttgttaccagcttaattccttggaggtctgacaccctggagactggcagatgaacattagctacagcttctgctcttctgcatgctattttctctctccctcgctccttctctctgtctctctccctctcctctccttccccttcactccacccagtgaactttccctcaaatgaatgagctgcatagttgtgaaacacaccagttattattattattttttgccagtcttaaggctccttacttctaggaaggagcataaagacgtgttatgtgtaaatgtcacttgtctgtctccctccactgatttctccaacttaatatcaattctctgggactcctgaggagagattaattagcagtgcatgactgagttgtatgaaagcaaggaaggattttgaagagtggtagtgatagtcgaagccttttggaatactattaatgtatttgcatagtttgcatatcctgggggcaggaaataaggtcatttgcacaatcccctattattaaaagccctaaagttatatattactcctgatgcaggattttataatcaagcggattttatatctcacagcagagtcctcgggacaaggccccgtcctattcactaccttgtggcccctgcttctacctacaccttaaggacttgtttagggatgtgggtggtggtcagcctgtgagcagtgggctagagatacaggcagaactgcactaagcctaaagctctctctgcttctgctccctacagtgtgcaattctgtcttttcttccgcatgaaattgccttttctttttcacattcatctgagagactcaagcttttggtagagtgttaggagcacacatgattctctcacacacagcgggcttgagtaactccttacacttttgctgagaagcaatttggaaagggtcttaaaagtgtttttatattttacataatggtttttaaagctcatattttgatgatttgatataggcagggtatttgtggctgctgatttatgagagagaaaactggaaatcctgccatctaattacaacataaggcttaagtgcactgtaactatgagggaacaggctgcagtgactgaaaatatgtttttaggtaagccactcgccctcacaaaggcactgtgcttatcttgcatatatttttgcccctctttctttttctcattgttaaaagtttctgttacctgtgtttatgattgtgtgtgcacatacatgtatacacccttgcatgcctggacaagacaactgctgtctcatctctctagcccccatatttcttaacgccatagaccaaatctatcactttcattcttaatgaacctcatctttgcttttaaaattaagtattgcgcgagttaagtattgattatgtgattttgaagaatgatagtagaaaataaactttggagattcaagttttatggacatgacaatataaataagcataaatcgtgtaaaagttcaatatctttaatggctttagttattcatgctatgtacagtaaatgttagagaaagtatggctttaaggctttgcaactgtgagtaagagaggggataaagcaggctctcatggcagtcatttcctcagtggatctgggtgtaacatcatggctcctgtatcaactgtttagatctcctttcttaaagtttcccagttactaataccataatggatgaacgaagtagagaaagggccccaaagggacatgctcactacatatctagctcagggccttttcatctataggtgacggctttcacttctgatgagaaatgacttctgcttaataagtcacggtagcataaggaacttatcaacaagttcttgtgcctttactgacgaagtatgtggaacatgtgtgagctacttgcaagtacttagatacataaacaaatttctagcaaaatcttggctgctcagtgttacagatgggaaactagtgcttttctcttacagtatggacttgattaactgaatcataagttatcttaggactcagtattgtgtctgtgtagtacacgaagcaccagagagtagcagaaagcacaggcttcctagtttattcctggttcatctttagttggaagcatgacttcaaagccaaactagagagttttttgctacttgtttgctgagaatgacctctgcaaaccacacagcctttaggaaaaacatttgtcttatctgtgaatggggcattggaccagaaacagtgatttttcaactgtgcccaattgtaagctccagggaacaaacattgtgatagtttttcttctagacatcgaggacctgtgtaactctggcaatttagccagggctcaaaatccatggttaaatcatgactcaatgtgtgttatgtagaatttcagtccttagagcttctcatagccaaagctagttttgtttatttatttattttatatactaagcataatgtaagggttcattatgaaaacactaaagcactatttcaaagctgaaaaataaaggtttgaaagctcagtcaataagtcctttctttcctcctcctcctcctcctctttcttcttctcctcctcctcctnnnnnnnnnnnnnnnnnnnnnnnnnnnnnnnnnnnnnnnnnnnnnnnnnnnnnnnnnnnnnnnnnnnnnnnnnnnnnnnnnnnnnnnnnnnnnnnnnnnnnnnnnnnnnnnnnnnnnnnnnnnnnnnnnnnnnnnnnnnnnnnnnnnnnnnnnnnnnnnnnnnnnnnnnnnnnnnnnnnnnnnnnnnnnnnnnnnnnnnnnnnnnnnnnnctttatattatatgtgtttgtcagatgaatgtgagacaactaggcaaagaaagcaatgacagacctgccaatcaagagaagagcaggtgtgaagcatctctgggtgcacagtgacttcagaatgatgagaaattgtacggctgaaatgtgcctgtggggaaagagtgaatggtcccaccaaagcccagcaagcctgggaagagctttgcctttacttggtagggaaacaagcaatatatgattgtaagaaagcagaaatatcacagttgcatttattttcctaagagtactgtaagtcacagtgttgagattagaccctcaggtcctgggagaggcctgctgctgcactacttgaccttgagtttaatggagatcataaataaaacaaaagtattttagagttcagagtatggcatccacctgtttttcagagttggttggtagtgttatgaaaaacgatttcttaaatagttcatcattcttccaagggaaaatttattgcttctcttaattaagaatctaatttattaatatgctaacatgatgaaggaggacacaatgcacactggagatgaacagaagttactcctatccctaatcttctccactgcagtattaatttcatttgctggtgattgtgagataccacaaaggtatctctaggaaattagaaaatccaccaaggaaaaaaaatggatgtgaccgtaatggcaaatgacacctcaattagaaccactgtactgcatatgagagttatcatgaatggtgttttcatcctgccacttaaaactacatttttttgcctattcaagttatattatcataatttccagaataaataatgatatatatctataattctggtagcacacatcatgtcagaataattgcttgtctaaggatggagcaggagcttgcctctgcttggtctattttaacactcagttttacttgctgctctatgggcaactgtgagtctatgccatcagtcgatgtaatttaggttttgaaattatcatgtaattacatcatttgccccttcatctcttcaaatcctcccatgtaattccttactctcttccaaatttgtggcatcattttctataattgttgatatgtatacatatacatacacatatacatatacatatatatatacatatatatacatatatatatatatatatatacacacacacacacaatattcctaaataaatacaatccatccagtctgtataatgttacttgtatgcacatgttttcagaatcaaccctaacttttttgctaagattgcaatagagaaacattcctcaagtgttgactacatgctggtgtgctgtgacacggactgcattgtggtatgaactgatgctgtaatgtccatacttagttggtgcatctcaccagacttcagtttccttgagggcaggcctgtatctgtctaactttgccttccaggcatctagcaacttgtctaccgtacatagcatagaacaaatcaatcagcatttgtggcatctttttcttctgaaattgaccctttatctttcccatttgcttactcatttctcactctcttttaggtcctctccatctgtcccaaggacatgagagctgacatctgtgttcatctgaaccggaaggtttttaatgaacatcctgcattccgattggccagcgatggatgtctgcgtgccttggcagtggagttccaaaccattcactgtgctcctggggacctgatttaccatgctggagagagtgtggatgccctctgctttgtggtgtccgggtccttggaagttatccaggatgaggaggtggtggccattttaggtactgtgtaccttcctgactcaatgacaaatggggcactgtcctggagttttagcttcccaagtttctaaacagaaatcccctctgtttggtggctttagaaactcggtcactaatgagatgatgaatttcagtgaaaactggtcactgttttggcaaagaacattagtctcagtcacagctaacagggaacattgggcggagtgacattcacttatacaaaaagtgaccgcagcctaagtggctttgcatactctcattggtaagtggaaccattgttggatgagttatagagggagttgatttcagagacaacagatgtattcagttcagcctgtttctttactcaaaagccaggcaaggctggaaaaaagtatggagacttgcccagctagttagtaaccagtgagggctgagttacttcagcctgctccctacagttctgcctcattatggtggatggatgaagtataaagaagatggtattgaggatgctaataagactcacaggagtgagcacaatggggggagattaaatttaggcttatggaggcggttccatccatctgtcttcacaagccaggaaaattagttggccaacactttattctaaagttcagacactcagagggtaaggttaccaatagcacaacacaaaggggtcgatgctccatgaacttgacaaaacaaaacaaaaacctacagcttaatgtacgtggcaacagtgtaagtgaaatatgcatattttcgcaagcaaaatcgctgaaggaacgtggagatcactttctgctccaatgcccgcagcaggttctacacagataaaacagaaagaaaggagaggccaggtgacatcactcctgagtttttctcaagtaaaataccttagggtcgcacaatgtcaactccactttgatcacattttccatgccttgtgtctcattgaaaaatgagttcgatctttaagctattggattttctctttctactgaggtcatcccaccatagcttgactgtactgattctcctaagaaaaagactgattggtggattttagaaactgcagaagcaaaaatggaaactgatatgaaatagaatgcaaagagtgaaagaaagaaagaaagaaagaaagaaagaaagaagaaagaaagaaagaaagaaagannnnnnnnnnnnnnnnnnnncagcacaaatctagctttcagggaaataatagatatcactgaaggcttgtgggggggggggtttaagtcagaaatctcttaggatcacggagatggccatacagatcaaattaaagggaaaatgcaatcattttatagttgttcaaataactttgcaatcatagggagggaggggggaaaccttatttcaaaaagtacagttattggaaaagacagaatttagaatggagaggaaatgaccttttatgagaaagcagttgctataaaaacagtagaaaatggatcaaggcagcaaaaaataaaatagcattctttgcaaagctttaactatttggaaattactttattgctactgttaggtctcttgcagaaattatttttctttaaatatttttgcaaggaaacaatagagtgcttggaataagcatctggggtgcttgctgctgccttccttcctttgcttttgtctgttggagtataacggaggcataatctttcatgaaagctgtatgtcactggaacagccctttgtggtaaaatgaatcatagttgtgctatgtccactcttacttgctaaaagaataagataaaacacccccccccccaatcagatgtatttgtcttttacttagcccttccttgtcaggaggggctgatgggaaaaacaagcatcaaatacatggtatgggtgccatttatttggcttcattttcttccttacactgcaccttgtaactcctctgacgcctggaaaagctgtgaggacagggactctggcttgggtctgttacaatggagtcatttgctcagtgagacaaatgcattttccttccatctgggaaggaaatgatggctgcctttgcccaatgatactgtgactatgaacacagggtcctcggggttcaggctggtttctgagtgtacatttttattctttattctcccaagtctcaggactcagttgcttgctgtttgcatcacttagtgagtcagattatgtggacacctctctgacaaccttcttccttttatatttttaaaatgggactttaaaagaaactgcttcagccaagaggctattaagagtactttttttctttttctttttcttttttcttttcttttctctttttctttttctttttctttttctttttttctttttcttttcttttctttttttttttttaacatttaagacacctgagcaatgcttcaggagagaaggaggatgagagggatgctaactaactcgccaatgaaacctggcatgcaatgactatcccttactttcttgctcctttcttttaaaaattttattagcctattttgaataattctaaattggaagaaatttaaaaaattcaccaggttgcaagtaagctgtactcaaccttctttgtccttatcctccagtacccccctccccttccctccctcctacctccatttccctccctctgtccccttccctccctcttctcccatctctttcttctccctcctcttttcctctccactccttttccctccccccttcataccattcacttctccctctccttgtcccttgataagtcagatgttttctaaactttcttcagcagcctcacttttcttgttcaggactcatttgccagatgaaaggtagcgaatagaggtcactttaaaattaattcaaatctctggatccagaagcaagtgcagtcttattcttgacagggcactattctttagtgtgtccaaagtgccaagcagtttacagagtcagttctgaagcataactaattagaggaaagattaaaaaaaataacgcagtcaacaaatgcctttattttcacactgggggctggattcaggatgtgttctttaaatagggcatatgaatgtaatcgcagttgatgcctttttccaacttgaagttctttacagttcttacacatccacgcatttttttttctttgaccttcccattttgtatgaaacacaaagaattccaaattaagttcatgatgcattcatattttatattcgctaatgtctttttactttttacttcctactctataattatttaactcgaatagatttgttggtatggttgaaatagccaggttacttccaaatgtcttgacaagtatattgtacctttcagagactgttaaaatagtagcttgctaccaacaataggccttgctcctaagagttgggacttgttttcttcactcttcttcttcttcttcttcttcttcttcttcttcttcttcttcttcttcttcttcttcttcttcttcttcttcttcttcttcttcttcttcttgcttgtcgttcttgatattcagaatcacagggttggaatcttaaactaaggaaattgctgtcttacgcctttcaactttaacttcaaattcgcaggagaactaggactgtgtatgtagaggttggatgaggagtgggacactcctggaagcttggaaggaagtgtaaggggggaaaatggaagggggacaaacgtagaacaaggaggaggatgagctaggtcaagattttactctacgtggaattcactttacatggaatctttaagcattatgtcttataagcatttgtgcctttcaggaaaaacataaaccattgtttgcaaattcaaaatctgcgcctttattttcttctgaaaggaaaatcagatctgagatgtgaacagctaattctttactcttctgagacctgggaaaatgggacattcagcggtagctattgtcttcactctacccttgctataagaaggcaagagctttgtactgtaagctcctggaatgtattattttttctttttctttttctttttcttttttttctttctctccaaatgctcatgttttacatgagctgtgaaatatgtagatttgaactgtgtattatgaagacaagtatcttcagtgtcaacaaattcactctttttatttccttgaagcatacctttgctgcgttttaaatgatgctgattttaatggtttaaatggcatttatgacatttttcatctagagctcttagtattgcctccgagtgcctcatgcagtaaatatcaccagggctgtgaaagcgtctgccttcttgggggtttcaaactctctccctagcactctttaaactaaagtcttttattgtatcttgtgtgtgtgtgcatatgtgcacacttgtgtctgcatatgtttctgcgtgtacatgtgcgtgcatgtatgtgtctgttaaagagagaggacatgagtattgctctttgtgtataatcagtcaactttggcttctgagacagcatttattataaccagccttgaacttgctggccagcaactgagcctcatgaatctgtctgtctctacttctccaactcttgaaagtgtgtggcataactttttgacttaggtgtgttctggaaactgcaactcaagtactcgtgcttgcaaagagaacattttactggctgagccctctcccagatttctactttgtgtatcttaatattatagttacgatcagtaactattactattgcccttacagtttttgtttaaagccctcactgccccagtttgtacccagcttcaaacctccattctgtattctctggcaccagagtggcattgtgtccatctccttgggatttacaccatagctttccagccttgaggattatctatcaccccattatctgccttccttattagcctgacttgggtcattccttctctaccatgctcttttctgaatttcagacacatgcaaaataaaaataaaaacaagtgaatataggtaaaaagggctctattctaattcccccataaacttttcatctttaaatcttgtcatcttccttcttttcttctttaaaatattacttgatgccacttaaagtttataaatagtcatagtccatttaaaaatgtaaatttgaaaaaaactaaaatgactacatttatgattatgtcttcatactaaagtttatgagccaactgtcacttttgcttatagcgatggactgactaataaattaattatgcaattcatgcccagtatttccttgttccctttctgttttgttgatgaaacatcgtcgaatgtgaggtattgaaatctcctaatgatactatattactgtttccttctttatctcctgtcaaagaatatttcctttatatatttatatactccacttctacatagttttacaactgtgatgcagtcttcgaaattggtccctttatcattaagcagtgaccttctttttgtctggtgatctcttttgatggctgtctcatattttcttacatacttttagcctgagtttgtatatcttcaaagataaaaatgtatcaactacaggcagtatacattaaatttttaaaatctgactatattacatattctattcaccactagccacaactggatattgattgcatttaacccctttgtgtctttgattggattgctgcatctattcacattcaacattcttaacattcttattgataggtggacaatggctactttattacttgttttctatctggttgtgtctcctctatccttcttctctctctctctctctctctctctctctctctctctctctctctttctctcattctctccctctctctctccttccttccttccttccttccttcctttcttccttttctctttctttcttttgtctttatgatttggagaatttctgtagtgctaaattttgatttcatgcactttttcttgagtatctattataatttttaaatggatttttgctaaataaatacatttttaactcccctggctcatgaacaaatgtacatgtccattatctgagataatagataaatattaatttgatttgctgtggttacaatttacctacatgtacttttgctggttagttttacgataacttggcaaaggctagcgtcattttgagccgagaacaccaactgagaaattgttcccatgagattagcctgcaggcaagcctatggtacattttcttcattgatgttggctataggagggctcagctcactgtgattgatgccatccctgagttggtagacctgggtactacaagaaagcagagtgagcaatccatgaagaacaagccagtcctcagaattcttccatggcctctgtatcatcccctgcctctaaattcttgccctcagttcctgccctgtcttccctcagtgatggactgtgatgtggaactataagctgaaatgaactctcatcaaatgtggatggaacaactcatcaaatagaaccatagtcatgctccaaacatactcaagaaactacctaagtaaagttcaaaggacctgttggatacattcattatcctcaccaatgaataactgtgatgctttttatacatttttaaacctacatcatcaacatgctaggtaatgtgtctaaggtaatagaaaaccaaatccggctgtcaaactagccccatagcaccacatcccccaagctggttacagctgtattactctttaatcatcttgcaactctacctctgttttgtctttacattttacagtttcttactatgtggacgttaagcactaatttctattttccaatccagtttcctgtggttcagcagtgaaatacttcataaggcttgatgcaaagaactgagaaaatataaatagagcaaacaacagctttcctgttaagtgcgaggttccttcctattttagggctttgggggaggccagtttgcttaagagccgaaatgtttaccgcagggatgacttgcacccagcaggaactgacctaaaaactggcatcagatactctgtagtcatgaagacaaatgggagcttctttgactgaaagtgtgtaaaaaacctttgccaggcagtaaaggctgtgtctttattgggtactccatgcattttgcactatgtacacattgtgtgatatttttctcagaatgtgtaaagtttggaagatgccttgaagaggaacattaatgcgttctgtcccacatggtaaataagtcgttcacttgcatgaagaccactttcccacacttgtagtaaaagagtgctgtgaatcgaatgatatattacatgacatggagggtggacttataatttgaagtgaatgataggacaaatgctcagcttttatatgacatatactcagggaaattttatttactttattttctgaagattttgatgaggaagtagaattacccagatttgttaattttgttatatttctctcataattttgaaggacaagtaggagacaaatttagtcatgggttaatagtctggtttcttattatcctttttgcatcatagatattttcccccagaatcccaaaataatacatgattttagaatgatcatgaaggacaatggtagagttctcaactaacatgcttgaggccccaagtttgatccttaaatttgaaaagaaaaagatcaatttaaaaacttcaaagtagaaataggttaagatttgaatttttcagttaggtaaaataaaatgactagttaatatttgaatgcctacataattcacaactgtgtgtttcggtaagagaagattgtactcatttattatctttgaactcctgaatctcaactaccaatcaatgaaaatttattgacttcttttaggacaatattagagttatccacatttgttaattctgctgaagttctctaatgttttatatttgtacatgccttaaaattttactgtttatctatgaattagtttgctaatttttgctccttttagtaaatgctatatatatatattcatcatatataatattgagaagttgcataatgaaaaacataataaacattatttaaaacctttatttttattactgaaatgcattttcttttagtcgtttttttttttttttatcccttatctaaatttgttttgatgacaacttaatcctagcaaattgactacatatcacggcagaatttgtacaatgcactttggttccatcatgaaaactttctttaaaatgtatattttctgttaataattttagtctttgtgccttagttttattttatatacttcattatggatgttagaggcagttgcagattgtgctgatttcataaaatgagttctccttcagcatccatgaccacattaattccaggtacttacccgggttccaagaaccagagatgattttcctttggatgaagaggccatatgtccaattacagaattgttggtggctcccaagctgtgggtgccacaattgcaccctttgcattattattgtgacatgttggacaatgttgtagtttatagacttcatagatgggcaggacccttgtctactaccttcccatggagtctcgcttggcatcttctgctgctacaaaagcaggcccctggccctactacaaagtaaagaaacagatgacgcaaaacaccgataaaaaatgaacagcaaagtatcacaatagacaccaaagggatccaaaggaataccttaaaagcccttactctacaaatttggaaagtctgaaacaaattaatttctagatccattcatgtaattatttaatccatttttgatctcgtaatataagataaacattttgtatgttatttgtagaaacttattgaagtctttatttattgatattttatacaattttatgtaatttctagtggttttgcatggatggtgtttatttttaactgccaggctgtgactgatagccctaccctgtgagttacttgtgatgggtctaatagttttataaattcctagacctgggactactcagtcaaatacattagctaataccacagtgcctgaaaatcagacagtcgatcatagtcaggaatggtgtaattggtaatttgagaaagtataacagaaatgaatctgaaagaaatataatccttttctatctctttaaggaagagtaagagtctaatgatagtatagaatatgttcctatattagagattttaaaaaacccagaaaaatctaaaagtggatcaaaataaccttaaaaacttgttttagcatcagagactgtgctattatcactgttattgatgtcttgtctttacaaacaatgcatgtacatttaaaagaaagccatgcattatccctatagctctgagagaaactaccatattaatgcatttgtttctaagttttatacacatgtatgggtgatagggtaggagtgtatggtccataaaatgctacattgtatgtatcatttgattttctgattttataatttgatttaatgtgagcatttctgtctgtcgtttcatacaatctatgttacttagtggctatctagtgtttcattatttatcccctgaccttcattttactacacttcattggactgttataaatatttgagcattttcacaagtaaatgtagcacttctgattatgcagttagagtaaacacttttaattggaattgctatcttaaagagaatgccacataaagatttcatataggatgtggtcttatcatgtaagtttctgcctttagtatcaccaggctatcgtaatactgtatcccttgaccatttagctccttggtttctcattttatttcttaggatgactgtaggtatcaaacaactgagtcattaaacagtgacatcaacttcaaggatattttagtggattgaaaaacaaatggattattgaaaatgaattgggcacctaacatgattattttatgccagtcatgtgatctgcatggtgatctggtcaccttcataatatcttacatggtttctgcatctaccatactgtgcctgcctgaccatgagggttggcccatctactactctattctaagaactacccagctgcccatttcaacaaagaatctttgatgtacatcaccaacttctctgtttctttctctcatttctttgattacttccgctttcctttctagtggtgttattgtccttcggggctttatggaacacttcttctttcccctcttctgattttaatctgtaagatgtaaataggtatttgttcctctgtgtgattagaatgcatagagaacaagtcatgcatggaacgcctctaggaaagcttatcccatcagagaacatctctcctgtcttttccattttaaaacatattggcagaaacagaacaaagagagcagatggctgaactttagaagccagagggctcatagagaaccttcctaagcagacaggcctttgagggttattggcatttgacatttcctcaagccctttgtccaaccgggcacttctgatttggaatggtggatgttctcaagcatcagttgatggtgctgctgaagtgaataggttgttctgcaattgtagaatcttaaagatgcatttgcattcaactctagcatgtggctttgattccctgggattaaaagtgtgtgactctcttcgcctccgacagttcagtttcctgcgcttaggaaatcatggttgggggtctctagagctagacttgagaccctgtcaggtttaactatgtagaaagagaagggcctactttgaagatagagatataacatactttaatgtgcttggggagtaattcttagttactgaataattctattaatgtatattgcatcaattatagatttataaaggctataacaacagcttcttggatattacattttgttttgttgtcaaaaatttcctaaaaaacatgagaaaaaaagaagctatttttgctttttctactcagaatgggaaaaattaatgttgcaaaagttattgaaagtatttattaaaatgagagtaatggctactctaacaaatggcatttatttccccaaccctaggtttccatcaacaactaaaatttggggatgtcctcatgatgaaaatgtgctgtgcaatattacatatatacagagggattcatgctttaaattatatagatcaatactacctactaaacaacaacaaaaaaaaacattagtgggtatggtagaaactgttgtcttgtcctgctttctagggaaaggtgacgtgtttggagacatcttctggaaggaaaccacccttgctcatgcgtgtgccaatgtccgggccctgacttactgtgatctgcacatcatcaagcgagaagccttgctcaaggtccttgacttctatacagcatttgcaaactcattttccaggaacctcactctcacttgcaatctaaggaagcgggtatgttgcatcttctttctcttatgagtatccagggggctagcaggctatgttctatcagccaagaatggaaagtacttcattttgaagtgctccattcccatctggatagagtgatgtaattttctttccttttatttacactgtttacttaaagggagaagacactcttattacctaagtaaatatttgagtctttatcatgtcagatgcaaaataaaaactatttgaggagaagcaaataggactggaaactgctatggcatgatatattattagttagaattcagaatgttcatggtccaagaatctagcagttgttcagtctacaaagctggatgtctcagtatatgccagaatctcaaagagataggttcttatgtcagtggcagaatgaatttgctaaaaagaatgaggtcaagcaggcaaagagccagagagtctttcttccatatcctttttttaggctaccaccaaaaggtgtggcccagatttaaggtggatcccacctcaaacaaacagacggacagacagacagacagacagacagacaaaaaacctccagattttaggtagattaagaaagatcaagaaaaataaaacaacaacaacaacaacaacatgaacatcaacaacaaaacaaaccaaaaccctcacaggtatacacagcactttggattttagttaattccaagtgtagtcaagttgacaaccaaagatagccatcacatatggttagttcttggagtttgtgacagtgatctgaaagggatagcaacatctttcttttgaggtgtggatgtctctaaagttgggaagatcaatcaagttggctacttatttcctattctcatgctctttcaatccttctcatctcataatcaacttgcaaagcttccttttcaacaagcctttcaaagaacaccatcagaggagtgaatgaggcatgccacataccctgtaaatagatacaggattcctttactctggtgacattgcaaattcgatcttcattaccatttgtttctttattgatgagtgtgacataaagttaatttgcataaagaaacctcccgtctctaatttatacgtcattgggcattggctaagactcttttatggctgagaatgaaatacacatttgaataactggacttaatgaacttcacataaaatgattgcctgtctatagttaagtattttggaataatgaaccctcctttctatagcctcttaaataaaacctttcttgtagttaacatgaatgcaaacaagacagtcaagagagaaattaatgtctgcactgtagccacgcagaaacaaacagaattaaatcaatgtgcttcttactcagggtcgaagggaagtctaggctgccaggagtggggatactagtgagttttcaaacatttgaattgtattagagctatgtttcagttcatacgtgtgttaacaatttaccattaaatatccagaacctgtgggacaagtacacatgtgtagataacagagatgaaccactgactccctgtgctcaggaagcttcaaatgcatatagtgtgaaatgctagcaatctgacattagccagtgatggatgagggagagggaccaaaacattaaccaaatatgaaatattcttgctggctgttaagtagctcacagttcttgtgttcatatctgccttctgctgtaaggtccccatctacaaacaactgcttgaagctcttatattcataccaactcaaaaatggatcagatttggatttttttttcctatcctgtaaggtggcctaaaaccattgtctatcatcatttacattatgcagaatacatgctgtcatcgtattcttcaaaacagagttctgtttacaacagatctcacttgatatttatgacattttttatatagaatgtggaattacttcttcctccagccatgtgaagaaatcaggccagtggattaatattaaataaccaacagtcctcgttagggttactattgctgtgatgaaacgtcatgaccacaagtgagctgaggaggaaagggtttatttatcttacaattccacatcatagtccaaaacagaaagaagttaggacatgcactccagtggtgcagttacctggaggcaggagctgatgcagaagccatgggggtatgctgctatctggcttgctcctcatgactttctcatcttgctttcttatagaacccacaacttccaacccagggatggcactacccacaataacctggaccctcccccataaattattaatttaagaaataccccatagctggggattatgaaggcatttctcaattgtggctcccttatttcagatgacagcttgtgttaagttgacataaaactagctagcacagcaactgatatggttgcaagccaaagtctcaagaaggaataattcaaacagatcacaaatagaatatacatttctttacaataagttaatcataaatctctgcttcctcttttttttcttgtacactcctgtgcatgtgtttatacaatacaggtacaacacacacacacacacacacacacacacaccacatacaaaccacacatattttgcttgtattagagctgatagactctatagttttgactctcccagttttttgtttttgtttttttgtttttttgttttttttttaattgagctagtagactgagaactcttgtttgtttttacttttagaatcaggatctgggaactatatgcttgtgtctaagggtactactgtgttaagttacagcaagtggcttctccctttccaaatcccttatacctgtatcatttttaatttgttttcataatcccgtcccactgtttttaatggattgtttagtaacttggcaaactgtgagaataggatgtgttgccagtcgctgccacttcattcccagccaaacaaaatgtgaacgagaactgtgaaagagtatctgagtatcttccaatgattagtaatactaactactatttaaacagcaaattttatgtgggcagaatttattttatatgtgataataataataatgtgaacatcccataaacaaggcagaatggtcttcatttcaactataagtagaaggttctgagaaggggatttatacctaccaaataatttgcacgggtcaaggtctggatattaaccattcattgattttacaaacttcttacaacacctgccaaacttttccataaatgtctttcccagacacatgccccacaatttgtaggatgtctcatctgtgcatttactttattccccattgatttactaagtggaaaaaaataaggtttttctttctgttattgtaagaacgatagtgataagcagttgtcacttctataaccaagactatgtttttggtgaggaatagatctcatagtgaccatggctgttcagtaagaatataattctactaagtggggtatcagagtttgaaccaaagttctgagccacagtagcatgcagctctgtccagtgtataaatctgtacatttgctcagtgaagatgttagacactgtgtggtttgcaatggctgtacaagacaggaactaggttattctccggttgcttgccctcataggtttcccttaacagaatgttaagccatagatgtttctattttaaaagttcttgtgaaaaaatgttctggtgattgtatccaacaattagatctgggattagcaaactttttgaattaaggattagacagtaaaaactttagggttgccaatctcagctattcaacttcaccattgtaatgcaagagtgactccttatattagtcaatcataacataatatagccaggaactttaggatgttttatatattaatttcattaaataccagcaacacagtatttcctattgtactcttgcttgagtttgtatttacacaatgctccacagaattccagcatttatatgtcctcaccctttgtggagcctccctctgtcctgtggaaaatgggaagtctcagtggttgtgatacccatggcttggtccagagctgtcagaagttgatttagctatgaattgtaacagagatggtggatatctggaataggacatcataaaaatcaacagtgaggagccttccagtctccatttgcaccccagagttaaccctgtggcccagatctctgtacccaaatccagccaagagagagatggcctcccaggaatgctgtcactcctaagttcacaagtgataccaacacttttgcctcaataactggccaaagaaggaccagctaggagaccacaggacacaggaactgtggagcaactggggacaggatccttctggtctccatctgttccccagagtattccctgtggcacagctctctgcacccaaatcctgcctggagacagctggtctcccaggagtgctgatacacctaagatcagagactaacaggagggacaggctccaatcagagatagcaagactacctaacactagagataaccagatggtgaaaggcaagctcaagaaccaacagaaaccaaggctacttggcaccattagaacccaggtctcccactatagcaagccctggatacccccaacatactggaaaagcaagatttgtatttaaaatcacatctcatgaacatgatagaggactttaagaaggaaataaataactcccttaaggaaatacaaaacacaggtaaacaggtggaagaccttaaagaggaaaaaaaatctaaagaattataggaaaacacaaccaaacaggtaaaggaattgaataaaaccatccaggatctaaaaatggaaatagaaacaataaagaaatcacaaaggaagacaaccctggagacaaaaaaactaggaaagagatcaggagtcatagatacaagctccagaatacaggagatagaagagagaatctcaggttcagaagatagcatagaaaacattgacacaacagtcaaagaaaatacaaaatgcaaaaggatcctaacccaaaagatccaggaaatccaggacacaatgagaagaccaaacctaaggataataggtatagaagagagtgaagattcccaacttaaaaggccagtagatatcttcaacaaaattatagaggagaacttccctaacccaaagaaagagatgcagtgaacataaaagaagcctacagaactctggtcccttgggttcctttctgaactttgcatatggtttccttctcatggtatcttcatggtaggagagggaatgagggaaagcctttcttcttataaagggcactggtgtgaatgtactaataagcaaacactaccttgtttctattaccaataccagaccggtggctacccccgggtttatgtgccagctgctagatgcagaagactagaatttagattgaaacagtagctatgcaaatataaatctttctaccttgaacagaaaccacatctcccttatttgtgacccagccagagggccatcctaaaacaggaagtactatacaaataagagagtctatggagccaggcagagaacacccaggagaagggagaggctggaaattactgtcaagaatggcaaagtcacactgatgggcaaagctcctgcttctcactcaggatgcaaactgcttgactcaatgttagactggtttttcttggtaaacatacacacatacgatacacacacacacacacacacgtatgtatgtgtgtgtgtgtatacatatattactaattttttattatttactaaagtaatttgattatacacatgatctatatgcatatatatgtacatatatatgtacatatacatatgtacatatatatgtatatatatatgtgtatatatagattgtgtgtgtgtaaaatcaaattactgtagcagataataaaaataataataaaacaaaatcattcagttgcttgtaaaatttctgcataaatcaatgaaacaatcaaaagaggcaaagcatgtcatttactttcagcctaagaggttgtgacctaaatggaataaattaatgatccttggcatcacagtgttagaaacctgagattctttgacttgtaacctgtaaatcttgataacaaaagacctctattttacttgtttggggataaattccatctcatagggtgggccttaaatccaatcagatgttggtaggctactcacacaatatttgctcataaagcatagatattacacagatattttcagaatttgtcatgtatgtttaagatattccaaagtgctgttttggttatcattgtgttttgcaaattttatcttgtatcttgggtattctaagtttctgggctaatatccacttattagtgagtacatatcatgtgagttgttttgtgattgggttacctcactcaggatgatgccctccaggtccatccatttgcctagaaatttcataaattcattctttttaatagctgagtagtactccattgtgtaaatgtaccacattttctgtatccattcctttgttgagggacatctgggttctttccagcttctggctatcataaggctgctatgaacatagtggaacatgtgttcttaccagttggaacatcttctggatatatgcccaggagtggtatttctggatcctccagtagtactatgtccaattttctgaggaactgccagactgatttccagagtggttgtacaagcttgcaatcccaccagcaatggaggtgttttcctttttctccacatccttgccagcatctgctgtcacctgaatttttgatcttagccattctgactggtgtgaggtggaatctcagggttactttgatttccatttccctgatgattaaggatgttgaacattttttcaggtgcttctcagccattcggtattcctcagatgagaattctttgtttagctctgagccgcattttttaatggggttatttgattttctggagtccaccttcttgagttctttatatatattggatattagtctcctatctgatttaggattggtaaagctcctttcccaatctgttggtggcctttttgtcttattgtcagtgtcttttgccttacagaagctttgcaattttctgaggtcccatttgtcgattcttgatcttacagcacaagccattgctgttctattcaggaatttttcccctgtgcccatatcttagaggttttccccactttctcctctataagatccagtgtctctggttttatgtggagttccttgatccacttagatttgaccttagtacaaggagataggaatggatcaattcgcattcttctacatgataaccgctaattgtgctagcaccatttgttgtaaatgctgtgttttttccactggatggttttagctcccttgtcaaagatcaagtgaccataggtgtgtgggttcatttctcggtcttcaattgtattacattggtctacttttctgtcgttataccagtaccatgccatttttatcacaattgctctgtagtacagctttaggtcaggcatggtgattccaccagaggttcttttatccttgagaagagtttttgctatcctaggttttttgttattccagatgaatttgcaaattgccctttctaattcgttgaagaattgagttggaattttgatggggattgcattgaatctgtaaattgcttttggcaagatagccatttttactatattgatcctgccaatccatgagcatgggagatctttccatcttctgatatcttctttaatttctttcttcagagacatgaagttcttatcatacagatctttcacttccttagttagagtcacgccaaggtattttatattatttgtgactattgagaagggtgttgtttccctaatttctttctcagcctgtttatcctttgtgtagagaaagtccattgacttgtttgagttaattttatatccagctacatcactgaagctgtttatcaggtttaggagttctttggtggaatttttagggtcacttatatatactgtcataacatctgcagtttagacatggatagaaaaggcctcagagagcagcagggttgaaacgtttgctgagtttatttatgtatgtatctgtttaaccaattcaatattctatttctggagatggtgggagaatgtttgtgtattgaattcagaaccacctgcgggtctgagtcaaaggagataattgctatgctccatgtgggcgatagattccagaagattcccactggactcttaagttaattgtatttctgatcatcctatctagcggttattcagtggtattaatcatttacaaagaggcaggtagaacccagtagaaaccactgttgtcctttgacagagttacttacatagttaaactggaggcttagatttcagaagatgcctatgatctgattagtggtccctctctgtgcctaaaccgtttagtcaaataatatgattcatgtaagcagtgtgattattttattttgtggaattttgctataggccaatcagaaaatgcctacatgagtttcacagacactgaatccctggtgacattcatgactgacaacatctcacattcactttccacagctcttgctggaggagctagagaggaggctgggtgctctggtctagcttgcccagactctcccacatacaactcgctttgctaggcttgctttgtgtgttcaggcgtcagtaggtcatgatattgactgtaactctgtgctatcttgtgacttctagtcagccatccaaactaaggatcatcttgaggaccaacaatgcagcaccttttataacaattaatatgaaatctgtattctcagagtcccccagatctgcagatacattggtaattttattggaaccattttctattaaaaaaaatgatgaagcccacagacattaaattttatgagtataagaaaatgagccatttaaaaattggtaggtatatttgtacatgaggctgtcaagagaatttcatttccttggagcttaaaataaatgttacattagcacttacggctacattaagcatggctgagattgggaattatttctgaatattttcttcaccttcaagatagcaggaacatatttccctccagagtagctacttaaataagaagagtgagaggttttatttgctatttttttgtacagagtctgaggagttgctctgttgaagtgtggcacggaaagcattggttggctccattggcctccaatacagttcctcctaatggctatggagtctctgagggagaggcccagtgtctgctgcccaggagcccacagactagagatcatcacagattcaggaaagtgctatgacagaatgcacacaggtttaaaagaaccccagggggatgaggaccagtttgtctcgggagaggcatcaaggggagtctagaagggtgacagtcacatagggataaggatttcatttcaaagaaaggattgagagtaagtcaagatctttgtgagttacctattttatttcattatagatgaaaaaaaaaacagattaagaaaatgaagtgattaactcaagtttccttagcacttgagtgtcaaagcttccacaggtttctaagttctttgaatcctgtgctgtccgtacttccactgatgcagattaaaagtcttgcggtaaaggtgggatcctgtggatccttcctctttccacattaacacgttcatctatattgcccgtcctctggttttgttgtgcagtcatttccaggatagactaaagatatttttaaaaaagccttttgagtaaggttataaaatttgatgcttgactgtgttccactttaaataagaagaaaaactgacagcatgagctcacatgtgattcagccattgatttcagtgtgttgcacactgtacttcagaaacaatgaacagaaaactccaagcaagcaggcaagcaagcaagcaatc

SEQ ID NO: 32 - DNA, 1946 bp, Mus musculus
aatcaagtttcttactgggaaatgcccaaattgtggactggcctgtagtttatagtaatgacggtttttgtaaactctctggatatcatcgagctgacgtcatgcagaaaagcagcacctgcagttttatgtatggagaactgaccgacaagaagaccattgagaaagtcaggcagacttttgacaactacgagtcaaactgttttgaagttcttctgtacaaaaaaaaccgtacccctgtttggttttacatgcaaatcgcaccaataagaaatgaacacgagaaggtggtcttgttcctgtgtacattcaaggacattacactgttcaaacagcctatagaggatgactcaacgaaaggttggacgaagtttgcccgattgacacgggctttgacaaatagccgaagtgttttacagcagcttacaccaatgaataaaacagagacagtccacaagcattcaagactagctgaagtgcttcagctgggatcagacatccttcctcagtacaaacaagaagcgccaaagacgccaccacatatcatcttacactattgtgcttttaaaactacttgggattgggtgattttaattcttaccttctacaccgccatcatggttccttacaatgtttctttcaaaacaaagcagaacaatatcgcctggctggtgctggacagtgtggtggacgtgatttttctggtggacattgttttaaattttcacacgacttttgtggggccgggtggagaggtcatttctgacccgaagcttataaggatgaactatctgaaaacttggtttgtgattgatctgctgtcttgtttaccttatgacatcatcaatgcctttgaaaatgtggatgagggaatcagcagtctcttcagctctttaaaggtggtgcgccttttacgcctgggccgtgttgctaggaaactggaccattacctggaatatggagcagcggtccttgtgctcctggtatgtgtgtttggactggtggctcactggctggcttgcatctggtacagcattggagactatgaggtcattgatgaagtcaccaacaccattcaaatagacagctggctctaccagttggccttgagcattgggaccccatatcgctacaatacgagtgcagggatctgggaaggaggacccagcaaggactccctgtatgtgtcctccctctacttcaccatgacgagccttacaaccataggatttggaaacatagctccgaccacagacgtggagaagatgttctcagtggccatgatgatggtcggctctcttctttatgcaactatttttggaaatgttaccacaattttccagcaaatgtatgccaacaccaaccgttaccatgagatgctgaataatgttcgagatttcctgaaattatatcaggtcccaaaaggccttagtgaacgagtgatggattatattgtctcaacatggtcaatgtcaaaaggcatcgacacagagaaggtcctctccatctgtcccaaggacatgagagctgacatctgtgttcatctgaaccggaaggtttttaatgaacatcctgcattccgattggccagcgatggatgtctgcgtgccttggcagtggagttccaaaccattcactgtgctcctggggacctgatttaccatgctggagagagtgtggatgccctctgctttgtggtgtccgggtccttggaagttatccaggatgaggaggtggtggccattttagggaaaggtgacgtgtttggagacatcttctggaaggaaaccacccttgctcatgcgtgtgccaatgtccgggccctgacttactgtgatctgcacatcatcaagcgagaagccttgctcaaggtccttgacttctatacagcatttgcaaactcattttccaggaacctcactctcacttgcaatctaaggaagcgg

SEQ ID NO: 33 - protein, 648 aa, Mus musculus
SSFLLGNAQIVDWPVVYSNDGFCKLSGYHRADVMQKSSTCSFMYGELTDKKTIEKVRQTFDNYESNCFEVLLYKKNRTPVWFYMQIAPIRNEHEKVVLFLCTFKDITLFKQPIEDDSTKGWTKFARLTRALTNSRSVLQQLTPMNKTETVHKHSRLAEVLQLGSDILPQYKQEAPKTPPHIILHYCAFKTTWDWVILILTFYTAIMVPYNVSFKTKQNNIAWLVLDSVVDVIFLVDIVLNFHTTFVGPGGEVISDPKLIRMNYLKTWFVIDLLSCLPYDIINAFENVDEGISSLFSSLKVVRLLRLGRVARKLDHYLEYGAAVLVLLVCVFGLVAHWLACIWYSIGDYEVIDEVTNTIQIDSWLYQLALSIGTPYRYNTSAGIWEGGPSKDSLYVSSLYFTMTSLTTIGFGNIAPTTDVEKMFSVAMMMVGSLLYATIFGNVTTIFQQMYANTNRYHEMLNNVRDFLKLYQVPKGLSERVMDYIVSTWSMSKGIDTEKVLSICPKDMRADICVHLNRKVFNEHPAFRLASDGCLRALAVEFQTIHCAPGDLIYHAGESVDALCFVVSGSLEVIQDEEVVAILGKGDVFGDIFWKETTLAHACANVRALTYCDLHIIKREALLKVLDFYTAFANSFSRNLTLTCNLRKR

SEQ ID NO: 34 - DNA, 357652 bp, Homo sapiens
  misc_feature (1)...(357652): n = A,T,C or G
ccgcacccattcttggtgcagatactagcatgtagacatgtgatcctggtagggcaaatcaagggcttcctctggactgatatttggatgttagggagagagaaatttatctttgcactgggattgctaaactttgaagtggcaaattgcacagtgacgtgagggtaaaggtttaacaggtggctctcaagagaaaaacatgcatgtatatatatatatgtacgcatatatatatacatacacacacatatatacatatttaaatttattataaattctactgataaaaggatatgtagcacataattttcaaatactattaaaatagtcatctctctttttgcaaattccatgtgacctactcattctcacaggatactttcaccggtttttgcctcactcttgcatctgtagccaacctatggttacaattgatgataaggtagttccaacaggaacattggttggtattttcctttatcttaatgatgaaaatggaacaatgaagatatattctaaaaatttatacatttgtcaatgttgtgtgtgacttctttgttaaatttgatagttaaaaaatcttttttaaaatgacagctaacattgtatatttttgtggtgtacaacatgttttgaagtacatatacattgtgggatgattaaatctggctaattaacaagtgcattacctcacatagttgtcatttctgtggtaagaacacttaacatccattcactttacatttttcaagactacaatatatcaccattaactatagtcacattgctgtacaatgagatcccttgaagtttatttctcttatctaattgtaattatgtgtcatttgatagtagttttttaatattagaagaatatttcctaaaatttttatttttcacaatgttgctatggtttaaatatttgtgtctccaaatttacatctgaggtttgtgttattttccttggagatccacagctctccctgcattgtggcaggagaaggtcctccttactcttcttctccaacttgtcttccttcccttagcacaggggaatttttttctcatttagggtggatgtggagcatatgagacagctggttcttagatattttcaaaatcttttgggtgacagtgtagtgcaatggtgaaatagatggctaagcatttgggctttgaagacagagtacctgaggacataatcctgactccatcacatactacctttgtgaccttgtgccagttactgaacttctctgtttctcagtttctttttggttcaatgaggataatgtaaatacctactatggtgcctggtgtatagatgcataataaatatttgttgaattgaattaaattcaattttgctctattaaaattaaatgagattaaatgagaccattcgtgtaaagtatttagaacagtgactaacaccgggtaagaatgtatagagcctttattataacacttttctcattgtatttctgttctaatgcttagacttgaaattcaaaagccaggaagaggtgagctgtggtgaggaatgatgatacaatgaaagcaagagggtgacagtaaatatggggcttgggaataatttaatatttcaaaaatatcagcttcttgtatataggggtctcttaagtagttttttcaatcctggacttttctctccctaaagcatcttcaatcagaaactgattttttctcctcaaataccatgtcacatatttactcaaaatatgtctttcattgcctacagaataaagtccaaaccccttaagttggcctgatgagcccctaactgcctccaattctatcttccatttaaaggttcattttgtctactgttagtcacatatcacaagctttcttatcattatgattttccttttttctagttctgtcagctagaaagctccctccttcttcccaccaagcacacccattaagggaaaaaatagaggctgaaatccagcccacaaatatctcatcaatcggtgtgctgtgacttggccctatgactggccagaagggacttcttttcctaattctcacgaagatgccaaaagcactagtggcagttctggtgaagagatacataagatttcaactgtatttgcaatcttttcttttttattattattatttttgtcttaacaacattgagatgcaaagagtgaggtacaatgttgcaacagaggaagcatagagtggtattagaagaacttacaggaaggaagggctgtttaccaggtcatggagagtcaaagaaggcctcttgaaggcaatgacatctcatatagtgtctgaagtaaggtggctagtggctagtgatgcaggacattggtggaggaagaaagagacagcatagtaagcacaaggaatacaaagggacatagggagggaggaagtatgaaggtggagggttggaatggggaatgatgagagttgatcctggatagataagcaggagtcagatagggaaggatataaaaaggccaggtaagggctttgagctttcacctgggggcaaagagacttagaagtgtttacacagggaaatgacataacagatttatgcattagaaagatcactttagctatagtgcagggggaaaaatgaactgtggtggagcttggagaagaaaatagagaggactatgtatggccggaaaacacaggaagaagggagaccagttggaaggctgatgtggaaatccaagtaaaaaatgacggggcctgacctggagcagagccaacagagagagtgagaggtggatagtttaaagagatatctgggaggttgaatgaataggactggatgtggagtcgggggtagagaagtgttgatgttactaacttggataactgggtggatagaggtagctcctgagataagaaacactggagggggagagagtttgggcaggctgcaagatgattcatttgttttgaatatgttagagattcccgtggaattgccagtcagtccatgggtatgggtatctacagttgcaggaaaaagatctgtgttttggaattcagatatttgtggatttctatgtatttgtatctgtctcactggggttaggggcagcaatctctgttttcaaacacatgaatatctgtgcagcaagacatggtcaatatccacagcagatgggataaaaaaaagagtacaaatagccacctaacagttcaggtcaggttttattggcaaatgagtttgtaaaaaatttatgaaaaaaacccgtaggatatcagagttttctatttcagaaagctggatgcaagattctccacctgtactatctcatttaattcttacatcaaccatatgtggtaggcattattaattttttttacagaaaaaaaaccctgaggcacagataggttaatgaaaatgcatgctgagattacagcatcagtattcaaaacaagtcagtctaaggtaggagaatgtttcaagaagaaaggattagtaataggctcaaacgtcataggtgggtaaagtagattagcaatgaaattgcctcactggatttcgcaatttaaaaattacctttggggaggcaacttcaggaaaacagttgaaaggaggccaatttgttgggggttaaggagtgaataggaggcaagaaagtggagacacctatcacagacttctcagaagattgaccatgaagagataggagagacagagccaaatcttgagggaaataacaagttaagaaagcatttttaaagcatgttaaatgtcaaagtgagaaatgaggggacagtcagcaaaatgaggtctccagaggcccaaatgaataggatccagatcagtgatggagggatggtgagagaaattgctttctatttgtttggaagaaagaagaaaaggaagagagagcaatggcaggaagtctaagaattgacatcatgacctgttttctacgagtgatcttctgagactgggaggtgaaaaagtgatgactgaggtgtgaaaagagacaagatgctttgagaaagctacagcagataatggaaaatgcagctgatcaggatgtacagaaggattgggctgtattgagaaggtcaagttgagttaggaggccttcaatttatggtgcattagtctgggaggttttgtggttctcttctgggctgctcagcagatacaagtacacagaaactcacagctgcatgtaatagagcctttgtgggagaggtgaaactgaaggtatgatccttgggagctgaggattttcatacagtattgaaaccccagagattcccataggatgcagccttgttctaggtcagtggttctaaaccttgatacatatagaaatcacggccgcgtgcagtggctcatgcctgtaatgccagcactttgggaggccgaggcgggctgatcatgaggtcaagagatcaagaccatcctggccaacatggtgaaaccccaattgtactaaaaatacaaaaattagctgggtttggtggtgggcacctatagtcccagctacttgggaggctgaggcaggagaattgcttgaacccaagaggcggaagttgcagtgagccgagattgcaccactgcactccagcctggtgacagaacaagactccatttaaaaaaaaaaaaagaagaagaaaaaaagaaatcacctggggaactttaaaaaaaaatagtaatgcctgtgtctcatcctttggaattttgatttacttggtctgggctgtggctttgggattcttacaaagtctccaggtgactgtaatgtgcagtcaggatggagaattattgttcctctgatctcctgttcccaaagcaagttaataacctgtaccagccaggatagatagactaggttatggcacagtaacaaatagtgctggattgtcagtatcttgacacaacaaaggtttatttcctgcttatataatgtctactgaggtctaggtaacacttttgggcaggtgttctccttgtatttcttggcattccctagtcactgaggcaggggaagaggaagatgagaaaataagtcctggttcttagatgctcacttggaagtaacaccctttccctccattcctatttcattgaccagcattagttgcatagccacactgatttcaaggagcaggaaaaggcaactggatattggtgaaccttagtagtgaccactatctagagccttcactgtaaatgaaagttgaaggggaggaaaaggctcatgtatttactttcaaacacttacatagtgcttattacctgtcagatattgtctgcattgctttcaagtaggaactaacttaatctccatatcagcactattaaataggtaattattatccccattttatagaaagggatgttgtgcttaaataacctgccctgggtcatatagctagtaagtgggagaggcaagattaaattctaggtagtctgggtccacagtccaagcactaggtctctctagtctgctttctctcaacttcgatcctgagttggggggagcagaaaggaggaaaggtagaagatatgggtgtaaatgtgagatttggtgcatgcaaagaaatttagtgatgtttgtatgcttcactgctagagctgggatagggctttgtggaaaggcacgcagtgaagtttagggagttaaaaatggaatggagtgatgctgctgctagtgaggccaaccttggaggccatgatagggaatcacttttgcccctttccttttttccttcttcccatccctccatcagagccacccatttagcatctacatacaggttgtaacttggagctgtactgaggtttgctcagaaacagaaagcaggaaacaggataaaaatttcccgagaaagtagtgcttggatcatttgcacaaaagggatcaaagagtaagtccaactgtacctatttgtaatgcatttttgaaaatttacatataattacagctactgtcaagtaaactatattagaaaatcttcagaggaggggtatttgataaaagagtccttcagtgaatcagtagtaattccaaatcatcacttcctacatcagttttctaagccttctcgtttatattggtttcggttagactagaacacacctgcagttcactcagccagcttccattctgctgtgatttaggagtcagtgaacacttctggggattggaattcttggttatcacagacaaggtctaattaccatacctggagggacagaagaaaagaacaaatgattctgttttaaaatggacttttgacaatataacaaaacgaagctttgtctttgtgtgacattgaagctttctaattcctatctctctcatctgttaaatcttgaggtttgttccccacatacggagtctgtaacacacttttaaaatgctgtattagcaccttgttgcaactggccagcatattccttagggccagtcaatctatatgatgctgctactctattttccttgactctattttgattgggaacagttgcaagttgttgccaagggtttctcttctttcatgggctgcaaaatcatcgatggcaatagagatccttgatgttgctggttgttaccacactagcctaagattaggttattttctattatttacaaggagctctggctacagggtcaggagacctgattttagtctcagtgcagactgttctaaagcactgtgtcatctgggacaggatatttcatctctctgggtcttggtttcttcctttataaaatgaaaatttaaactagaagattaagaaaagtgtgtaaccttttgacactacacagctacattttttatgatcattaaaataatccaaacgttataatgctatggagttattagaaacaaagaagaaaggataaatgtcatttaattgaatctgcagatgggaataagaaagttctaccagtaattttgtgattgtgtcttaatggagtccaaaagaatttcctctttgggaaatgtgagttaatacacccacagaggaatgattaggaacaagaatatatatactagatgggaaatgctgagaacctgagattttaaatcaatacccataggcgagatgtgggcagctgacgatgtgcaaaagaacatatagatttgaaatattctctgttaatgatgatggaattattatagcatgctagaagtctagaatagcaatcaatgaattatacatgtttaaaaaataagtctgtctattcaccaacccagccaatgaatgactgattagtttaggatcatttgaacacaggtcacaaaagaatcgctagagtgggaaattcaattatgtgtttaaggctgctgtggtgatggtggtttcagttcttcccaccaactgcagggagggagttgtaacctggccgtatctcttgagtgctgctgtggcaagctcactacggatccaatctgcacctgagtctcttgttatttaactaaacacacctgatgtatttaaaagacattttaactgtaaggggataagctccatggccagcagcacttcctgtggaaagctagaatagcctagtgttattccaccgagtctcttgatttttttttttttttttttgcataaagatttttagcggaataaaattgcctcgtgtcaaccttctgggtttgctcagctgcctggtctctgaaaatttcagagagggaaaaaatgaccccaaggtaaaggctggatcctggttttgcatttagctgcttcaagcagtaggcttacccagttggggagaggagagaaagggagagagaggtggggggagagagagaggtgggaagagagagaaaggggagtacgagacagtgccagagagatggcgtggatgacactgtatctctgcctttctctctctacgtgtacgtatatatacagatatacatgttcctctgattactcactacctagattattcttggctcatggtcaatgatacgtgatcaaaaaatatctattgaatgcatttacnnnnnnnnnnnnnnnnnnnnggaggcaaggagggagagagagagagacagagacagacagagagagagagatcctgtcttgaggtcagtgattagtaatctagggggttccaaaaggggacaggtgctgagatgtgtacttccacccctgcctggggattctccctgcttctggtaatctgaccttgataatttctaacgcaattacctctcctctagcacattctgaccccagcaaaaggggacgcacccatccaactatcttttcgccttcaacactgaagacttcgctctaccaccaaccgctgacgccgcggcagtgcacttttggtcccccactctttgaccctgtttgcacaatcgtcctttctcgacaggcccaggtgcagcccccagagaaaagaggaagccttacatgtatcatatttacctggagggcttgtttaaacagatgagtcaacccaatcctcagagttcctggttccctaactctggggtagaatccactaatttgcattataaacaagttcttaggtggtgcagatgcggatgctgcccgtccaggccactttgagaaccactgccttagatcaaggaaggtgcctcagtgcgggctcctctttcctttccatctctctccacccctttcgcatttatgccattttcctttctctgtgacacattcaggcttttggactgtttgtaacggtgccgctgctgtccgttctcaacgcctggaaattggggggtttgttagaggtgattcgtgccctgccccaccctggcgcatcttcgcccccacagcctttaccgtttttccatcgctaacactgccctcctcactccccctctctcgggtgtgaattattcaccctcttcccctactcttcacatcaagtgcaacctttcccgcaactttgcagcggtggcgggctcgcggatcgcctcctgcgctcagcggtcctgggggaaactcccctgggcggccgcacgctcccccagacgccaagcccggcccgggtcgcaggggccattccgggcgccggctgtgcgctcggacttcagggctcgcgctcccgctccggggtggggtaagggcggtgcggaaagcgccagtgttcaggaaggtttcaggcgccggagcccggaggggggcggtagcagcgtcaggtggctgctctgcgtccccgcgcgccgcccagccagtccctgccctgctctcagcctcggctggggctggagctggagcctgcccgcacctccgccccgggagccgcgtccgcgccagcagcccggattcgggacccgagcgggagacgccgagatgtgagcctccgactggccactgctctctctggcaccctcttctcccattccaccggcccgattggacagcgatcgcttgcctcgatctccggggagaggagcaaccaccaggcgcacagcccagaagttgggctacgctgttcagcccggagctcgctgcgcgagggggtggacgaggagaccgggagacgaaggcgcggggaaggggtctcggtctgagctgagggggattgggagggtgggggcttgagttcccgcttgcgctccccagcagggggagagatgcagagcccgcgcccaggcgccggccgccgcggtagcagcctcagcagcagcctcagcatcagcaccggcgggacagcgacagcgggggcggcgcaggcgcactgtgccccgcggagcctgcagttcccgagccccgtgtgcggcaccgccacagtctgggcagcggcggccgggggagcgctactaccatgaactgcctggtcctcctccccagagctgctcatccgggtcgggctggagacacagtcaggggaccccgtcgccgccgccgcgccccctcttctttcggctcaatcttctcttccaccttttcctcctcttcctccaccttctttgcctgcatccccccctcccccgccgcggatcctggccgctgctctccagacccaggatgccggggggcaagagagggctggtggcaccgcagaacacatttttggagaacatcgtcaggcgctccagtggtaaggagagttgtagttcagaacacccccacctccatcccgcccacacgcgccccccatcctccccatcccatccctctcccaaggggggaggaggatgcaggcagccttacctggtggtttcatttaccagttgggctggatttggggtggggtggggtggcaatgagatggtgggggaaagttagttgcatccccttcctaccagacagactcaccccctcccacctgtccagagcccagaactggaggaaagaaaggggttggatagggtgtaggtacatctggaacatagagttgagttttgcttttatctttcttgttcttccttctcccacatttttccccaaagtgagcagcagggactgaccaaattctgagttaatctcagtggaaaggtttccctcaagttgggaatggctgcgaaagtggctacttaacaagatttaaatctctggaaaggcttttggccctcgtggtcacggggaaaggtgctttgtgccggggagagtagttgaggttgaacctaagaaagagttcagtgcttgcaaaatgggaagccaattactgtggacaaattggtgcttcaagtttcttcttgctatgtttttcactgtacattcatctatatatttcgtttgacttaaacatgagaaacgtagaagtgaagcagtaactattgtgcttttaatgcaactagaaaaaaatcaaaaagatgccatcctaccttgctactggcgttaaagttttcttgccttagtgtgtctttaaaataccatccatttatacattcatttcctacaagatattttggatgggaatggttatatatttccacattttaagaccttataaactttgcatcttactgaaatctgcgttttctacttgtttttaattcttttgtataattttaaacttcataagtaagatatgttgaatatctttttaagtttttccttcagaggctgttattttgacatctcttgcttggagaataatgagaaagacatttctgtatatggagtacagtagagcttggaacaaagcaatggaaatactctatgcagttccatagtgccttgtttattcattcattgaaacaatatttatttgggtgccttataccacagatactctgtggtttcttgggattaaaaaaaagtaattaatacacatcccctcttcttaagaggctccttgcctagttggaggcacagggaaagacagaggtacactgaaatatcaaataattaaataaataatgctttccctaaatggtagattagattatactaattcttagattagaatctcttttaagactaggcttgtaaatatttcctctgattttgagactaactgtatttaagtgtttcaaagtattttccccaaatatctgacttgttatttgtttttaatttgaggttttaaactttatttcttcgttttggccaatgcctgaaacaataaaagtctaaagcagtagtgttgtatttgggtcggaaaaaatagcgaatagggtctggcctaatattcttttaaatacctgtatattttttagttatataaattcataatggtaggcaatttttattcttatagattaccttcttgtattaagattatactaaacctataatacaaggggatattactcttaaaacagtttggggaaaatgtgtggattattggaattagttaagtatacaagtcttctttcagctttctcatcctcttgggttatttcaacttcacgcaatttggtctatgagagaacttttcagagaaggccttaaaacataaaatctgcagggttacgattgctctgctttataaagagaaagaacatgagaatcccttgactaaactttattaatatagcaactgtggttgaagcttcttatgcagactatgaaactatgagatagttttttgaatttttaaaaattgtagatatactatgaaataaagatttaccttaggtggcttagaaatgtctgtttctgttgcctccattttgtatctaccactcaaattaatgagtattttatcttttttacacttcatgttcataatcgtttcattggttaaatgtttctttcctggacaataccaagtgaaaatgaaaatttatctgttttggcacttaaatgccacctctaatcgcctatggctaactttgaataccactactcaaagaccctgaactgtttgaagtgtgttagatagttgtagtgagtatatatgcaggtgtgtgtgataaatactgaaaagtctcagtacctcttttataggcagaacctcagaaattgagaattatggtattaaattggtctacacattcacgggggaatatcccgcagttgtcatttctatatgatttggcagagaaatagaaaaatttatcctgagaaattgtttaattgagactaatagaaaattcccttcaggattctcacagatggatcaggtttgtcactttgaaggtttcattattcactaacttaacaacattgaaagtgaagtgttggcagaggtttagcaggaagagaaagaatagcacccagcactcccaatctatttaacaattgaagaaacagaggctggccttgtctttttacctgaaccccaagaaaagctctttctgatacaataccattttcttcttatgaaaaggtcagatcttacagtgagagtcagccaaacatagacatagatatagagagatacccagataatacacagtcacataggtaaacactcagctggtcaggcatccacccagaaaactgaaaagaggaatatcctacttcttcttttttaggatttgtctgtaaagtgtgtccaccaccctacagacagagaggaagcaatctaactctttttctctgtcttgcacacaaggagcaaaacagagatgtaggaaacaaaacaaaacaaaacacacagagcagagagaaaggggtggggtgggagagagagagagagagattatgggacatgcaagggaaatggacacaaagagaaaatgtcagacatttatttgtccatgggtatcaccaatgaactgaaatctcagccagttacaaatttaccagaacatttttttgatgatgtgaaacaaaaaagcaagaagtgtggcatatttgaatatcaattttatacctgaggatttcttaataaagttccaaactcctcagatgcagtttcccagaataccagcactgtattctgtactccagagtggcaactataacctatgctattatttcacacctcttgagactggatttttattttccttatttagttgactcagtctgttataagcgagcattgcaagttgttactggtgattcaaagtctataaaataaaataatgagggccattgagtaggatggatacacacaccctttatagccaaatctcaaaagaagcaaggaattctttttagtttaaagataaaagataagatcatttctagacaaaaggaattataataattcttagcatgtgattctagtaaatatagagaacattattactctaagaagttgtaaagtttaaagtataaatgctataggacggcttagacaaacttttggctagtacgatcaaaataagccattagtaagggaaggtttagaggactatgtggtgagttcattacagctgagcaatgtctcccagaaggcccctgcctcaagggcttacagactagatttgtgtctagaacattattaggataccttcctttatttaaatttcaattatttatgcaaactattaatctaaattgggctctagggagcaataaacttgtgggtagaggttaagtatctggaagaaagtaactgtttttaggacttttaggttaaaatttagattcaaaagacaaaaaatatttcaaagaccttcaacctgattttgtctttgggcagcacattttactcatatgttgtcttcaattccttagcaaataggcagacatgattagtttgagtgacagtaagctaggttgctattttgaaaattttaactacaaattaataccttttaactagaaattattattatttaatattttaagctttatgacaaattggaagtttattttagttttgtggaaaactagaagtgtttttctttttggggaaaaaaggggttcaggaaagaagaaaacagagaaggtagtattttatgaaccacttacctttcaagagaagaaactcagtatcctcaatttttcattctgcttgagatagctggttgcacaagcactttttttactcagctatctcttacttgtagaaaagtccaaaattattttcatgctgaattgacatttgtacaaactgaggtcttaaaagaaacctataagagaggaagcagaactagtgatctgtaaacaaaacaaaaaaggaataataacttttacaattagccaatttaaaagaaataatggaaaacaaatggacattattttggttgttgttgttataaagttattgacattttttcttgaaaggttttctttaatatctaagacactattcaggaaatactgataaaaccacacagtgtttttgaagcactggtttactcaggtcttataatgtaccactttaacatttaaaatatcaaagaggttgaaattatactgaccacttcctaaattatatttatacataagccacaagattgtcccttgcattagattcccacactgtgttatataatgaatgcagcacattgctgatagagggatgcttattctaagatactgttatcttcactagaaattgccctctttgtttatcttttgcttgattccagaagtaggatgtgtaagacatccatctacctaggcaccttgtaactgacttactaaaaggatcatataaacattatttttaatagaagggcgtagttatgattattttaattgatagcgactgagtagatttcctaaagaagccctttagtttagtcagtgtttatctttttctttccttgtgagtcacagccgagtttcttagcttggaggaacaatgcttctgcattctccagagtgtagcctaggaaaaggttgtgctgttcaccaaagtactgtagttagtatttaccacaagaggtcactctgggttctgtcacaggtgaaccaagtagttaatatttttctctttttctgttctcccacctcccccttcccccaccttgcttgccaccccccaaatttgactgggagggagtcaatgtagttagttggtgctcttggaagaaaatatctaaaatgtaagacatgcaggaaagttaaatgaaaaaaggtatgtattatattaattattagaatttattttagttgacagtgatcaacattttataactacacgaaagtgatactgataaaaattgtttctgtaaagagatggatttaaatacattttagactaatagagcattttctttagcagataaaattttatggtaatacgcaatttcagcatttcatatacatacagtatatgaaatataaagtcttgcagaaaaatgacctgtacataatgcttcatattgagccacttcaacagattttttctctatgagacatctttatataatttatattgaattggtgaagtagaatcagttcataacagtgctttaattttatcaaaagatagtttacagatttatagttacttcctcaggatgttatgtaatcctagtattttatttttacccaaattttaaaaattaaatacagagctaaattgtttaaaattattaaataatattttcaaagttttttaaattattaaactccaaaagacaggattgggagtagactgttttaagaggttttgtttcctcttagtcagtaaatctgaattttggtttaaggcaattcttttttctttttggtgggttagaaaccatatagcaagagatactttgaaatgttccacacaattttggttttaatgggaaaaattgaaacatgtcttaaagtacttttataaatacaagagacgtgttgtgaatcagataaacatggataacaaatcacaatccaaaaccagtggcaattattgttgtggaaattgaggtcaaagaaagtagtgttctagaaagtattctagaaaatggacatttatgaaacaaattcctttaccaatagcaaagcagaatgtaaaaaaatcctcagcattttccactaaatagtctagctttataatacatgacatgagtccttttcatcatttaaagataattaaaaagaatcatttaaatattcctattttatataatatagaaactaatatattagaaaggctgagtcttgaaatatatttgatcaaatggaggcagtaataactattgtcacatagatcagtgtgtattttagacatcattttagtgtttggttatatgtggatactattacctagtaaagagacatatttatatacattctagatagtagttttgtgatatattaggttgacaaaagaaaaaagaggaaaattaatgagcacagtaatttagaaagaaagtgtggttagaaagctattggaaattttattgaaaatagatttccctctctctttgggtctggtcccattacagaaatataactattaagtacaaagtcatatggatctcaaaagatacgcaatttgagatctgagcttatgtgcataatcataacagcttgtagatataaggacatataattgggaagtcatgaaaattttggtatatgaactaagctccctgaggatatgggtcatatcttaaaaagacttttatgtcctccactgtgcagagcacatagcagtaagtattcgttgaataaatgcttttttgatttttgtctcctaaagtaaccaagaccataattaattctttccccaagccaatgctgattaaatctattaagtgagcttgaataagtaattacatagtttaaactatttagttaatcaatgcatatatctgaaaacagaaaccacactgcatagggcaaatcagatggtacttctgagaggatgagaaaggaatatgaaatggatcccatgttcacttcctattccaaattgaggtgcggctgaaatattttctaccatttttgtttcagttgtcaagagcttgaaagctggactatttaataccagaaagaactgcttaaaaatttgtagattctaactaaattattttaacaactttgcagttagcagttattgatggtgagttttatccctgggaatcaatccttacctgcttaagtaccttctgagtgagttttgccttggggagcagcttacagccctgtgcagtatgcagcagaagaggaaaatgagttttagatttttagagactgcagggccagcctcaggttgccatatctaactaaaaatcgaacaactcacttggattgaggggaaaagttaacctttgtcctgatcttttctgtaagccctttttggtctgctggcatttatttttattttttaaatttgggggaaaattaaagcacaatgattttatttttatacatttacaagcattgaaaaaatagaggagttcctcaatgggggttaaagagtctcagaataaagactccgaaatacaacgctgatccttttgcttggctctcatgccctttctagttaattatccattaatgcaacaccattttattgagtacctactatgtgctaggcagggatctagcactagggattcataatgaacacagtgacaaaaacaatgtttctcctgtttttctgtggagggcatgtgcatatttataagtttctagaggcctgtattagagtcctggctctgacacttactagctcggtgacttaacttacttgtacctagtttccttatctataaaatacaagtaataatagtacctagtttatggggttagagtgaggattaagttaggcagtacatgtaagtacggagaacggtgcctggcacataaataagcattatatcatgccagtagttattattatcatttagttgtttaaatatttgaatgcactttctatagttgatgtttttaattcttagtcaccatttccttctgcacctcttttcaactaatttccgcctcctccataatgctgaaaattcctagaaaattatgagtgcgcattcttctcgtaaatcttaagatcttttcttggtccatattttttctgactttgcaaggtttgaaactatattcccctaccctctccaccattcatcttatagctatcatgagcttacaagccctgctgccctttctactggcttccctttttgttcctctcctcctccctcctctccttttccttcctaaagaatgagttgagtagtcccacaagttctcccttcaactttctttcttgcatctccatcctacttttcagggaaagtttgtcttctgccataatttaaactttatcttctctgtgccccaggtctgtatttccaaaggtatacaggatttctcttcttgtactactcaaaagtcatctaaaactcagtgtaggcagaatagaatttatttgcttttggcctcagattgacttttttttttttgtatctcccgtttctattcaaagtgtctttagtatttttgttttttactctagaagtgttagggtcatctttgactttccattcagtataatgttagtcttactttccaactagattatcagtccttagctttcttttgtgtctcctgtaagtgctgtgtgcagagtaagttaattcatgcccatttactatactgactcatcttaagacatgaagcatgttcataactgacatcatatacagccagtgtctctaactgtgatggaccaaagaaagaactacaggtcagaaggaaagagctgcctcattaactgacctcagaaactaaaggtctccaagagggaggaatgacatgtgtgacatattccccttgctcgttcctaaaacagcttctgtctgtactagagcaaacatcatcaaggtaactggtaatctttctggaactctatgagggcatttccaaggctcacagagcagtgctctcaactgtgctatcaggcacagtgctgggatggaaagagcaaaggtgttgagttcttgacaacacagactcctgtctagcccttactcctggtgacacactgaggctctccagaattaggacacctaccttacagggttgctcagaagatttggtgaagccccagatgtagtggatcatctcagtaaggacttactctagataaggtaaggtaggggagattttttttaacctgaagaaagcaagaaattaagtagttgagaatttcccagcagaaactggtggatctgagcttaaaagcatttgagttcaatttactaagggcttaccttggagagaatactaaacccaaacaaacaacacacctctgtccatcctcgccccaaacaaaaacctactgcctagagcaaaagaagtatcagttctgcttacttcaatacctgataattcttggacaaactgaggaataaagcagaaacatcagcctcttcttataaccatcctagtgaaatcctgccaaaggagaaatgaattgaatttgtagctctgtaactctttcttgaacaattagctcctgttacatagagtgtagaaatttaaaaacatacaggagaaagccttagaaaattaactggattgtgaatgcattcagaaaagcctctttgtgtttttctatcatgtgtgcaggttggaccagctttttaattgaagtttttcatcatttatcttgccattagtgtttaattgccattaaagggtaacttcaaagaaaatatataatctcctcagaaaagatgcagtccatttgcaaaaatctttatttgtaggatttaaaatgatgcttaaacattaaatatatacttttttcctcttataaatacatcttgactgatttagcttttattccccaagattatgtaactagcataagtcttatagcttcaggtattttaagaaatttcattgcaatataatttagtaaaatgttatcattatatcagggtgaaagttttctgttgtattatgatgttatgcatcaaataggccattattgcaattatattttgcttctaatgattctgaccagtttacattttagaaactcattttttcatgaacaaaacaccaactattaaaagtagaaacattgaattgttaaacattttgtggagaaatcttttttaatagcaaagttgctattattcctaccactagaatttcagaaatatatgttaaagtatctcatgcattttgaaccactgtagctggatgaaaaaatgaagttaatgccatcaaagaaacacagacacttaaaaaatgtacctttgatcgtgaaggagatagaaagtggaagcatatttttatctttcatgacacctgaacaagtttgaataaattaacagatatttttgcatatttcaaactcctacagtgatggtctgcttaatgttgccaatattattgggtaataattagtgtcattgtggaaggtacgaagtatgtctgcacatttgctatattgctagaggattgttgtaggatacaggtgtattttgtaagaacatgaaggagaccagccttacattctgtcattgacatagaaatgggcagtgcacatacaacaaatcaacattgtggatgtgggcatgattgtgcttttgtttagccatctgtaccaagattttatttaacccaaatacaattgctatatatgcttcagatttttccactattactgttctatgaaacttaaatagatctataggtatcattcatccagaagacacatttaaaaaataatacaggctgggtgccgtggctcatacctgtaatcccagcactttggaaggccgaggcaggcggatcacgaggtcaggagatcgagaccagcctgaccaacatggtaaaaccccgcctctactaaaatacaaaaaattagccgggtttggtggtgcatgcctgtagtcccagctactccggaggctgaggcaggggaatcacttgaacccagaaggtggagattgcagtgaactgagattgcgccactgcactccaacctggtgacagagcaagattctgtctcaaagcaaaaaacaaacaaacaaaaataatacagactgcatgatttaaattcacaagtttctagaggccattcaaagcgggggaatatctgcttagcaacacccaccccctccttttttttctttaacttattgccaattccttgaaaaaaaaaaatacctgccatggtccttatctaccttcttaacaatgtctaagaattgctttataactatttattgactgactgtatgactttaaataggaagcagaattttttatttgatatattcataaaacatttgtgagtgtacagtaatgaacaaatagacacggcccctgacctcatggaactcagagtctggtaggggaggcaggcgttcaccaagcctacatcaaatatataattacaaattgtggtaagcattttggatgaaaaggggagggtttgatgatcgtgtgcattgggatctaattccaattgggaggcctttctaaagaagtagtgttaaattgatacctacagtgagaggtaacaagaggataagtgggaagaagaatatttcaggcaaagagaaagcatgtgaacattcctaaggagaaaaagaaaatgaatggctaagtttgtgaagcttaaacactagcgcagctagattgccttgggtgaaaccagaagaaagacaggagataagggcgagtgacagttaggggcctggctgttcaggggaaagattttgtgttttattcctagtgcagtggaaaaacctcatagtcccaaaagctacttccgtaaaggttgaggggaggaggagaaagagtgggagaccagttaggtctggtcttgcggtagtcgacgcaagatatgatggtggtctggcctgggatggtagtagtggaaatggggagaaatggatgtatcagatatgttttgttggtagcattattaggatctagtaatggattggatgacatggatgaggtgtgaaggatgactcccaaggttttggcccaagcatttgcgtgcagatggaggtagggaagatatccttgagatgggaaaaactggaagaaggccacgcttggaatgaaactctaaagaccatctgcatcatcgctgtcatctagctcccttttcattcccttgaagaaaagaataatgcagccaaagacagcttagctcaatataagtgtgtacagatgtgatttctgcattccatttgcagagttcagaaaagatccgggtaattagcttggacagtctggtcattcttgtggattagaaacatgtagtttcagattttgataagaaactgatttggataagaaactaagtaaacttttgaataaaacccaaaccccaaactaaacctaactttataataaatatttgacaataagcattgttgaaaaggcctctgcagccaactccttttagaaaaagttagtgattgctacatggttttaatgggtcacttttgcttcagattttccttcataggcatcgatttttggaatgtgtgttctttgaatgggagcactgtgaagggtgggtcgatacttgaagctgcgactgcctgcactgattcttcctcactgaagccccagtgatctggaagagcagcttgaaatagcccttatctgggtttgtagtcttgcctgcacttcgtttctgttggaagagctgtgtgttccggggtttgagggctttgagagcgagagctgtggtttctgggtggtgtccttctccaaagttagaactacatgaatacagtcagagggaaaacgcagctgactttcttcacatgccgtcctggatcttggcaaatctataaattagtgaaagttttttttttttttttgtgaagtcctttttcttctcaactcctctccattttctttgttcctcagtactctaaaatttgtgtgtcttattattattacttaaaatacttaaaaactgctagtcctctgaaatatttctctctgggggtaatttgcataaaaaaggtaaaaaggagagggagccagaggcttaaccccctaaaaagctgttccaccctttttttctacacgtcttaaaaattgtatatatataaggcctgtaacattgtttttatatacatataaatagtgaaatgattatacagtccagcaaattaacctattcatcatcttccatatttacccttttgtatgtgtgtggtaagagctaaaatctctcttagcaaattttcaacatacaatacaatattagtaagtacaatattagtaactgtagtcctcatgttgtgcattagatccctagacttatttatcctacataactgccagcttgtatcctttgatttctcccatttccttcccctccccaccacccttgttaatgtacatgagatttctggatccgagaaggatatgattttcataaaaacaaaacaaaaaccagtccgatcatgttggagcagctcgaggaaatcattttttttctcctggaattgctatagaaagggaggaaacatcccacatgctcttatattgcctttattgactgaatataaccttcctttgtccagaattttttatcagccaggattattgatcccatgatttgtgtatgaactcctttaggaattaatatgtagtagtattaacctaagtgtagttattttcctgttgtctgaataaattgctctataaagaggaagtgcctccttatattaaaacaaaataaaacaaaaacttagcagttcagaaatatagtctgacagaatagaaagtcttagacagggaggcctggtcctgtctttttcccctactagatactcttttccccctactagatactcttttcctatattggatgagtctttaattttcctggtctgttttcccatccctaaaagaaaggaaaagcagaagatgggtgcattttggggtcacctgaggatcttgttaaaatgcaggttctaactcagaaggtctggggtgcgtcccaggttctgcattgccaataaactcccaggtgatgctggcccatactttgagtagcaaggcactggatcaaagtgtgccagacttggctgagcatgagacttacctctatgtctgtatttttacattcacctctgagggagtcagttcagagcatctgcattagaatttaacaatctctatttttgacactggtgacaagattctattgcagctgccagcatttaggaattattgctctagattagtgcttctccaccctggctgcacattaaaactacctgaaagacttaacaataagtattgatgcctgggttctactcaagaccaattaaaacagaatctttggcatttggggacggggatgaataactcctaggtggccccctccaatctccctcaactttcactccactcaactgtgcagtcaagattgagaaacactggtaataatctctaggggaccatttggaattaagggtctttgattcgtttttaaccttctaacccttgaagaaaaagtgcttgttttattttatgttctcctctgataggatactgcatagtcttgaatgaatataatgagttgttttcaagtcttagccccttgtggatgcattccagaatctgctgacttgtgaaattacagcttctgaaatccttgcctcctggtggggataatgccctggttcttaggcacctcattcaggaccatattgtgtgtctgatccctttggagatggaatgtttgtaaacatctttaaggaatgaaacaatctggatctcaaggaaagttcaattttccagaattcatggctcaaggtcctttaagagctgtgaggacaaaccagaactggtttccctgtcaagattggttgataagaatgggtgatggtcactgaaattctgggcaatttctttaaaggcatcacttttccaaaacttctaaaccctcttactttctagatttgtaactcatttgttttcaaggaagttattcctctgtaatcagatttcttttcctcaacatgttttaaagctaaaagaaattaaaattttctgggaagcaattttaattaatttgctattctgttcttaatatttattaataatatatttttcatttgttgtaataagaattttcatgactacagggaaatgcaacagttatatgaatatttcatatacatagagagtgtttcaatgaatagagaaatttcaaaaagaaacctctggattgttaatattcagcaatttctatctaatttagccttaattaaaaaatctgtctccctctcttcttctcatttttctcaagtattttattctgtagtttagttcttagtgataaatacaattttataggttttggtttgcaggtcaacatttaacagtttattttttctaggttcttctcttacatacatacatacatacatcccccccgccacaaacacaccaagatacctctgcatatacaactcagtaacttaatcttgtacataatagtaatagcttataaatgctttttgctttaatagtttataaagactgcttactttatttagtctccgtaactatccagaatggtgggtattactgtcaccagtttgtatatcaggcaaccagtagcctaattggaactcaccagcttttttgcagaaacttacttggtggtacggagaagggatccaagttctgggagaatatttgagtcagggctccttgtggtatattgattgttagaaatgtttaccacttgataacatctcatataaagtagacttagcaccatgtctgctttactcaactacggttttataaaacgttcagaaatggtaaaagcagttttcatgtttgtcctccataaactcagagtgcatatagttaaaatgcaattattaaggcctcgaggtaaggtctggtgagcacagtccaattacttaactctttgatggtctcaattactggacttaaacttcaagtataaagatgaatggagagcatatttcctagactacatttttaaaaactttaagttggtttgaaaaacgctctttgagttgttaggtctgaggtctaattgactatgtgagcaaatactttagggtatacctggcaaatatgtgaattgtccatattctatattattggttaaaatgtagatattttgaaaaatgggattgaagagaaaagcaaagtcttaattacctacttttgattctaacttctgtgttcttctccctaaacaactctgcttccagtctaacaggaagagttagttctccctgcagtgagttgctttaggacttttccttccttcctagtcttcctacttttccatctaaagcaaaaaaaagagacagaatttcctagactacttaggaagagtttaaatttgcaattatttcagccaagaattagaatttaaggaacatgtgttctagttgccacttctgaccttgggaatcgcggctttgtgagtctgtgacttattgcctgatgagtgatcagtgaaggaagaaatgaagttttcctgattagggataacatgtacaacatcaggcccaatacctagcatagagtaggagtccactaatggttgcttttgttattaattttgttactacacagagttactcaagtgtaagtgaaataacatattaacagatgggtagtgatagctggaccctgctgagctggagtctgaacgttcccattgtagagctgttgaaaatggtatgatgggggcagggtaatgtttttaatggcagagttcatatgaaatagttagaatgatccaaatcctaacaaatgtcttgaaaactagtctgtttataagagagagagagagagagaggtttgtaaagcctttgcagagttgtttaaagcatgcttttaaaattgtaaggtacaccccttcattgggctatgaaattgatttaacaggtcttgattaatgcagccaaaattgaaataggttagaaattgtagagtacctctcatgtagtgagtaaatgtagtctgagaaattttttcaattgtgtattgtgtatatacatgtctgcacatatgtatatacacttgagtcactatgtaaatattatttcttactatgagctttaataaaaaaagtttgaaaaacactatttgttagatcagccggcccttaatgtttacagtctttcttttttaagcctgtggggtcctttttcctagaatactagcaattcattcaaccaataaataattactatattgcaatacttttcttaaaaattttttaaaaaatcaacaagtaaaaattgaatatgtttatagtatacaataagactttgcctttctcttcaataccatttttcaaaatatctacattttaatcaataatatagaatatggacaattcaagtatttgccaggtatagtataccctaaagtatttgctcacatagtcaatcagacataacaactcagagtttttttttttttttcaaaccaacttgaagtttttaaaaagatagtctaggaaacataatgctttgatatatgtctacattgtggaatggctaagtcaagctatttcatatattcattacctcacttgtcacttttattttttgcagtgagaacacttaaaatctcccttggagattttcaaatatacaatatattgctatcaactgtcattaacctgatatatagtagatcactcaaacttattccttctgtctaactgaaatttttgtcccttgaccaacatctccccaatgtccccacccttcagcctttggtagccaccatttttctctgtttgactttttttacattgcacatgtaagtaagatcatatggtgtttttctatgtctgacttatttcgcttaaaataatgtcctccaggttcatccatgttgtcacaaatgacaatgctcctttctttttaaaggctgtataatatttcattaggcatatataccacattttcgttattcatctgttgattggcacttaggttgattccatatcttagctactgtaaatagtggagcaataaccatgagcatgcagatagctctttgacatgctgatttaatttcctttggatatttactgagtcgtggaatcgctgaatcatatggtggttctatttttaattttttgaggaacctccatactgttttctataatggttgtactaatttatattcctaccagcagtgtagaagagttcccatttcttggcatcttggtcagctgttatcttttgtctttttgataatagccattccagtaggtatgaggtaacatcttattgtggttttaatctgcatttccctgatgattagtgatgttaagctttctttcatgtaactgttagctctttgcatttcatcttttgaggaatgtctattcatatcctttgcccatgttttaatctggttatttgttttcttactatcaagttgagtttcttatatattttgcatattaaccccttatatgtttggtttgtagatatattttattactccatgggttgtctcttcactctgttgattgtttcctttgctgtacagctttttagtttgatgtaatttcatttggtaatttctgctttagttacctgtgctattgaagtcagacccaaaaaatctttgctcagaccaatgtcttgtagctttccttctatgttttcttccagcagttttatagtttcaggtttgatgttgaagtcttcaatccattttgagttaatttgtatatatggtgtgagatgagcgtctaattttattcttctgatgtgggatatccagttttcccaacatccttgattgaagagattgccctttcctcattgtatgtttttggtatctttgctgaaaatcaatggtttataaatgtgtggcttgatttctgggctctctattatgttttatttgtctttgtgtctatttttatgccagtaccgtgctgcttttgtactataactttgtagtagattttgatatctggtagtataatgactctggctttgttcttttcgttcaaaattactttggctattggggtcttttgtggttccagatgaactttaggattttttttttctgtttctgtgaaacatgtctttggggttttggttggaattacattgaatctgtggattgctttgggtagtatggacgttttaacaatattaattcttccagtccatgaacacaggatatatttccttttatttgtgtcttcctcagtttcttttatcaatgttttgcaatttccagtgtatagatctttcaccttcttggttaaatttattcctaagtactgttttttttttttgttactattgtaaatggtattgttttcttgattgcttatttggatagcttgttgttatagaactgtttttcatatgttgatttcatatcctacaactttactgaacttgtttattagttctaacagttttttggttgagtctttagtttttttctacatataagatcatattgtctgcaaacagagtcaatttaacctctttatttcctatttggaaggctttatttcctttctctttccagttgctctggctaggatttcagctagaaattgaacagaagtggtaagaacaggatccttgtcttgttcctgattttagaggaaaaactttcaactttttgtcattgagtatgatgttagagcttgttatggcctttattgtgttgaggtacattacttctaaacctaatatgttgagagtttttaatcatgaaacaatgttgaatttttcaaatgccttttctaaatctattgaatcaatattatagtttttgtccttcattctgctaatgtggtctatcatatttattgatttgcatatattgaacaatccttgcatctcaggaataaataccacttgatcatggtgaattatccttctatgtgttgttgaatttggtttgaaaatattttattgaggatttttgcatctatgttcttcagggatattggcagataattttctattttcgtagcttccttgtctggtatcagggtaatgctggcctcctaaaatgagtttgaaagttttctctcctttttaattttttggaagagtttgagaaagattgaattagtaagcagtgaaagtatcaggttctgggcttttctttgatgggagaatttttgttagtgattaatctccttatttgttattggtctattcagattttctttttcttcatgatttagtcttggtaggctctatgtgtctagaaatttatttcttcaagattagacagtttgttggattttaattgttcataatagttatgatcctttgtatttctgtggtatcagttgtattgtctcctctttgatttctgatttttttgagtcttctctctctttccttagtatagctaaaggtttgtcaattttgcttatcttttcaaaaaaccaacttgtagtttcactgaccttttaaagttgtttttctagtctctgtttcatttatttctgctcaaatctttattatttctttccttctactaactttgggcttagtttgttcttctttttctagttcactgagctataatattagttgattatttagggtcttcttttctcatgtaggcacttgttgctataaacttccctctaaaaacgatttttattgcttcccttaagttttggtatgttgtggttctgttttcatttgtctcaagatatatatatatatattttttgagatggagtctcactctattgcccaggctggagtgcagtggcatgatctcggttcactgcaacttctacctcccgggttcaagtgattctcctgccgcagcctcctgagtagctgcaactacaggcgtgtgccaccatgcccagctaatttttgtattttttagtagagacagggttttaccatattgggcaggctggtcttgaatgcctgacctcatgatttgcctggctcagcctcccaaagtgctgggatcacaggcatgagcaaccacgcccagcctgtctcaagatatttttaaatttccctttcaaatttcttccttgacccattggttccttaggagtatattgttcaatttccacatatttgtaaattttctaaaattcttcatattattaatttgtagctttataactttgtggtcagaaaagatactttatatgattttaattttcttaaatttgttaagacctactttgtggcctaagagttgatctatcctgcagaatattctgtgttgagaacttcaactttctgtacttgagaagaatatgtattttactgtctttgggtggaatgtttatatatctatatctgtcaggtccatttggtttaaagtgtagttcaagtccaatgtctcattattgattttctgtctggatgattatattgaaattcctgtatgcagactaggcatataatttataatcctgaggaatatgtgatttatatgaaaagacaaagttagcatatatggaatatttagaaagacattatttaataaattttataataccaattatataaaaagagaaccctgcaaaaatgtattagttcattggcttattcatataatcaaccattaaattagcatttactatgtgtcaggcactgtgctaggcaatgagaaatcaaatgtgagcaaaaacttacatgggctctatccctgtagagcttataatccaataggcagataaacattaattttttctttttttttttttgagatgtagtcttgctctgttgcccaggctgtagttcagtggcatgatcttggctcactgtaacctccacctcccatgttccagctattctcctgcctcagtctcccgggtagctgggactacaggtgtgcatcattatgcccggctaattttatatttttaggagagatggggtgtcaccatgttggctaggctggcctcgatctcctgacctcatgatccacctgcctctgcctcccaaagtgctgggattacaagtgtgagtcaccgtgcctggccagatatacattaattaagtcatgacacaaataggtgtaaaactgcacttgtgaatggctgtgaaggagaggtacatcatgtcaaaaaattatataacagggatataacctcatcagcagtcagggaaagattccctgaggtcatgtcaattgagttaagatctaaataaatgaaggtgacaaggtgaggagggaaaggaatggtatttaggcagagatgatggcaaataaaaagtccttatgctgggagagaacttggcttttacaagaatataagaaaagtcaatgaggctattgtaggcgagtatcgtgggcaagggtcagagtgatgagaactaaggctaggcagactttgaagtcattgtgggccatggaaaggatttgggtcttatgagagccaaaagaaggatgttaaaggagggaggaaacatgatacaattttagttttttgaaaaacaaacaaacaaacaaacaaacaaaaaactcgtttggcttcagtataaaaaatccattgaaggactcccacagaggttctgagtaaatcagacagttacctgagtagtctaggggagagatgatagagggctggagttgggtgatgatcatggagatgaagagaactagagagatttgaaagagttttaggagataaaagtaatgcgattggtaattaattagatacgagggtaatgggataaatgttgattgatggctcccagattactggctgataaaattgtatggatggtggccccattctctaagacaggaaacagtgggaaagtacctaatttgaaggagtaaaaagtcatgatcatgttatactgaagcacatttaagatagctaagaaaagaggtcaagtttggatatcaagatcgagagtttacagaagaggtttggtttggagatatacaatcatgagttactgaatctatggacatagataagcatataagagtaaagaaaggagaggacttaggcactctaatgtctacttattggtaaagaaggcactctaatgtatacttattggtaaagaatggtgagcctgcaaaaaaactagaggaatgttcagagaaacaagtgaatggtgttctgtgaaagccaagcattgagagacttttaagaggggagtggttaccaacgcttctgaattgttatgaaatgagtgaaaagcatcctgtgggcttggcgatagggagaggttattggtgacttggctgtcttggtggagtggtagggaagaagctaaataggagtgagttgagtgaacaggagctgaggagatggagtcagtgagaatagacaacttctgtggaaagtttgtcctgtgaatggttggagacagatacggtggcagccagaggagatgtaggctgagtggtattcagtgaatgtggcatagaaaatgtagagttgagatgattcttaagtgttttgatgggcaaagagatgtcagaaaagtatttcaagtgaatagtgggcagcatgaatgagcagattttcggaacataatgaagagactgacctaactgtaatagtatagactttaggaacaatgggaaacatgtttgtataggtagggaaggtgagactggatttcagagggctttgttagcctcggaaaggatttgagatttgattatataaacagttgggattgttgatctggatgaagaatgataggatacaggaagggtttcagggagacaatttagcattcacctaatcacaagactgaacattggaatgagttaaggcagggataccatgtagctgtatggcctgccacagttatctagtcatgaagtggacagcttatggattagagagggtaaactggcttgggctaaggcgagaaagaaaacaatttttgatggtcatattaaaaaatttatagttgatactataaataaaagaaaacatcatttatttatagaggaatttatactttctgaagtacttttgcagaaattagctcattttgatttctaactgccctaggtaccacagaaatgtagtaataccatcctcataactaaggttaagctcaagtaccattgttttactaaaacttctgattctctggtcagacggagttatccattgtcctctttgtgtgttttaaaaaatttttatgcagcaaaatgcccagatcttaactgcacagttcaatgaattttgacaattgtatacacctgtgtaacgtatacctctatcaagatagagaacaattacatttgccagaaagttctttttatcttttcggtcacttcctccaccattccctttagaaatcattgttctggtccctatcatcatataatattagttttccctatatttaagcttcatattaatgaaatcaaacagtatacctactttagtggctgttttataatgtttttgagtcatattgttgcatgtgtcagaagttttttgttccattttagagctgagtagtactccttgtgtaaatatggcacaatttctaatccattctcttcttaatagacatttgcattgtttccaatttttggctactgtgaataaatctgatgtgaacattttcctccaagtctttttgtaaacatatgttttcatttcacttgcataaatacctagaagtgaaatttctgggtcatagatacatatttaactttacaagaagctgttttccaaagtgatcataccattttacattcttgctagcattttataaggagcactagttcttgattctcatcaacaatgttgtattgctaatctttaaaactactctagtaattgagcagcagtatatcgttgtgctttcagttcatgtttcctgatgcatgatgattgtaagcatcttgttcttgtgctcattggctgttgtttctcttttctgtgtgtgaaatgtctgtttaagttacttgcttattttgatacttgggttgtttgttcttttgtaggaatattttgtattttctggataagagttctttctcagatacctgtatcaaaagtattttctcccaggctgtaggtttccatttcattttcttgagaatgtccttgaatgagtagttgacagtaattttgatgatgcctaatttatcaacattttcttttatggtgattgctatatgaggcttatataagaaatttttgtcttcctcatgattgcaaagatttccttctatgttttcttctagaaggtttataattttcccttttatatttacatctatgacccacttcaaattatttttgtgtatgaggtaggggtcatgtttcaatttttgctcatatggatatctagttgtttcaataaaattcattgaaaaagactttacctattcagttggcgtggcatctttgcaaaaaagctgttgacgttgtatgtgagggcctgtttctgaactcattttgttttattggtctacttgtctgtccttactccatttccacaccatcttaattactatagtttacttaattactatagtttacttaattactatagtagaactttgttctactttttcatattttatttttaactactttaatttgcattttcacaaacttttataatttttcaatttcctcaaaaaagcctgttgtcattttcattgtgattgtattgaatctgtagatcaatttgcagaaaatagaacactttttgatgtggaacaaaagaccaagaaaggtattcctactgtagcttgtttatgtttatctctcttgtggtttactgagttgctagttttcattctatctggaaaaattttagctatcatatcgtccaataacatgtgtgctctcttttgtttttttttcagactcaactacatatattttagattgcttgatattgtcccacagaacatgtcttcaatctttttctcttttacttcagtttgcaatagcttgtattgatgtgttttcaaattgttctttcttttttagtgtccaatctgctgttaaaccaatccaataaatttttaatttcagagattgcattatttctgtgtttacctattgacttctttttctactgcctacttttttccatagtaattgtagggttttccatttcttgcctgtctaataatttttgattgtttctgggacattatatcaatacattgtagagatttgggatttcattgttttcctctgaggagaattacatttttttaaaaatcaggcagttaaattactgatggatgaccttgatcatgaagagacttgattttaagattatttttcgtgttggtctaatttctacattttttattttagtcccagggcatatccgttcatcctatgacttgtttcttactcctaatgcatggccttctctgtttagatggaaggcttgaggtgtttttcaagcttctctagcttgatgggacttgaactctgaaattcatcttctaccttcggggagctggtgaaatttctatccatctctttagccctttaccattgctgtctgctggattccttattgtctcaccctatgcctgcccagttttggccacaagaaggatttgaggtatattatgcggaagtttatcactccatcaattaaaggatttccccaactccaagttgctctgccacccccaaattgtgacctttgactccttagacttgtaagacacttctgcttgagctctttcacaccatgaacttcccaaactggcaagtgctctcagcggaatagacagttaaatgactatctcagctaataaagcctctctttttcaagggtttatcttttccagtttgtgcctactttccgttgcttcctagtggcttcaaacagattttgcttttcatattttgtcccatgcttctttagtatctattctggcagttgtattttgttgttacatatttgttttcaacatacacacttattgagagcaaagggtgtgttttactaatctttattttatcccactgtttgacccagagcagttttttatacagcaactacttaataaatgttaaattgcattattatttttatgaagaccaattatgaatgaggatttaaagtcttctaaaaaatttgttatatttttagtatactaccctgagtatgagttcaaaggaaattttcttaggtgaaattttgaagcatattattgctttaaaaatttttacttttaaattatttatattaaaaatgtgttcacttatatattttaatattattttaattttaattcattttaatgttgacatataacatgtggtttacaaaactgctaaagttactgcctaatatgattggattttcaatcattttatattaatttatacaaaagcaaacctacttttctgtgtaaaatagaacaaaaatatctcttttatttggaatacggatagtttctaaattatctgtattatgtggttgaaaatatctttgaataattttaatttaaaggaagacttttaaattctattttaaattagacttttcaagattagtctaatggacaaaaaaattgttccatcatgtcagcaatatattaatataatttttgcagggggtcatccaattttcttttattatcaacttcaatattctcaatttgtagggaagtgaccatagccctaatcttaataaattaaccaatttttaggtgtaatttatagtcattaacattatttattactaactacactttgatttcatagcttagggtatacttgaatggaaagaattattataaactggtttcgtttaaatggaatttttagtttgtatataaattcgatatttattgcaggtctcatgatcatgcaaacctggttatgtcagtttcaagaacaggttatattatttgtacaattacaaaccatagttgtatgtgtccatctttataagtttgcctttttgattacttgaaataagtgcattgttgaattaagctaaataacctccttttttctcctttcttcttcagaatcaagtttcttactgggaaatgcccagattgtggattggcctgtagtttatagtaatgacggtttttgtaaactctctggatatcatcgagctgacgtcatgcagaaaagcagcacttgcaggtaggtaacagaatagctaagtaatcttttctgaaatttaacaaaaatctgaatgtaattaaaaggcttaagcttacttggactcccatatacaaaccatagagttaaaaattatgttagaatattagggagactaaattatcaatggaaacacatagcttaagagccactggtgagaacttttgccaaaagaaagatttgtatatatctgtgagttaatcaattcattcaataaatattttttgatgacctaccatgagccaggaatagtctagatgctgagtaatcagaggaacgtcttgtatcagggaacaacttgtggcatgtgatctacagcacctctggaacaactaaattgtcttgaataaaacagagtaaacaccacctggccaagttaaacatggtccatgagaatgtaaagaacataaaataaagctcttatatcctgtgtaagccacatgtacttggtaatggtacattgtttgactcatgtacaacagaatctgacatttatattattataatggttctttaaacaaatatgccatttctgtgagcttaaagagaatattaagaaaaaaggggatcagaaaaaagaaaaggaaactatatataaggaactaatttagaacctaaaacttttcacaatatttcagtaaggccagatgggatgttttttccgtgagttaatttttctttaaagctctcatttaactaagcactgaaccaagttattttagaactacaaggaatctgattttttttttttctaggccaaatcctctgtttttcagatgagaaaactgaggtagagctatgttaagggacttgcccagagaaatagtgatttgttttttctacccattgatgctgagaagcattatatatatacatatatatatgtatatataaaatggttaaatgcatatacagttgaccctggaacaacactggtttgaacagtgtgggtcacttataggttaattttttcaaccaaatgtgatcagaaatatagtattagagaaatacagatcaaaaatatgatattcaaggggatatgaaacccttgggtacagagggctgactttttatatatgtgggttccacagggcgttataactgcaggacttgagtgtgcacggattttgatatacgcagggatcctggaaccaatcccctgtgtatgactctctccctctctatgtatataactgtttatatatctgtgaattaatcaattcattcaataaatattttttgatcacctaccatctaccatgagccaagaataatctaggtactgagtaatcagaggaacatgtatatctgtatatatacgtacatacagagagagaaaggcagagagagagagtcatccatgttatacagaagggattggttgataactctctctttccctctctagatatccttcatcatcatgaaatgtagatattttatattataccattgagtttaaacctgactgcacatagcaatcacttaaataggttttgcaaaacagattcctaccccgcttaaacctactgaattagaatcagtaggtgattctgaagtgggtgggtcaagcagggagtcagtatttttaaccaacagcttagatgattctggtgcctatccaggcttgagaaataatctgctcaaacattctcttccttaatctatgctcctctagccatcctcatttttgcctctactgaaggcattctcatattcattcttcattcctaggtatggaaattggtaaatgggagtgatgaaaatctgtggcttctggttgagagggtccctttgctagcactgatatcgttgggccatattaagcattgctcctctcctatcccccagaaggcagtttaagttagaaaaagctgagtttcatggtagacgttatcctgtggaacaggtccatagagagttccaggcaacacagatatactcacactcgcatttcttattcttggactgctgacatcccgtcttcatgccaggtttatctcagatctcatctacctgaaggtatttatgcttccctaagcaagacaggtttttcccttctctgactcctcatagtttcttgtgtatatttctgttggcatcatcatttggccttaaactaacttgccttatcccttgggtttttattcttattgctttattgcttttgttgccatttttgagaagtattactcttcatatctggatctattttcagtcctgctctcatcccttcttgtgtcccatgtatttgccctatccctggcctattttctttggcaagtacaatttttcctataaaggattcactaagaaaataagtgctggtgtgttatattagctctttgctcctatgaaagagctgcttttcttctaacacaagtaccagattgtaagtgccttaaaagtagggtctccatcttgctcacttttgtatgcacaacaggacacaagacagtgtcttatgtcagtatttattgaattggattggcttgttttgcaataaaccgtaacctaggtctcacatgctctggatagcatactgttatttcttgtatttcatcctgtgttatgacatttgaggtgggagagttttggattataccatgctttttaactgtataaaaaagtgtttgagtctttccccaaattgtctttacttatcagagacagtgttttcaaatgatcatgttcttaatgtaaacaattattacttacttgcataaaatgccagatgtgttttgttaacctaaaaattgcaaccagtttaatgccctcacagaacaatgaagactagcatctgatatatgaacaaatatctgacctttatcagtttttcttggaagcatgatttattttaatgtgttcttcttttaaacttccttattctcttttaaaattaaactatatccattttatgtttgctgtagcattatttagaagactgaagacctggaaggaatcaaaatatccagtagtagaagtttagctacatcatatgttgtatatactggaaggataatgacactggaaaaaactaacaacatattatcaagtaaaaaaaagcctaaaatgaaataaaacaacaaacccaaaagcaccccccaagcagtttataaaacagtgtttgcatcatgactcaaattcttttacatatcgcttttttcccatttcttgaataaatccagaaaagcctttaagtgtgagacacaaaataacagagagagaaaaaaagaaaatgaggtgcacatttagaaacacggggttgatggctaaaagttattatagtgtgtggaattactgacttataagtgaatatggagataagtatttgacactgagaatatccttgtaaataatttaaaaattttgcttatcattataagtttttagacagacataagagaataagaagctacaaagcagtgagcttcattttatatgggaaaatacaagctttgacactatatatctcagaaaaaagaatcatttttgtatccaacttgcattagatgaattaaagtctatagggttaaagtggcaactaggtaaatgattacatgccacagttttgaatgttcaaaagtgaattgttttatggtaaaataaaaacacattaatttgtgtttttataatatcaagaggctaatatttctttcttctgttttcttatcttttttcttctttgtccttctcaacccctcccacattggaccagacacacagaatcaaattaaacatactcctcagtttgtcacaatattgtcattttgctctctctaagcaaggtctctctttattttattttatttttttccttttatttcttttccctttcatcccatcccccttgttcctcttatggttattaattctaaagtgtgtttattgtatgtctttctaatctgtcttctgcttgttaattaaatatgtgtattcttgaaatgatattgctttgcatatgttggttgttaagatctatttaattcctaccacactgtaatatttatggtttcttactcttttcattcaccattatgtttttagacttctttgtgtcaccgtatgatgatctattcatcatgtctgattgttgtctaatgttgtagtgtcttcacagccttcgttctatttatacattctagtagtcctggaatctaactttgacactttgctacctcaaacaacttggaaataagaatcgtcctacacatcttcttgtggccctgtgtgagacgttttctgtctctatccccagaaatgggattgctggataatagaatatatgcagagtttgtaaattaactgctataagactgttacagagtagccttctgtttccattctcagcagccattagtgaggattctggttttcctacatttttgctatgtcataatggtactgaaattcctatctgaaaatatctgatgtgtgctaggtattgtctcatttttgttttaggtaaaattatgacactatgacactttcggatccctaggaatttcaaatgttgtccattttactgtggacactgcattttccacgcctttgcactgttttgctgtttattggaggacatgaaaagtatcgcatgtttaaaagaggttatagactttgggagaatgacatttaaaagcatatgatcttatctcatgacctgtagaagctctgacatttgggatatactgtcatagattaggtaggaaccactttagcattttacttctaattaacctgaaacttttaagagcctattctgctgtcattttttgtttttgttttggatagaggggtgagaagaacaatcaggtagtttaggtagggtggattgaggggtagatagatgctctcagatacatttttttgaaagaccatttacaatcccttatccaaccccatcaagttagacaatgagtcagagctattaagaaacagtttattgggcagatttcacagcagttttatgaacacaggattatctcagcagctaccaagagcatgtgacacatgatggatgccagtcagtccggctccatttggctgagggctgtgcttctcatggtgagactgatgaaaagtgttgaagggcagaggtgtcttggtgatgtcagactccgaagattacaggtatacagtgctatccctgtttttccttaattacatgtcatggatcaaccatttatttactccagtgaaatcctttgaagaccatgtaaatcaatgggttgtgaaaccttttggttatgatcctctgtataaaggaatgtctttgatttattccaaaattacctctttcagattttgaaaactgtatttcttttttttttttttgagacagactttctctctttttgcccaggctggactacaaaggcatgatcttggctcactgcaacctctgcctcctgggttcaagtgattcttttgcctcagcctcccaagtcgatggggttacatgcacccgccaccatgcctagctaattttgtatttttagtgtagatggggtttcagctggccaggctggtctcgaactcctgacttaaggtgatctgcccgcctcagcctctcaaagtgctgggattacaggcgtgagccactgtgccgggccgaaaactgtattcttgtttttaatttttcctccttaacttcccctctctcaggctttatcttttttgatccttcgactgtagatctcagtccacctcccattaacctttatgattctatggttgtggccacttctgagctggagaccacatttaccaactgcgttaagtctatctgtgttgctttgttttgacgaaggatttgctaatctatgaactacagcctgcagataatattaccctgtattatggtgactgaatgtttgttgcattttagtctagacacaccgttgcacatttagcagagtaagagaggttggtggaactcatgaataggttatgttttcttcagagttgtaagattcttttctcctttggaagtctgtcaatcgttatagccattcttacgctaggtactataatgaggcttgttcgtgagattttgagagcagagcaagggatccaagaataaataaatcctgctacaagcccaaaccacctgttcctcaaagttttctaggtcagacacacatgaacgataactgccagatgcctaggcgagctgggtatggcctagaccaggcctgaagacaacttatcccttattcccaagatgaaaccagtcagttgtgtgacaagaaaagtggccagattatacaggagcaggttctgagtgagcgtttgcttcaacctcatgggcttgtgaagaaagaagattcacagaaccatgcacatctccctttaagacacagtgacacactgccttttggaaagcatggttcctggagaatcctggagaagctagggagtgaggctggggtggggaaggggcattctagtcccatccgtacattccagtcatatttcagccattgtgtaacacgttataatttgtaactttatttgcattatccttttgtcaccctttgagttatattattattgtccttattttactgatgaaactatgggtcagagaggatatacgacttgtccataaattatccactttgtaagtggtcctccaaatgcaaaagtcctctgttataccatgactgcccaatattataacagagatagattgcttctgtgaatccaattctattttcctttcaataaagtaacagtgcagtagttcatttataattaccaaggaggagcttggcatcctatgtaagagagcaagtggaagttttgtgattttaaaaatatttccgttacatattccttgaggatatttggtagaagatatgaaaactatggaaaattattatatatggtttctaaagcccgttgattactatttctataatttgtgacccctcaaattgattaaccattcaaagactgcattgagcttcagtcatcctgagtcaggcttcaggaacctgtgataaaacatttcagcattcatatgtgacaaagccaagcaaataaacaaatgtgccatacccacagagaatgcgggaatcattgatttatcagtatggcttggacaactttggctgaaaatactttcagagattgaattaacctccagaacacttgccttgggaggatagatagatagtacatttctgacattctttatagtctgttttgaaatacctcttattatttaactgctacatgtcaccccttcaaatacatgttctatcactggaaatatgcggtataataaatgaaaaatctgagtggaacaatgtaagaaatgaaagactattttaaaaaccgcattcggattttaataatataggattatttttcttaagtgcctttattttcctaggataagtgattttagcattggaaggactaactaatggaggtgtattatgaaatttttatggtttatttaaaaattgcttgtttgtttttatcttctcttcagaagttgagctgcatcagacctgtgttgcattttttcttcgttggtgttattaaaccaatccctcaaagagcttcttttttaaatttgagttgtaacttacttttaaatcttattggagttaatttttgataatttttatcctagttgcttgttatatcataaattctttcttattttgtttttctgttgaccaattgcgaatattatgtttcagtttattgaaccacagacacctgtcatttagtagcagtgtgaaatggtttttctttctttcttttaagactacaaatatttacttagtttaattgcccttatcttgaattttaaaatgtttctgctttattaagattctttaattaaaaataaaagttagtaaaaaaagatttaaaaatttcacttgtctataaaaatattatgtacaatattaagctaatatttttttgggagagaagtggctttatgttctttagctgaataattctaatttaattgtaatgccttcaagcaatttttatgaaactctcatgagctgaaatttcagctttgacagtaacagtggcttttcagtgccagcttgcaggtgtgctttgaggtttcctgtgttagtctagatataagattatggaattaagagtctgtcattttattctgagatccttttacttattttattattttaatgacaattaaaattttcctttttaaattaaatatattaaaaatgaaggattcaggtttctcggtgcttggacaatctttgatctgccttacccactttcatttctgactttctagaattctagttgcttaggttggtgttatagaaggtgggcttgagttaccctgtaatttctggttgtaatgtggtgctgctattggatcctgtgtgtcattactggatcttgctgaaaaactatgccttttaggttgtaaattttattgattggtattttcaggtgcagattttctgtgagcctataatgaagctgaaccttcaggggccctcatttgagtggatgtctttcgaggctctgtttgtaatcttgttttataattttgtattctttttcttaaggagggcttcacaaattgtataagcttcagcctccaccacactttggatctgcctctagtaaatatgtgaactctttgaaaactgaaagaaaagcaataacaaagacagacttttgatctttcaaaatcttagttaaggtgtttagtaatgccacattttctttcctggtggaagaaatggtctggacaatcataccgatcagcagaactgtgtatctaaaaccagatgtacaactgatgatttgaaagcattgagaatggagttttagagacatgtagttcttgggcaagttttgttatttagatgatcagacttttgccaaggttctcttagaaaaatagagaatgtcaaacattagaaagtttttgtggaatatggacattcactccttaatctatgttttgtatgttcctctaaccactgtaataatgtatgattccttcaagatgccatctttacttcccttccattagccacacttgtacctatcttaagaaaattccctgaaatgatgagaatgtcaatgcattatatgtatcatatgcaatcctcacttttttaatgatagtatgggaacataaggtccatgcaagctgaaaccacataatactatcttaatactcaataaaaattatgatggttttagcatctttaaaaatgtttgtcaaaacaataaaaactctcttactgttggttatcaatgcagggagatgatatcatagtaaaactcatatttatttagtgtactgtgattttgaacattagaaacgttgagaatggaggaagtgttttatttcttcttaaaaaacttatgagtcatttaaacaattctttggcttttcagaatgtaactttctgtataaagagagcatcttttctatcttctcgaaaattgtcatcctcctttctaagttagaattaatttcaaatattttattcttccactttcactattgtgatcaatgtactagagctcctttaataaggagggtttttttggtttgtttttaaactggtgtcacctcctctgggaaaccttcatcctttttgtcacaaccactttcttcatttatatggatgagctcaccttcactaagtccttttggatgcatatttagagtctcccaaatggcagtagtattgacatttccatggtcacctatttctcttataacttcatttatgttcaatttgaattccacttccaacattattatttttcatttctttggtggactttagtttttgttggctacttactgcttttgattatccatttttgtaaaatgtcatatgggtttatcactgagagaaaaggaggcaatatgactacatgcttttctgtctgtgcgtgaactgagtaacagccgtgctgtttccaatactgacaggctttgaaagaagtgatgtgatcagtgactggttgtgaaggtgcatctgttattttccagtgatttgtagactgaagatcaagtggcaaagcttgcactttgtgcaattactcacagttaacatactgtggaaactgaaatttgaactgtgctgtggaactggtgttatttaactaaaccacagtgactgaaatctgtgcatacaggaactgtgtaaagcaagaactgcctctcatgatttgactattctgtgtaggagcaatattatattttctagccacatttgactagtcaaagacaattatatgatttttgtagcatttgaaaggcaacacaaaagtgaaatcgattgtttgttttttttcccccccagttttatgtatggggaattgactgacaagaagaccattgagaaagtcaggcaaacttttgacaactacgaatcaaactgctttgaagttcttctgtacaagaaaaacagtaggtatctcaattattaataagatgtgccaactctttattaatattatgtttggtaagtcgtagtggagctaaaatgtagagagcatgtaaaccttctgttgcttcttttcttggcaggggcagaggttgctggtgaaattagataataaaattaataaataattctacctatggaaagtaaccttttgaggaatggaagaaaaatgtgatgcatcttaatatgacttttgtatcaggcagcaaaatattttgtaattaatacttataataaagatcctataattatgtgacaacgattaaaattgacagatacatgtattaatttcttcttatggttaaagaaaacggtaattgttaacactggatatatgcaattacctttcgacacgaacataggcaatgtgaatatgtggtagctacttgaggggaatctctaccaatatggccttttgccagcctcagactcttttgtgagaaagcctagtagaagtagtcgttgttctcagaacaagtcattcacgtttggtaaatttgtgttgattgttgtgacctttctctgggatgagatttgtatgtggtaaggtatgcattatataatgacataatatctggtgatatagactttccatcagagtttggagggaaaaaaaccaacatgacaaaaaccaacagtatactcaacaactcccctttctaattcactttatttgcatggttacttacatttatctttttgctgtttcctcaaattgttcttgctttcttttttgaaatgaacagtcacttcataagatgagtcaatttatttattgttaatagcaaatgatagcaaagtctactattatctttgatggaaattgatggttactaaattcttcccaagtttggaaaacattctcgcttcaacaggaaacgcctgttccatgttcagtgcctgttggatcttgtggagcataatttatcctctccatttacttgaaacattttttatctgtggaatatttggaattaaaattcgatttctctttttattagtagactaacaaaggaataacagcgtgagacattgcctcaaagtagtgcacttgataatggaaacatttgtttttagtaattttacttaaggaatggcttatcttatttttcattttacatcaagcccaaagagaatttcagtttgaagtcatagctaaatgtcagctagcttgtcacctagaaaacaatcccttctgaatggtcagctctgtcctctgcaagagaaaaggcagactgtaggtgctttctgggtctttttttgccaagtctaagtacatattgataatttgtaggagacctgtataccaaaaaatccttcattttcctatggtttgttaagccttcaataatttagatatgtgctccaagtttagcaaataatttaagaatattctatataactaaggtcattcactctctgacatttaagcaaaataaacaaacatttgcctgactttaaagccccaaagacaagtccatagttcctgagtttctcaaaaaatatgtaggtgaagcctaggtgacatagcaagaccctgcctctatgaaaaaaaaaatagctgggcatggaggcacatgcctatagtcccagctactcaggaggctgaggcaggtggatggcttgagcccaggagttcgaggctgcagtgagctatgatcatgctactgtattccagcctgggtgacagagcaagaccctgtaatgacaaccaccacaacaaaatatcttagtggaatttctgtttatttactttaaatcatcttagtaattacttgaattttacatttccagaagtctttccaaggtagtttagttattttgccttatgttaatggattgaaattattatctgatcattgttcaggcctatctggttctttccagataactctctatgcagataagtgcctgcttatagccaatgggatatataccccatagcattgtaagttaaaacttgtgcctcctttctgtgcactatctacattgagttttgcttttgttttcctctttagtgaaggataggtgttatccatgtattataatggagttttgctatttaaatgcagcttttaaaaagtcttgtaaatagctgaaaggttttgaacatcagctgagaaaagcatatttttgtgatttaaaaaaagtgttaggtagaaaaattcacgtctgcagaaaactgttttgggaatgcctatgtgccaagttctcccaatacgtcctttaagcaattaagttaaacaccattttgcaaatgggggaattgcggcatctgattgaatatgcatcaccattgaaattttagtttgcagcctctgttctgtaggtccagtgctctgattagcagggggctgtttctactgtggggaaagaaatggtagctctgagcttaagatagctctttctggccgggcgcggtggctgacacctgtaatctcagcactttggaaggccgaggcgggcggatcacgaggtcaggaaatcgagaccatcctggttaacacggtgaaaccccgtctctactaaaaatacaaaaaattagccgggcgtggtggcaggcgccttgtagtcccagctactcaggagtctgaggcaggagaatggcatgaacccaggaggtggagctcgcagtgagccgagatagtgccactgcagttgggcctggacgaaagagtgagactccgtctcaaaaaaaaaaaaatatatatatatatataaatataaatatataaatatatatattatgtatataaatataaatatatataatatatactatatataatatataatatatataaaatatataaaatatatataaaatatatatataatatatataaaatatatataatatatataaaatatatatataatatatatatatggctctttctgtgtactcaaatgcagaactgatagccgaggctcctccaagtcatcaatgctggagcactgcaccgagattcagccacagcaggttcctctacttaaccctcccagactccccagccccctgaaccccaaatccagaatatgaaggatctatcaccacatacttggcagatactcagcctacttggggaaatatgaccctgtggcttggaaagttgaaaaacaattaccttcatatctaaagcagttttaaagagagcccagactctgtgccagaatttgaaaagttgcggttttcacagcaaggcatgaaatctaacatcatctctttctgttcagatttctaacagaccttggaaaattacttatttttttagtgcccttttctctttgtttatgacccttctgcctcaagcttactgtgttggaatagctacaggccatgtatccactaacgtctgggtctggtgatttgtaaaaccgtgcacatcactcacagttcctggtcacgctgtgtaaaatacgaaaacagaaaaaaatgaacaagcctctcggggagatgatgtgattatttttgaggtccctgtctcattctaccatcattttggaaagggccacgtccttccataggccccctggggttgcagaaaacctgattgtcacagctgaatagtcccatagaaatctcctttctctaattctctgacttcttgagcctggtagttatctcatcctgtctaaatgaaaaattcccctttgtggtgacattaggtgacttttttattttttatttttttaggccatgggaatagaagtgcttcttattcggttcttaatggaagctagtaaaaggctagggtcttacctacagactattaatacctgcacgtttcactccccaaatcctaaaccttacaaaaacctttatgtcttaaaatagaatatttggaggggctttactgcactgtggcatgaagagaatataatgagaaaagtgtctctttgattgtaatgtaaatgtgtctctttgattgtaatggaaccttcccttcagtgttttatcacctaacagataattacacctttgaaggcatttcttgtgccttcacatatttctatttgttatataccagttcctgacttatccaaatgataagccttgaatactttgataccctctgtcctagagggcagagtctgcagtagccatccttcgaagaacgaggtgatagagtccagcttcatgctgtttaagtgagggaggtaggcagcagtggctcaaaaagatgcctggggatctcaaaagctggggacacgtctatttttcttcaggctgccttaacagtttcaggtagagctctgtgtacatcggacatcaagttttgctgacatcctctctctctgatgtggggatgctgtcaaagccatagagctatcatataagtctatctgactgatgagagagccttgggatagaaacagtattttagatgttcctccaagaggaatgcttattagaagatcaggtatggctgttgcagttaattggaaacacttgtcaaagtgacatgacgagagaagcaggtaggagtgatcacaattggtaagactctcagaagaaagttggtgagagcagcagtggttgagggacccagacctacaggtgttgctgggattgcttaagtagcaagactgcctttgtgttcctgcattgtgaaatgacagcctgtgctttactttagaattttgatattttggcgtgtatactgtgtttattaaatttgaacaactggtagttgatacaaaattaaaggtttacggattgtttgtagtaattaatatactgttgttttggtgttgattcctggcacagctgttggcagctgaaggaagaaggaagccaggagaccaaaccactgctgtggccgtgccacactctaatgtcctttccccaacttctttctgttacaggaacccctgtttggttttatatgcaaattgcaccaataagaaatgaacatgaaaaggtggtcttgttcctgtgtactttcaaggatattacgttgttcaaacagccaatagaggatgattcaacaaaaggtaattttcaaaagaattactacactgaaaaattaggctgttgctaaaagatcttcttactgttttacctctgctgattgaactggaaaacaaaattctactatgtggcctttcttttgcttcattgcttggaatctgttttattcaatcatactgttggaatagaaatggcatgtctatccaaagttgaaatatagattggttaacttatagcatgagtaagaaattttatagagcattttttttgtttgtcttttagtcaaggtctcactctgttgcttgggctggagtgtagtggtgtcatttcagctcactgaaatttccatctcccagtctcaagtggtccccccacctcagcctcctgagtagctgggactataggtgtgcgccaccatacctggctaatttttctattttttatagagtcagggtttcgccatgttgcccaggctggtttcaaacacttgggctcaagttatctgaccccccttggcctcccaaagtgctgggattacagacgtgggccatacacctggctgagcattgttaattttgaatcaatatgattggaatttcaacacctcataccatggtgagctttagagccaaaacgtaacaattggtggaatggtttgggtgaaatctaactagagctcagttggttagttgattgaattttgttgaattacaattgtaatagttgactttttcaagttacttttcagtttttatttattctgttgtgtagtccctagagtagatgttgctagattatggaaagaataattttgtcttcaggagagtgactggcaaaatgcaaaccttctgactgtagtcttattgactataatagtcaaagagactgctatagaaaccactagtcagtggcatgtgcttttacctccttttctatgtaatttattcccaatttattctctccaattatgtttaaattagaaactggtgtcatataaatgaagtatttcaaataaccttagaagtagtttttatgaaatgttatttttaataatctcttaggaaactaaaaataaaatgtcttcctctttgcatttgacaaacatcgcctttccttacttctttttaaaaaactggcatagaaactttaatctttccaactgtaatcataattatagaaaaaatcacagtaagtttattccttgcataggaactcacatatataatattgtatctgctcagtttctggttaacatcaaatagcgagaggataatttttacagtgtgcaaaccattcaaagtatgacagcaatttatttgtgctttgaagatcgaataaagtattcaatttggacccatattccctgttcctttacacatagactcagtgcctgggaaatttaagataactataaatactacttttaaattgaacagtcttctaataatatttagggttttttttttcttttcccttttttttttattattattatactttaagttttagggtacatgtgcacaatgtgcaggttagttacatatgtatacatgtgccattctggtgtgctgcacccattaactcgtcatttagcattaggtatatctcctaatgctatccctcccccctccccccaccccacaacagtccccagagtgtgatgttccccttcctgtgtccatgtgttctcattgttcaattcccatctatgagtgagaacatgcggtgtttggttttttgtccttgcgatagtttactgagaatgatgatttccaatttcacctatgtccctacaaaggacataaactcatcattttttatggctgcatagtattccatggtgtgtatgtgccacattctcttaatccagtctatcattgttgggcatttgggttggttccaagtctttgctattgtgaatagtccagaatctacaatgaactcaaacaaatttacaagaaaaaaacaaacaaccccatcaaaaagtgggcgaaggatatgaacagacacttctcaaaagaagacatttatgcagccaaaagacacatgaaaacatgctcatcatcattggccatcagagaaatgcaaatcaaaaccacaatgagataccatctcgcaccagttagaatggcaatcattaaaaagtcaggaaacaacaggtgctggagaggatgtggagaaataggaacacttttacactgttggtgggactgtaaactagttcaaccattgtggaagtcagtgtggcgattcctccgggatctagaactagaaataccatttgacccagccatcccattacagggtatatacccaaaggactataaatcatgctgctgtaaagacacatgcacacgtatgtttattgcagcaatatttaggtttaatgctcatttgcttgttttaaaattcatggtgctccatccaacagccagagaatacatattcttcacctcacaaggagtggagcattcaccagagagataacattctgggccataaaactaccttaataaatttaaaaaaatataaatcttaaaaagtatgttatcagaccaaagtggaattaaactagaaatgagtaacagaaagatatctggaagatcccgaaatatttggaaatgaaacatgtttctaaacaaatcaaagaagcagccttaagataagttagaaaaatatttttaactaaagaaaaatgaaaatacaatttatcaaatttgtgagatgcagcaaaagcagtgcttagagggaaatatgtaacattaaatgcatatattagaaaagaagaaagacataaaatcaataatctaagattctaccttagaaaactagataaagaaaaacaatttaaaccaaagcaaactgaagacaaggaataataaaccttacaacagaaatcaatgaactgggcaacaggacaacattagagaaaatcacaaaaacccaaagctggttctttgaacaggtcattaaagttagtaaacctctagccaggctaactgagaaaaaagggtaaagacacaaattaccaatatcagaaattaaagacatggacattcaagcagagtaaagggctactgcgaacaactctatagctgccattgataaattggatgaaacagaccagttccttgaaacacacaaactaccaaaacttacagaaggaaaaatgaacttcatttgtgctttatttatttaaaaaattaacaataattaataatcttccaaaaccaagaaaagaccagatgcagatggtttcattggtaagcgctaccatacgtttagggaagaaataataccagttcaagtcttttccagataatagaagcagagagagctctcttaacctattctgaggcaagcactacccatatagcaaaaccagaaaaagacattacaagaaaggaaaactacagacatattttttttttaatttttttttttttttttttttgagatggagtctggctctgtcccccaggttggagtgcagtggtgccatctcggttcactgcaagctccgtctcccaggttcatgccattctcctgcctcagccttccaagtagctgggactacaggcgcccaccaccatgcccggttaatttttttttgtatttttagtagagacggggtttcactgtgttagccaggatggtctcgatctcctgacctcgtgatctgcctgcctcggccttccaaaccaatatttttcatgaatatagattcaaaatcctctacaaaaattggatccaacaatatctaaaaagaattatgacaaccaagtggggtttatcccacttatgcaaggctggtttaacatgcaaaaaccagttgctgtaatctaccatataaaaatgtaattcacaaaataatgagaaaagtcatgattatgccagtcagcagagagaaagcacttgctgaaatccagcacttgttcatgataaaaactctcagtaaagtttgaatagaggggagcttctctagtttgataaggaacatctatataaagcctataatattctaactatttttttcttatacccattaaccatctccccatcttactccccaactacccttcccagcctcttgtaaccatccttctactctctatgtccctgttgtcaattgttttcatttttacataactaaaagagtttaattggattgtttttaacgcaaaggataaatgcttgagaggatggatatctcattctccatgatgtgactattaacgcattgcgtgcctgtatcaaaacatctcatatacctataaatatatacagctactatgtacccacaaaaattaaaaatgaaaaaattctacagctaacaatggtctatatcttaaagttatatatttttaaacaaaagagaaataattggcatctgatttgtgacctaacattttcatacacgaatgataatcagactgagtaaaaagctttgatcatagtcttttcctctcaaaaaagtatgtatttgtatttgcactacatgattattgttttctcttacttactttaagtgatttcatggcacagatgaagttggccaaagaaagtacagtactttcgcagcagttttgaccggctgaacctaagtggtggtgtcagtaactacatatctatttatggaaactcaaagtcggcaacattttgcagtgaagttggggaaagggtgctgatgttgaagtgttgacttttctttctgaaattaatgcttctccatttatctgcatctccacatcagaatcacagaattctttgtaaggctcagtctctttgaaatgaataattcatttttatacaaaatgatatttgaaaaagctcgagacaactcagaccacttgattttttaactatgagtttgatagacatgtaaattagaatttatagggaaaatcagaccccattgtgaaaagcattagagaaaaaggtctctttccagtgccagaatctgtagatgagcttattttaaatagacttttgagacttctctgtatcttccaaacacatagcagattattgaaaaagtattgtaaaatgtaactatgaatggtgtgtaggagctactttctattattcatgtgaactgtacatttaacatgaaaaattcaatagaaataaaatatttatgccattaagtcagcatcctatatcttgaagctagcagtgtaggaaagtacattttaaaatattggcataagcacctatctttctactttttaaatcaagtaaaggaaccatggaacttttgggaaataatgggtgcgatgacatgataacaccataatatcaaaataatttgggtgtagatcattgaacttgggtagagtagacttgctgttgattcagttttgggcaccagagttacttaacctgagcctgttcaggactcttacaggaatattttatcctccttgtcttacatttatctattttttttttcccaaccaaaaattgggaatatggtacaggcatgattctaagtcctggagatacaaagtctcttctgtcacattctagtgggggaggcaaactagtaaatatatagtggaagctttcttttgattgctcccgttgtctcagtaaaaacaggaatcacagttatcaactgagagtaaagatggtgaagggtgtgagaagagtggagtgcgtctgaactagttatctaagagagtggaatagtgagtggacaagagaaacacagcaggatttctgagctgcacaaaggtccatttcaggctagtggtcataaatttcactagttatctatgagcataatattgtgttttaatccactcatatttagtcaaagaggtatagatgcagaagtaagtgaaaagttgtgtttatccaatgttgaaatttggtcaagtgaataagagaagactcagggacttcaaagatctgggagttgaggatgtttacaagggtgtttgcaaaattttgaagaaatacttcattgataaaaattctgccagcatacaagaaatagtgttttagcattcaggacagacaagtgaatctatacaccggcaaaatcagaatgtaatcccagagcaaggactttttaccttcttaacatgaaaaggggcctgatgattggaacaagggtccaagtcctttgaggatttgccaaaattgactggaattaacattaatctcctacttgtatcgatatttttaccaagaaacttagacatatgattgaaagacttaaataaatggactcactctgaattttatttctgattcatatctgggaaaataactacaacatgtgatggcagccaactaatttgaacgtacctcttccttgtaatcaatctatgattaccaaacttttattctgaattgatatttgatcttactggcactgggtaatgtcaacactatctttgaattataccatgatggatggttgcaaaacccatcgaaagggaaggaagccagtgttgatggagtagttaatgtatgccaagaattttatattcattattggtcatttctataattctgaaaattagtattgttgtctccattttactgttgaagattctgacgctcaacgtctgactgatttcaaatcccatgttctctctattgcacccatgctgccccgtccttctcagtggagacttattgttgaggtttaactacctcaatcccttgctttcttttttccccacaaaaatgaagcacaggttgagaatactttcatttggagagaattatgctgctttgaaccaaataaactaactgataataatttaagggggcaaagtgttcccgttattttttgttcctggtattgaggtcttgatagtgttgttcaggtaatcagtcagtggtacctgatacattataataatacaaagaggaaaattacagccaagaaatccattctgtcagttatccatatgtgttctaaaagagatggcctaaatctctgcccatttatactgtacagtattttcaaacagactccaaaactgccaagataattacagtgtgaaatatcttgtgccaaatagttatggcattttcttgccaataattgtgacaaaaaaattcccatagaataaaaaataacagccaaaatagcaagcttctccttgtggaagccaatggttttctttagagaggaaacaacagatgaaatatgagtaattatactatgtaatgtagtctctttggccaagagcataattgtttacctaagctttttacttatagattagaatcttgtgttgcagtctagtagattgatttaactgcctctgtgacttctttttatttttaagattaggcagtccatgacaaagaggttaattgcaacccaatagagctaaactaatattttattaagaaggagctggcatcctgagcttttaggagaacaaatattctcataatgccatgaacaacttacagagcaagtattaggctcttcatattcagctctctgtttgcattaccctgtatcgaccacatctaagtaacattagcaaactttgctgaataatcagtcacaccagttagatctctgtaaaggtgagatcagtaaatgtatcacttggaaaagttagaactgctgatacgtcttttttctctgacctagacagtatggcagctcaactttttcaaagtttatacagtacaagttggtgggagatcaaatgaactaatataggtaataataggtaattccagatgtgttcaggaacacaaagggattggtataagacattgttagtgatagcaaaaatttagaatctacttcaaagtacatgattgaaacgtatgtgtgatcaggaaggagcaaatgatcaattctctgagatgataggggtgcaggtaagaaccaggtgccatagtggtttagtctggaggtggatgggagagaaggggaactgaaggctgtcacatttctatgaccattttgtccaaagcaatctacagattcaatgccattcttatcaaaataccaatgtcattttttacagaattagaaaaataattctaaaattcatatggaactaaaaaaaccccaaatagccaaagtagtcttaagcaaaaagaataaagctgaagacatcacattacctgacttcaagttatattacaaagctatgttaacccaaacagcacagtactggtataagaaatagacacattgattaatagaacagaatagatagtccagaaataaagccacatatttacagacaactgatctttgacaaagccaataagaacatatattggggaaaggagacctttttcaataactggtgctgggataattggattgccatatgcagaagaatgaaacaggacccccctatctcttgtcatatacaaaaatcaactcaagatggattagcttaaacataagacttgaagttataaaaatactaggagaaaatctaggaaaaactcttctggacattggtgtaggcaaagaattcatgacaaagacctcaaaagctgaggcaacaaaaatgaaaacagacatatggaacttaattaaactaaaagcttctatacagcaaaagaaagaaccaacagagtgaacagatgacctgaagaagggaagaaagtatctgcaaactatttattcaacagaggactaatatctagaatttataaggcacccaattcaacaacaacaaaataactccattaaaaagtgggcaaaggacatgaatagatatttttcaaaagaatacatacaaatggccaacagtatatgaaaaaatacttgacatcactaatcatcagagaaatgcaaattaaaactacaatgagataccatctcacaacaatcagaatggccattaaaaagacaaaaaatagcagatgttggtaaggatgtggagaaaagggaactcttgtacactgttggtgggaatgtaggttagtacaacctcaatggaaaacaatatggagatttctcaaacaactaaaaatagaactaccatttgatctggcagtcctgctactggatatgtaccaaaagaaaataaatctttacacaaaaaagatacctgcactcatatgtttattgcagcactattcacaattgcaaagatagaatcaatctaattatccatcagtggatgactggataaagaacatgtggcatatatacacaatgggatgctactcagccataaaaaagaatgaaatcatgtcttctgcagcaacatggatggaattggaatccgttatcttaagtgaaccaacccagacacagaaagacaaatatcaaataatctcactcataagtgggtgttaaaaaaatgtgtacacatggatgtagagagtggaatgatagacattggagacttgggagggtgaaggcgtgggagagggtggatgatgagaaattcttaatgagtacaatatatgttattcaggtcacagttaccctaaaagccctgaccattatacaattgatacatgtaaagaaattgcacttgtacctcataactttatataaattaaaaagaagactatcatgtttcttatggcttctgcttttttcaataacatttttggcaggggtttgtgctgacagtaaggagagaaggacagcataggtgttgtgagaaaaatgctaactctttggaactggaactgcaagaaggccctaatcagagtcaaataaaaagattactgagtagctcagaaagctcatctctgaatgctcccattgattttaatgtgtaccaaaacattcatttgctttgcattgattctccatgttctagggcattttgatagcaaaactcataaacgattactcaattttacaaccgcctttggctttgatttatctaggaagaaagaatcctttccaagtcttttctcctaaatttctctcttctggtccgtctgagtcagttcaacatttgccaccacttttttttcttttttctgccagcagttccccagttctctttctgaaagcagattataatccttaacacttccagaattccttctctaaccttccctaccatgcctttcctaccttcttcaaccaaaagacttccttcatataagctatgctaatacctaagaactgaatgtattttcttctttaaattttaaatatttacatataatgcagatgctgtactcctatttatttcctcattaatcatcattaattcattcactaaacaaaaccattcagtaaaacattccacaaaaacagatctagtgcccactatgtgttagtcaaccaaggtaatatggtctggctctgtgtccccacccaaatctcatcttgaattttaatttgaattgtaatccccacattgggggagggacctcatgggaggtgattagatcatgggggtgatccccccatgctgttctcattatagtgagtaaattctctgagatctgatggttttataaggggattttcccctcttggctcggcacttctccttcctgccaccatgtgaagaaggatgtgtttgctttcccttctgccatgattgtatctttcccaaggcctctccagccatgtgtaactgtgagtcaattaaacctctttccttcatatgttacccagtctcaggcagttctttatagcagcatgagaacggactaatacacaaggatagaaaatataagatctggcaactaaaagtcgcacgatgcagtcacttcccttttcatctatgttcaagggtagtcttactcagaatatgctgatttaaaacatttttagaatgatgggttaatattacctttctctttcattttctttctgtttttcaaatcaatgatagtcctatttttattcatggagaaaaatgcatgtgttttatttttactgtttaaaaatgattttttttcttcaagaaagtaaaataaggtaaagaaaagagatgaaatattccttgatcacactgacttcatgtgtaaattaaggtacacacatacacagacatttgaacaagctttttttgtattaggaacaactgcttcctccttaagaaacacagttgtagtctgtgctcatgatgcttcaaatggaaagccagaggatgacaataagctttcattgtcatatttctcctttctcacacttattttcatgtatgatactgtgaaatcagagaaaacatgccatttgatgatttgtatttgtttatggatcatttaatttattcctaaatgtctcctttttttttcaaaatgttttctggataaacctttttttcacacagggaacgaaagtgggcttttcttttaatccaatgagttataccaagggctgtaattttacctgttttagaaatctgagccttcagtaagtaaaagattgacttggaattttctagaaatagtcaaggcaattataacattctattgatgtaaggtgcacagattatcaccaggtaaaattataatatacctatgactaatatagttactgtcatccaaagacgccctcaccacttttaccaaacaaagcaaaaccaaaccaaaaaccaatgataataaaacaaaatgagatttattttatatctgatttttaaagttacaaatacaattgatttattttatggtgtattttatgccaggccttgtttcaagtgctaagaatggagggataaacaagagtttagcaagagtggctattatatcaatcaacaattacatcagtgttgttagtgccaggtgaggtatgcatcccatgatgtgcgtgtacagaggagggcacctctcacttgtgggtggatcaaagaagcatccaggtaatgcttttactgagtctgcagttaccagtaagtgttagccagaaagatgggggagggaaaagacattccaggaaggcagaatgattgtaacatgtgaaaatacggaaacacaaaacagcgtagggtgtgcaaagaattcctagtagatttaattttagttttgaatttattctttatttgatttgctattgattttaataaggctgggatgcagagcatgtgtgagaaagtggcaagagacagaggcagagcaaatcacttggatcagaaaataaatgacctgtataccaaggatatacagtgttatcctggaggccttcaggtttctgttaaagggtaatagggtaaaaggcatgtgttttagaaagaactttgcaagcaatgaggatgtggttttggaatgctgcctaactcgggtgaaagacgttgtgttgtctgacatagtaggggtgcagagaggagattcaatttgagagatatttattgatgttataatctataaggctaggaaataagtgtgtgtgtgtgtatgtgtgtgtgtgtaggtaatagtgaaaagaggatggcgaatttcatgtttctcatttgggcattagaaatatcttggggccatttgacaagatcagggatgcatgagtgaggcagagtgggtgataaagggggaagatggtgtcagttttggacatgttgagtgttgtcagatgcctgtagaatactgtagtaagaaaagtccagtggctagctagacacataggtctggcattcaaaagaaaagtctcaatttgtcatagagattgcatgttggtttttcattaatgttgagtttttagagagttggtgtcatatctaataccctttttttttgtttccacagcacattgtacagggtaagccttagggttgcatacaattcccaaaacctaactttttttttgttctaattactaggatggggtccaataatgtagaagaaataaagactctccatcaattgatgccagtttatttcttttccaatccagttattgatacatagacctgaattggtggggcaatacaaagcttaaattaaattagaatcagcctgaagaatagtagtaaagaatgatgtcacctgcattttatggtttgacagatattaggcaggtgtatttccagaatttcttccttaattttttttttgtcatatcatctgaaatttcatcattgtcatcattcctttggaacatcaggagtttttcagttttaaggagttgcctgataaatgacctcatgaagggtaattgtgtagaagttatcagatagtgttaataaaattttttaatgaattggagcttttgagatatctagggaaaggataattgagacaggatgagagtatggctggttttgttctatttgttcacttcttattgacatttccttgagattaatgattttattactggcaatttgaggccccagaagaaaattctttcccattaaattgcatttctttcccccaaaagtcactgctctttcagaagacattattaacaattctagatattccaaaaataaatttaggtatcactgcagttgttaataacagataaataacattttgctatgttacaaggaagatggaagtgtgtgaaatgaaccataaaaagtaagatttgttgaaattcagttttattctcttatatctgcacacaaacacattgaaggactattataattagggtaagactagctgctgtaacaaataaatccccaacttttagtggcttaatacaatagaagcacatttcttgctcatgtaacagtccaaggcaaacgatcctggctggcatatggcattttcccacacagttattcagcagctttgctatccccttgggccttgtccagctggtagaaagaaagagaaattgtggagaagtcacagttgtttcttaaatcacggcatggaagtgacacacattacttctgtctgcattccattggtgagaaccagggacataggccatactgagatgcaagaaattctgggaagtatgttcctaattggacagctatttcccagtaagaaagctgtacaatgcaaggaggagcacagaattttgtggatagctagttgcattggctacagggactatacacagatatgggcaaaatacaaaggtcacacataaaaattgctcattattttatggccacacttcaaatatatgagcatgtctatacagaaggaaagaaaatacttttgtttgatactttgcattcattttggatgttatgtggttgctgagatctttttaatgctagcaagaatgttggattccttattcatttgtatgaaaaactgagactttctttccttatttttaaggttggacgaaatttgcccgattgacacgggctttgacaaatagccgaagtgttttgcagcagctcacgccaatgaataaaacagaggtggtccataaacattcaagactagctgaagtaagtatgagatgaattttgcttcccaagatggtggtgttggtacatttttcttccctaaaatgatttaatatagatatttctggctatgatcttataaatacttagctgataatttatgtttcccttgtagaaatatagaaatcccaaatatttctattcattctctccaacttttgaaatgggagtgtagctcatgacatcccaggtcatgtctgtagagtgtaaggttttctttgagcatatcagatagggagttctttcattgcttcatgcatatatgcagcaaacacatattcagggtatgctctgtgcttggcactctgcaaaggatgtaaagttaaataagaaatgggccctgtcatcaaggagttaaatatccagcagaggaaactgatcataagatgtgaaaagatgcaatgacagggtgctgtgggagcctgtgcaggagaatttgcccaaatgtggggccctagggaaggctgtgtgagtgagatgatacctgggctgagtgaattctgaagggaaaatgtgagagctagtcaggtaaagaagggatatagtttattcctaccagggaggccagcatgtacaaagggtcagagatgaggtagtatggtgacgttgagtatgactttactgtagttgaactcatatggggaaggagaaggtagggtggcatatagtgaaatggtggtggttggtgtctcatgtgccaggaaaatgacctttgtgcctcagaaaaacctctcaaagggaggtgggtcctaattggtttcttttgcaatttcatgtttttattgtgttaattcaaaaactttattctaagaagaggtccatagtttttaccagattgccatagggatccaaggcacaaaatgattaaaaactcctgcttggcctagtggctctgtggagaatggggaggtagggaaaccagtgaggaagtcctagcagtaagtaagttagcatgaccacggttgtcagcaggatagtggtagcagaagtgggtggattgcagacacattaagattagagtgaacacatttgttaatacattagaatagtgtgtgaaacaaggggttgagtccaggacaattctatgtttttgatttagatgacagggtagatagttctgttggttaataaaatgacgaatgtaagatgaaggaaagaagatttgaggacaatgatcatgagttcagtttggggcatacaaagtttgaagagccccataggaagccctagtggagatgcctgaacagcagggagatttatgggtctggcactctggaaggatatttgagtttgaattgtaggcttcagtgtcatcttcacagttatggctgttcaagtcatgtgactagacgatgttaccctgagactaaggagaaaaaaaatgaggacagaactctgaggcagctaatagctttattgttcacatgtcttctataaccataatttgtattactggtatgaaagatgccaaaaagctcattaagctaccaaaactatgctgagcactacgtttgcactcacaaaatattctcaggtaacttttaccaaaaaagagaaagataaaatccatacgcttatcagttttctctgctgcagaaaagtgagtcgaagcacttcagagtaattttcttaacttgtcgtaaatattgaatctggtttggaggggattaggaagtaaagtatgttccctgaatttagaagactatggagtttttcttagaccatggctaacaaaaagacttttggttttctgctctaaatagcactgttagcttggggaaagatgaatcctttgatgtgcagacatgtttctgaagaccaaaataagacattaatataactaaatattaactagtaataataatcacaatatttaaaagataatatgcaattagtacaagatttaaagcagacaatgagatacaactttcttttgcaaaaatgcttagattttggagctagttcctcttctgcctaaagttgcctgtttctttctgcaaatcaagctgaaatgtaggaggttgtttctgtgattgtgaatttttatagtcatgattcctttggggtcttaaccacacctgattcaggatttttcttttgtctgttacacaacagagcgacaacaagtgaaagggggccatagagaagacaatcttctcccttagcacccagaatcactcagaattgttttttcactgtatcaacggaaaagaaagaaactttccccttgacattttctcatttttatttttgagaaacgtattcctatttcatcccatctgttttttttttctttgctctgtgattagtgttagtttctttaccagtcatcccttattcataaacctggttctgatataaaactgctttctgtcagatcttagggtcgatttcagagagcatacagaaataacaagattgtcgatagacatttagtctgaatacctgcagcgcatgctcttagatctccaaagatagacataaaagaaataccaaataagtataacaatgttgtttttccagtggtactcaaaactcttgtaatttgctcaatgcaagtatttggtttagctatggaatttgaggtgcttttactttttcaaagacagataaatttgatctcaattctacctgatcccccaaatttggagctgatccccagtttcaaagattccagtctccataaaggtagttaattaattttctgcgtgcattgacaccctgctgattgcctttagcttgttcacttttatgttgggtagagataaatatatacgccctgccacatcagtcagtgggcctgactttgttagagtcaatgctctcagatcttcagagaggaagaatgtgtctgtattggtacaaaaatacatcaaaaaatgtgatttcatcctccttccaccaaaggcttattgcttatagaagcacaaatgacataacaatgaaaatgaagagtctgttactgttttatgaaagagcccaggaacagagtgaagattagtagtgctttgcatatgaaaaagatgaagcttattttttgtgcactgttttttgttgttgccattttcctcttcttcctcctccttgtcctcctctaccctttcctcctcctttttgtccccatcttgcatttttttggagggctttacatatgcaaatcactgtctagagaattgggtcctgaatgtctaaagaaatgtaagacagatatcttaccttgggctgtacattgtaatcacctgggaaggttttgaaaatatagattctctgagaacccaaacaagaccaatttaatcattctccagggtggagtctaggtataagtatactgtattcttttaaaacttccccagatgattctaatatatagccaggtttaagactttctgaactcagggtgatgccattccatctttagaggagacctgcattaatccaggctactgagcagggcttacatctgtcagcacagtaggcacagtgtccagggccccacaacacttttacgggtctataggatgtttcaatttctattaacagcagaagaaaacagggtaattttaggtaaaaacaaaaactgaatgtgtgatattaatatatttatctgttataatatacacacacacacacatatgtatatatatgtatatatacatacacacttttttttttttttgagactgagtctcgctctgtcacccaggctggagtgcagtgagtggtgtgatctcagctcactggaacctctgcctcccaggttcaagtgattctcctgcctcagcctccagagaagctgggactgcaggcacgtgccaacaagcccggctaatttttgtatttttagtaggacggggtttcaccatgaaggagtctaggaaggcacaaaggcttagggtccacgaaggtggtaatgcaccctggtactgagtttgttcttatttcccaagtttgatttatttgtggttaaacatagactgtgtatatatagatggtaaactactaacattgaatatgaaggcaattttcatgtttaacacaatgaaattggaattgacaggccagtagttgaaaagcaaaagaaaagacatgattatgtacaattgtataatacttcaccccaacatgaatcttacctcctggtaggatgatttgctgttaagtaatttaagacatcatgggaaaaacataactgaggtactgataatggcaaatacataaaatatctttataagtattcttacaaacaccaaaataaaaataacaattctaacatacaattaaagggaccaccagtgatgttttccatatcaaaaatagtaaaaatggatattatattcttagttttcagatatgtaagttctgtatatgagaggaactttaggatactctcccaagctgccaaagatgctagtatatttgttttgttttgtggcatatattataactcagagttacatgctaacaagtatttttatttttatccattcttacatctaaatatttaatgcatttatgattttatgatttggcctttttgactcctaccttctgggtcccattagtcctagagacactgaataactgaatacatacaatgggcaaatctgttgaaaatatttaaaaatttccatttaccaaactctttaacacatacattgtctttggcttcattgatggcacagggcagaagtttttgatttatcccttcaactgtctttttttttttgagacggagtctcgctctgtcgccaggctggagtgcagtggcacaatctcagtttactgcaacctctgcctcctgcattcaagtggttctcctgcctctgcttcctgagtagttgggattataggcacgcaccaccacgcccatctaatatttgtatttttagtagagacagcgtttcaccatgttggccaggatggtctcgatctcctgacctcgtgatctcgcctcaactgttttttataattcccaggttccaggttccagaaggcaatgctatgtcctgtgttggttacctttgcccagggatacacaaacctctactcttgctctgtcatctgctttttatctttgttttctgctgtaattagacttaattagtgtaactcaaggttcatataaacttacactaaaatttttccatttgaattggtatacagaaacaaacttgagtatttaatatttttttccctaaaggaaatttgcagttgggcaagaaacacaatattctttaagtccagatctaagggaggaagggaaaaagcaggcgataccctttacaaccctttacactgctgtgccacccatcagggcccttgctgagtatcactcaacaacagcatcaccaacagtgggatgccggggtccagcgaggccatcagaatcaaagttatgcttcctgaggtgctaaatgtgtatgaagaatagataatggtgtctcacccaaataactgctggacagtccatgagagccatgtgattctaggcaggcttgcagagtgagtgtgcaggaggcacttgcagaagtggacatccagcagtgttgtggatcagtgttggctactgcatcagagcatgccagatagaacagcagaaagatcagctttggtagagtgattggacttggagtgacttcctctgaacaaattttaggacaactcaggagaagagggaggcaagactgtggagcatgactggctgtggtttgactgccagtagatttgaattcatcactgactgtgcagagataacctagtcatgtataaatacattttctctcttttaggttcttcagctgggatcagatatccttcctcagtataaacaagaagcgccaaagacgccaccacacattattttacattattgtgcttttaaaactacttgggattgggtgattttaattcttaccttctacaccgccattatggttccttataatgtttccttcaaaacaaagcagaacaacatagcctggctggtactggatagtgtggtggacgttatttttctggttgacatcgttttaaattttcacacgactttcgtggggcccggtggagaggtcatttctgaccctaagctcataaggatgaactatctgaaaacttggtttgtgatcgatctgctgtcttgtttaccttatgacatcatcaatgcctttgaaaatgtggatgaggtaagtttttcgttttggttttctgagtactgtgggtcatatattttgaaaacatcaggataaatggattccacagataatccaaacctctttttagccaccactttcaactttcttgaaacccttgccaaaagttattatatttgattaccttaaattagttttcatctgtttcttctccttgatatctggttgaaagtactaattactgggaattggagtttgtggatggaagaagtggaggagaagaaaagcggcggcatttgaagtcaactacagttcacaaactacataattgattgaaagaagatattagattggtgcaaaagtaattgtggttttcacaattacttttaatggcaaaaaccacatttacttttataacaacctaataaatagatgtattttctttgaaaagctgcagcatttgaaaactactcattcacagatcttttgactcctcctctcaagacacatatgataacaatggtagagttaacataaagataaagaaacttttatgaaacagcaattcttgaatttttgccactttggtttcttcctcatagcttttgctttacattttgtctgaatatatttgtggatattggatgacgtattagtccattttcacactgctataaagatacaacctgagactgggtaatttataaacagaagagatttaattgactcacagttccacatggctggagaggcctcaggaaacttacaatcctggtggaaacaagcaaggaccttcttcacatggcggcaggagagaaaaaggagcacaggggaaactgccacttttaaaacccccagatcgcatgagatctccctcactgtcacgggaacagcatggggaaaactgcccccataatctaatcacctctcaccaggtccctctcttgacatgtggggattaccatttgagatgagatttgggtggggacacagagccaaaccatatcagatgacttctgatgtcttgtctcatgtaaggctctgcttcttcagtgttatcagtgcacctagaagtacttaaaatatgtagaagcttaaaagaccacttcatccacagcttctcaggctctaacttaatagtggatgatatttaagttgttacaccaagctaataggatacaaccagtaatttcaattcataatatatagaagagtcaatatagaatatgtctattattaaaatatgttcattatgataatattactaacttaattatcctaagatgttcctatagattctagtctgtagactgctcagatggaaaattctttactctgttgttattattattataatacattgtaatatattatttctctatgtgtgttgggagatagattgaaacttttcttcagtgactttttctataaaatatttacgttcaaccaactataataatataaatattatttcccccaaatttaagtgtagacattgtattttgatattgtgtatgtaattattactttataaattatgagaaaaaaatcataataattcattttccaagttttgagtccacctacatcaagcttttaaagattttttttttcaaatttatcttctgaagtgagttaaaggagttaattttgaaaatacaaatcacatgataggggacaataagcagtatttatgttttgcacactacacagattattacattaatacattgagattttagttatttagagtataggcctaaagattttaataaaggcaatcactcatgtggaatctagaaaagttcatctcatatagagtagaataatggttaccaaggggtggggtgaatggagagatggtggaagaatacaaaacttcagttagatggaactaaattcaagaaatctattatacaatatggtgactatagttaacaatgtactacattctggaaaaatgctgagaaagtgggtgtaaagtgttctcaccacaaaaatgataactgtgaagaaacacatacgttaactagctagatttagtcattccacaatgcatacatactttaaaacgtcatgttgtacatagtaaatacatgcaattatttctgtcaattaaaaataatcaaaagattggcttgattagtattacagtaaatatattgtttaataatacatttataactatgtaatacttttatttatacatttataattatgtaatatatattaaaagattctctcaacttagctcatattcaagaaatgcaaagtaaatccacactaaatacaattttctttcttttttttttttttttgagacggagtctcactctgtcgctcaagcaggagtgcaggggctctgtctcggctcactgcaagctccgcctcccgggttcacgccattctccggcctcagcttcccaagtagctgggactactggtgcccgccacactaaatacaattttcatttatcacgctgcaaagaccgaaactacgttagaacactaggctgttgagtgtagtagctaagtaggcacaccgctcaaatctcctttcatcaacacgtgctgtgtggagtacggtcagcggcaccctgggtccagctcctggctttagaaagcctattgttaccatctcttctcgactcagcatttggtgatctcacagtggtagcttgaaattagccacagtgggcgtatttacactacagaaagtagcaaaagctacaaatcaaggcctttttaaaaaactttctgtagagctagttgttaatcattttccaacacatcactgaacacagttaactgaaggctgctgccttttctgatctcctgcagctcacatgttgaagctgggctcacacatttccccagggctcttccccgtcagtgtctgagtatggtgggaatactataacttgtccataactgcaacttttgctctgggactatccatttactgtgtaaaagtgtaagctttttcttcctacctgagtcttccttccctctttcacaggtgttagaactgcattgtagtccaaaggctcttcgtgttcccctcctccccattttgtccttcccaggcatttacctcagtaaaattcttgcgtaaataaccctggcttggcatctactccttacaggacctcaattgatcaagtgggatgtggcatatcactctcatacactgctcaggggagaatgaattggtaaaatctctataaagaacagttggcaatgtttcattttaaaaaagagaagaccctagaggcaaccattttcaaattttttcaggggattcttttattatttgcttccatgtcaccaaacaacacgattacatatctacctcttggtttgtcaattttaggttttgtctttgacttctcaacatgaaaggtgagattttagctcccctttctactttcgctcactatttaaatgcaccattttcatcacctcattctcacaatatatcatccttttgattcaataaatattaagtgttgatattattattattgttattattattatttttggtgacagagtcttgctctgtcacccaggcgagagtgcagtggtgtgatcactgcaacctctgcctcccaggttcaagcgattctcctgcctcaacttccccagcagctgggactagaggcgcgcaccaccacactcggctaattttttttaaatttttttagtatttcaccatgatggccagtctggtcttgaactcctgacctcaagtgatccgcccatctcagcctcccaaagtgttgggattacaggcgtgagcaactgggcctggccaagtgttgatattgttatgactgcaaatatgcattttatagctgatccttgcagcatgctgtaattacttttctttttctgcactttccatttttctgggagctgataactgtctgattttatgttttctatgttcttatcactaattcaaccacaaagttctctgacaattatctaaatctcccttcattacattgatgcaagaagtattctatcgatatcattttcttaaacaaacctctctttactctttcacctgattgatagttaagctagctataatattcttggctagagataattttccttcagaattttgaaagatacaatgccattgtactcctccagtaattctgataagaaacttgaagtcattacgatttctgttcctttacatgtgacctattttctctttctggaagtttcatacaccttctctgtcctaaggttctgtaactttctgaagatatgcttttgtgcagatctattttcatcagttttgatgggtgttaactaggtggtccttttcagcctggaaaagcatgactactgtcttgatattttttcctattatgattttctccagccctctgaccttttctaaattttctttctttctggaactccttttattcagatactgtacctatgagaccagtcctgtaattttttttttttttttttttgacatggagtctcgctctgtcacccaggctggagtgcagtggcgtgatctcggctcactgcaagctctgcttcctgggttcacgccattctcctgccacagcctcctgagtagctgggactacaggcgctgccaccatgcctggctaattttatttttgtatttttagtagagacagggtttcaccatgttagccaggatggtctcgatctcttgacctcatgatccacccgtcttggcctcccaaagtgctgggattacaggcgtgagccactgcacctggccaatttccttttttttttttttaaatctcctattttctaatcctttatctttttgctacactttctgggagatttcttccacgttattttctaactctctttgtccctaataatgcttttcttgcttaaggtctagtttgcttaatactattatagctaaatttgcttttgtatggttggtgtgtatttgatccgtatatttctggatatatattttatgagtagtgtatagattctgaaagtctctttaacaggcaagtttaatctgtttacattgattgtgattaattacgttttgatttacttagtacatcttattttctatttttaaatgccttttcttacctttgtgttttggtgttttctttttccttttgtttttccaggttttggattgattgaactttcctttaatctcttggattcctcctactggtttggaattttttctgttaatcgattactcttacatttttaacatcagtgtttgacttaacagattccagaagcttctaagtatctttacctttcttcatttgattcaaggacttctgttccccttcatctttcaaattattattgtcttttattttggatctacattatttttaattttttccttttaatatgtgattgttttattaatatttaattgtcaattcttatttagatttatccacacgtttatcggcttcttcattcatactattttatgcattctttgccttttttctgggtcagttcctatagattggctctttattaccccttattataacattcacctttctggaacatatttctttcaggaagcctgcctgcatcattcccaagcagctttaattaatatcttcaccatatttcatgttcacttatgtatatgtatgcgccttaatatagttaaaaatatttttttcttttgttgatttgtgtgtgttcataagcactatatcagctgttggatgttctggagtcttgtgccttgtctaggacatgtttgttttgagactttgagagggttactctggttctcagtttccatgatgtaaaacaaggaaaggagtgtatagctaaattacttatatcacaaggtgattataaggaataaatgggaaaagggatactaatatattttgcttgtagaattctgcaaatctggtggggtattattatttcatttgtatgtgtttgtttcctcagctggattataaatcctgtgatggtgaagaatgtgtcttccatctccttggtatttcttcattgctcttaaggcatactggtgacttattgacctgaagcagtaaaatgttagcaaggttttagtaaattgcacaatgacataaaaataaaatagaacttagacctgaagaggaagtacattaatggtgacttgggaataagaaagaatatgagtctgaaaattacgatataatccttttacatgatgtaagtgcagaatgacttagaagacttaataacgttctttattttcaagattgtcgacacgctctctgaaggtagtttggtttactaggaattcatgaactgaatatgtgattctttaagaaaattgtgaggcagaaaagacagattccattaaagaaggcattctgtttgaaaagaaggaacataaattttctaaaagctgtaaacagagggtaaaagaatgttgtcactaagaatccaaagaataggattgagcttctttgtagtatgcatttgaatacagctttgggaggttcagggagcttgattttggggagattagagggagttgagccatagaacatcatcaaagatggagcagctgcagataacacgctgtttggtagcataggaggattcaggaaatatgaaacatggggaattttgatgataatgagtagtcttaataagtgataaacataaaaactaggtcaaaaatgaaattgggaaaagataactcatgcattgctttaggagaaagaatgaatagaacaatgactgctaagtggaagtatataaatacttttaattttcagaaaagtttatggaagataattttctaaattattgttttgtcatgaattatgcttgtcaagctgccacatgcatcatttcactttatcctgtataattacgttaataatttttatttctgatctagtcattaaaacaagaacaggaaatcaggaaggctaattatgcttctagacttcagtaacttctgtcagcttagaatcctctttttcccttttgcttgccatctcagaccttctacaaagaataacatgttagaaattgttatttaatatagttggcttgccattaccttttcattaaagtgtatagataatttaaaataatacttcagtggtataactaggatatacctaatttttctgtttgttttcctagttttaatcttattaaatccatataaatactgcctgtctaagtttgttatgtgctgccatagcaaaataccacaggttgggtcatttatgaagaacaggaacttatttctcacagctctggagactaggaagtccaaggcactggcatgtggtgtcctgtgggggctgtcctcacatggtggaaggcagaagagcaaacaagacaaatgtgtcttcatgtagcagaagacagcacaccgcttctgcaagccctttttatagcagcattaatccatgcatgagggcagatccctcatgacctaaatacattctatttgtcttcatctcccaacattattgcattgaggattaagttttaacatatatatttgaggggacaaaccaatcaaaccatagcgctacccaatccttcttggaattagttgatttttcttttcactgtgattcacagctgatgatagcatgccaacattaagtcctaagcaatctgcttttaaatctaactttgtaaagagtgtgagcctttttaaaaatagactttaatttttaagaccgcttttaggtttgtagcaaaattgaggaggtgcagagatttcccatgtactgtaccctttgctcccaaacatgcatagattctcccactatggaaatcccacaccagagtggtacatctgttacaattgatgaacctacttgaatacatcattatcacccaaagttgatcgtttctagtggctttcactcttgattttgtacatttaatgggtttggacagaagtatgatgacaagtatcctccattacagcatcacacagattagttttactgtcttaaaatttttttcatgctctgcttattcttttctccttctctgcttatccgtggcaaccactgatcctttgtgtctccatagttttgccttctctaagtgtcatatagttagaatcagatagtttgtagctttttcatattggcttctttctcttagtaataggcatttaaggttcctctgtgttttttcaaggcttgatagctcattttttttttctgtgctgaataacatatcattgtctggatgtatcacagtttatttattcattcacctactgaagaacatcttggatgcttccaagttttgcaaaattatgaataaagctgctataaacattcatgtgcaggtttatatgtggacataagttttaaacatatttgggtaaataccaagaaacatgattgctgaatcatatggtaagactatgtttacttttgtaagaaactttcaaactgtctgttttccaaagtggcagcaccattatgtattcccatcagcgatgaatgagaatttctgttgttccacatccttgccaacacttggcggtgttagtattttggagtttgactattctaacaggtgtgtagtggtatctgtttaaatgtatctcttttgatgttttaaaattttcaattgacaaatggcatatattgctgaacaccttttcatatgcttaattctcataggaatatcttctttggtaagatgtgtgttcagatcttttgtgcatttttttaattgttgttttaagagttctttttagtttttagatgatagtactttattagatgtcttttgcaaatattttctctcagtttgtggcttgtcttctcattcttttgactgtgacttttgcagagcagaattttacattttaatgaagtccagcttatcaattattactttcatggattgtgcctttggtgttgtatctataaagtcattgtcatactcaaggtcatctagattttctcctgtgttgtcttccataagttttatagttttgcattttttattttatatgattcattctgagttaaattttgtgaagggtgtagggtctgtgactagattcacttttttttttaatttggctatccagttgtttcatcactattttttgaaaagactatgtttgttccattgcattgcctttttgcctttgtctaagatttatgcctatatttatgtgggtctattcctggattcactattctgatcagttaatctattgtctattttttctccaataccatactctctttattgctatacttttatagttagtcttaaagtcatatagcatcagtcttctgacttggttcttcaacttccatattgtagtggctattttgaattttttgcctgtctatataagctttagaatcagtctacttgtatcaacaaaataacctgctaggttcttaattggatttttgttgtctctagttcattttgagaagaactgacatcttgacaatattgagtcttactatccatgaacatgaaatatctcttcatttatttagttcttctttgatatatttcatcagttttgtagttttcctcatagatcatgtgcacattttattagatttatatttaagtattttggggagggctaaagtaaatggcattatggttttttatttcaaattccacttgtgccttgctggtatacagaaaagcaattgccttttgtgtattaaccttgtaacctggaaccttgctataattacttatgagtttcatggtttttggtcaatttattcatattttctacatagataatcatctcatctcatggataatcatctgtgaacaatgacatttttatttcttccttcccagtaagtataccttttcttgttttattgcattagctagaatttccatgatgagtttgaaaagaagtgatgagagggaacatctttgcctcgttcctgatcttaataggaaagcttctagtttttcattcttgagtatgatgttagttgtagggttttttttttcttttttttggtagatgttctttatcatgttgaagaatttcctctctacttgtagtttgttgagagtattttatcatgaatcgatgttggagttgttaaatgatttatctacatccattgatatgatcatgccattttcctttagcttgttgatgttatggattacattaactgactctcaaatgttgcaccagctttgcatacctagaaccaaatccagttggtcacagtgtatactttttaaaatacattgttagattaaatttttttaaatcaaatattaacaaaacattttgttgagaatttttacatctatgttcatgagagatattagtttgtacttttcttgtaatgtctttgtctggttttggtattggggtaatgctggtctcataaaatgcacaagaaagtattctttctgcctctaccttctggaaaacattggaggaaattggtataatttattccttaaatgtttgataaatttcacttgtgaacctatctgggcctaatgctttgtgttttagaaggttattaattattgatgcaatttctttaatagatgtagttctattcagattattttttttcttgtgtgggtcttagcagatgtgtctttcaaggatttgatttatttcattatcagatttatcaaatctgtgggcagagttgttcatagcatttcttaattatccctttagtattcatggaatttgtagtagtgtcccctcttttatttctaatattagtaatttgtatcttctctctctcttgtttcgttagcctgactagaggcttattgatttaatttttttttttttttttttttttttttagacggagtctcactctgtcacccagtcacccaagctggagtgcagtggcgcagtctcagctcactgcaacctctgcctcccagcctcaagtgattctcatgctacaggcgcatgccaccacgcctggctaattttttgtatcttgatagagacagggtttcaccgcgttgcccagggtggtctcgagttcctgagatcaggtgatctgcctgcctcagcctcccaaagtgctgggattccaggcatgagccactgcgcccagccaaaaaaaaaaaaaaaaaaaaaattaattttattttaagttctgggatacacgtgcaggacaggcaggtctgttacagaggtaaacctgtgtcatggtggtttgctgcaccaatcaatccatcacctaggtattaagccctgcatgcgttaactgttcttcttgatgctctccctccccgtccctggcagccccccatcaggccccagtgtgtgttattcccctccctgtgtccacatgctctcattattcagctccgacttatgagtaagaacatgtggtgtttggttttctgatttttaaaatcttttcaaagaattagcttttggctttgttgatttttaaaaatttatgtcctattttcaatttcatttatttctgctttaatttttatgatggcttttctttgacttactttggatttctggtttgcaaaggtgaaagtatagattattgattttagatttttcttcttttccagcatatgtattcaaagctgtaaatttccctgtaagcactgattttgtgatctcctatcctacgcattgttaaattgtattttcattttcgtatagttcaaattattttaaatttcttttgagatttcttctttgactcgtgttatttaaaagtgtgttatttaatctccaagtgtttgggtatttttcagatattgttctgttattgatttctaatttaattccattgtgacctgaaagcagacattgtatgatttctattcttttaatacatatagtgattctaataacaatttgaaaatcatttatatttatattggatttatatttatattgagtattggattactcgtctttcatctataggctcagagaaggtgtgttggtgaccctatttggcatcctttaattgtacttcaggtaaataattcaaatccagcaaagatctttagagagctaatggttaggtattatgcttgtttctggaagaatctccaaagcagacactctgtctctctaactcatcttggatttgtatacctaccaagatgcctgacatctaattgccagcctacaaatatttctattgaagtgaatgaggcataccacatttcctaactatacatgctttttgttaataatgggaaagataaggccagagggaaacctttgtgacataatcttagctgtgctctaaactctttcttctcacagactatagggcatatcctttgaccactatgttcacatttcctctcatgagttgctttccatgagtattcttttgctgtcatgtaaataatcctccagtcagatgacctaccctaccagctttccatacatgtttaaggattaccctagggttaagcctccaagctgtgatctcccactgggagtgcaaagtattgtggacaaataaatacaaataaatacaaagatgaacaagacacagtctctgaacagatatctactttctactttgagggaaagactttctcacaaactatttgcaggtgtaaataaaagaggggtcagggtgaaggaagagatagggaaaaaatttggagaaagggtaagagtcagcctcaagttccaaattggagcatgatggctgtcatctaagcttttaaattctattcctggtgggcattggtagagaatgttatcatggttgggtaatacacagctttaaagatagacttccttagatttgaaaagtttggtgatgttgcaggaacattcttttgcatgaatttccaatgagacaaagcagtctgtctaactgagggaattagctttgagaggaaaggaaataacaagcaatgaggatagcattgagcttcctttatttgattttcttgtttacataaaaatttttttatctgtactgatcttcattcatgataaattgttcctattgttaagcatcaggggatgattctaacatagaggcaaagaaggttgaaatatattggaatttgtatgttacagctaactcttaaacagtttttaccttaactacttatgaatacttgcatagaggttactgtttattgtctttctgtgcaataattatccccatgcttgagaaatcatagttttgttactctgcttttggggaagctccagtggagttcatccctacttcatttagcctttttaatacttcattttattccctaatgtccctgctttcacacaacacacactaacttataaagaatatgtttgtctttgtattgaatttcttcatctttaagaagtgttgtttatatttaggtaaagggttaacaaaattattttttcttctgcttgagaatttgacctttggctagcagtcttcctttgcttccctgggaactgatgaagggaacatgtcatttatgtttctaggcaatattacttatgtttagaaaaaaagggctgggcatggtggctaatgcctgtaatctcagcactcagggaggcagaggaaggaggattgcttgagcccaggagtttgaggatagcctgggcaacatactaggaccccatctccacaaaaaggaaaaaaaaattccctcatcagtaaattgcatctagactgtgaggaacttttaataaactataaataacttgataaggacaccatagcttatgggttccttgaatgatggagctttcagagttccatcagatatgagcatatctcttgtgggactctgaaactgcctgtggcattgttattagaagtattagattaggtagagcatgaggctgtcaaaagctacatccccaaacattaccaacacaacctgttaaaaagacaaagctgagttgaatttattgcttaccacggtaaaagggaacactgccatgcaaagctctagtagtgtactcagagcaggaaagaaaaggacagaatggattaagaatcgaaagtttgatataaggtaggtttttaaaaacagggagtggctaggggagtgggctttattagaactgggtaaagttcaagaatatgatacaatagcacaggattggaggaaacagcaaggcaaggattttgaaggaaagaattcaaagaatcttaggacataaactgtctgcagatacttttcactaaagagttaataggtctttgcaaagttcgtgtaataaaaaaatcaaaccatttatctgagcaggagagtcctggagaaagaaggtcctgctaagggagacagaacaatagtccaaagtcgtgttaatgtagacagtaagatagagttttagttttcagtgtccagaatgagtgagagtagtggtgatggtgagattagactatttctcaaggcttttaagtcaagatggctccagtacttgctgactgagtcttattttctcacttttaagttgtcttcttggggagactggggacagggagcatagctctttggactgctacacaaactactatgaggtctatgcccatggaagaggatgctaatactgcccttttgatgagcagtgatttctattctgtgcccttctgagtctactgataaataagcatgatcgatgatagtagtgtttgaatgtttagttgatcagtattgcagatacaaatacagagtttatgatcaaatgcccagtgtgcactttcagaagatgctagtttccattgtcatttgtttgtttttgggtaattgtgtcaggaaaaatcagtcatcttcagttacattcacatttatacacaggattacactgagttgtgaatggccttactcaaaaacttttacagatgttgcaattgtcctggtcacagtaaattaagaggtctatatcatggaaaccagtgcaaaaattattttaccatagattacagatttttagatttgctcaattttatgttcaatatgatgctactggaattttagaatcacttcttcttgtcttcaatattgaaatctaacaagttttaaaaaagaacatctatttaatgacatcttacctatgatggcaaagaaagtaattatttttaggaaatacacagtatccatgtacagaagcctgccagtacatatggtaaacatatcactaggactgatcactagatcaattgttaaatttctgctctttagtgttatgaatgactgtgtatttggtttgacttctgaggtgtggtggtacattgagaaatatacagggatggctctcttagtccattatgtgtagctataacagaatgcctgaggctgggtaatttataaagaaaagaagcctatttagctcacagctctgcaggttaggaagttcaagagcatggccctggattctgatgagggttttcatgctgcatcataaccttgtggagaaagtcaaaggacaagcagacatatgaggagagacaaaacccaaacagtgtcctggctctagaaaaatctaccattgcaggaacttatccattcctttaagaatgaatccagtcttgccagagtgagaactcacccactaccatgagaatggtatgaagacgttcataagagattcactcccatgactcaaacacctcccactaggccccatgttccaacactaccacattggggatcaaatctcaacttgagttttggtgggacaaaccacatgcaaactacagcaacgacataagaaggatttattcttctctgaatgtcatcctttaaatgaaaaaaacaaatcccttacttgattttatgcatctattcacctctctctctctatatatatattgaggtactcctttattataagtattggggaatctggcagtgaacaagcacacaaatccttccctatcttcataaaactgttaaagagaaattgcaccagacatttgttgaaaacaaagactttattcaagaccgttgcaatagtagagagagatttttgcactaggggagagggattggactcaactttgttgaaacaagtgtagagatgttggtcaatatgattaggtcatctaatcatttgataattggtgcttatcaaagtttgacatctaccctcctacagacattaggaaatagaggcactatctttcttgatgattatattccaaaggaatagcccacaagtctttgagaaagacattcctgggttataaaattggcaagaggctgggagattttcctctgaaagaggcagagaaagaatttacgatagaaagtttcttaaataaatgttctaagaaaagggaagtcaggatcctagacttaggaagaagccaagttaaggtcatcttggtcagagttaatattctggtgggggaaaaacagacagtaagtatatgtggacagtttaaattgtgtgtgtgtgtgtgtctgtgagtataatttcagctagtgatatgctctacaaataaaaataatacaggggcaataggatatagataatgactggggtgatgaggaggtgaacatgttggaaagcatgtaatgggctaaatgccgctgttaggttaggatttctttttagttgcaaaggaaagagattcaagtgacctcaagtgatggaagatttagtataaggatggatatttttcagcacatagcacaaataacagtggtaccttagaacctaatgtatggccctagaccaagattgctctggggaacttggcccaaggcagagccaatttctaatattagggaagtgagcctgaaaaaaggaaggagctgagccaaagtatagggaagtgaggaaaaagaaaatggagctactctttgaactccttcttcatgtatctcacagtctttcattgacattgttttctccagtatcattttcttatagccttaacattccatatgatcacatatggtcattaaaattgttgaaaaaagggatattttagaaaattattttggaggacatgactgcttactgttctagctattttcttagggtttgtagatctttagttgagtttcccaccactaatgtgactcactgactctgtctgtatgcttttctctcttgactgaatttcttagcatgcttgttaatttcatctcaacttaactggaccttggggtattcagattacacattgttactgggtgtatctgtttcttgctgagaatagcacttggatcagtacattcagtaaagcagattgttctccccaatgtggatgggcattatccaatctgttgagggcctgaatagaaaaagagatggaagaaggaggaattctctccttttttctgccttactacttgatctggaacatctcatctcgtcttgcttttggactggaatttacaccattggcctggttcttaggtctttggacttgaattgcaatatcggctttcttgggtctcctggttgcagatggcagactgtggaacttctctgcctccataatcatttgagcccattcctcacaatacatctctctctcttcctaaatatcaacatctatatacagttattcccttttacccatgggtatgcattccaagacccccagtggaggcctgaaaccacagatggtactgaaccctatatatactatgctttctcctatacagacgtacctatgataaagtttaatttataaattaggcacagtaagaaataaacaatataacaacatagaagaattactataatgtactgtaataaaagttatgtgaatgtgtttgctctcttccaaaacatctcattgttactatactcaccctttttcttacgatgatgtgagatgaaaaaatgcctacatgatgagatgaagtagggtgaatgatgtaggcattgtgacctagctttaggctactattgaccttctgataatatatcagaaaatgattacattcttcaggtgatcctggatcatcaagccatgaacattaatggttgaatgtcaggagcaggagcagataatgtcaatattagggatccttgatagttgaaggttattttttgctgaaacctttgggaagaacactgtagttggaaattattgtctcttttaaactcattaaaatgttgctatagaaattgtattccttcattgatcatataggagactttagtgctttgtttcatctgtggatcatattccataattctgtccattattgtctgtacaatttgaaacacttcagcaactttccatagtatccacattgctagttctgcttcacttcttcttcctctgtaggtgactcaacaagttcttctagtttctcatttgttagcacttctgatgaccttcaatatgttcttccacttcatcaagtatgttggcatattcttcttcactaacttgtcttgctgtgtgaattattttcttagcttctccattgatccccaggaagcctttaaaatcattcatgacttcaatccataagttcttccagcaggtatttgcaatttctggttttaattaatccattgcagttttgatgaacgctgttgcatcagagatagtgaatgatttccagcatttttttatatctggattagggtctgcattaattgctgatcaaatgcaatcaaatatcaggcaggtgcgtgtggcactgataaaccaaatgatgtcctggtcaaagggctgaaacaaggaggttgtatttgaaggtaaaaatacaacctcaacattttcattttcatagaagattcaggatggctgggtgccttctcatctccatctccatcttcatctccatccctgtccctgtatccatctccatctgcacgtccatctccatctccatttccatctctatctgctctccatctccgtctccatctgcatctgcatctgcatctccatctccatctgcatctccatctgcatctgcatctctatctgcatctccgtctccatctgtaactccatctgcatctccatctgcatctccatctccatctccatctccatctgcatcatctccatctccatctccttctgcatttgcatctgcatctgcatctccatctgcatctccatctccatctctatctgcatctccatctccatctccatctgcatctgcatctccatctccatcagcatccccatctccatttccatccccatccctgtatccatctccatctgcacctccatttccatatctccatctccatatctccatctccatttccattttcatgtccatcatgtcctgttagtcctgtttctctggagagccctgacaaattcacttagtctttcttctcttttgctttgtctctttgcttacatagcccatcatggccacttcagtcttactctgcttcaactctcattgcctgttacctcattccctcagcatttcttggactaattatttatgctataaaacaagagtcttaactttcagggttggggatagttaggagaagtgtctctgagggggttacatttttaagcccagtcctgagagatgcataggaattcaccagacaaaagaaacggttggtgggtagggagattgttttaaacagcatgtttggagatctcctaggtgagaaagaatatatttttaaggtaggaaagaagtcctatatgacagagtgtagagagcagaagacagatgctcaaggtgagtctgaagaggtaggcaggggtaggttgtgttaaggagtttgggttttattctaaaggcagcaagaaattattgaagaaggatttaaagcatccccaatttggtttgcttgtacacatatcataatgtttggaaaaaaatcagggctttaggcaatacacctcttcatagggtacatattttgatcaagctttatattcactgtggacccagtggatatgaaaatgaaagtcttttctacaaaaagaagcatattaaaagttactacattatggatattgctgaaaataagtgcctattctttgtctgtctgtctggccatttatgccactgtgtttcaattagaatatgaattggctaatacaggttttatgcacaagttatttaaattcagatcttctacagaaggatgctagctaatccatggagtaattaggattatttccccgtagagctcttggtagcttgagttggagcagtgaattctgaataggaaaaagcaatgtaacttgttatctgggttagaggttcagataacaaatgtagtttgcaattttttttctgtctttaaattgcactctacaaaaggaaatggaaatggactatgtaatcattcatgtataaaatctatttagaataagggcccaatgcttatgaaacagagcttattactgttttgtggtttctatccagttgcctgatatggtactacctgtgaaaattaagcagctattaattattgattatggtatcagtgctggaggaatcagaaattattatgagagatttatatattggttaggttattctttaattaatgttttcattctttaaatcactaggttcccaagagtgctagagtgtgctagggataaaagaatgagcaaaacatgatacacatgcacaatcacaaagagacaagtgtcatgaagggaatgtacatggtcctttgagattatataatgaaatgacctgatctagatcagaaagtgaaagttccctaaggaagcaataactgagctataatttaaagtatggatagagccaactaggctgaggaatgggcaagaaagaattatagaacattccatttacaaagaacagcaagtgcataatccctgtgttcgagggagaatgacatattcaaagaattgaaaattggatggagagtgagcagaagagaatggagctagagtggtaagcctggacccgactgtgcaaggctgtataaacaaaacagattttagaacagtgggaagctatgagataattttaaactagcagtgattttgaagaggtaactcttatgcagtgttcagaacagattgaataggtttaaacaaatgccttgacagttaggaaactcccgtagatagaggagagagatgctgttagtgtgatctaaggtgatgacagtggaggtggtgagaggtagataaatttgagagataggagttaaaattatgtattgataaaaacattattactacaaatatttaaaaataatggaaactgattcagaacaagtttcaaaatctaactaccagtttgcaggaaagtgggaggacagaggattatactagtgacaccataatgatgcaaacatcagaattcagaatttaggaaactctataagacaaacaatctgtttttttatataaataaatttgacttcaacagattaaaaaaaggagagggaaatgtgtagattaagagacacattaacaaagcacaaagtgtggaccttctttggtcctaattctaagaaaccagctggagagagggtgggcattgagtggactggatatttgctgattttgagaaatcatgttaggttttatcaggtgtgataatgggtgatagttttgttgaattaaaaaatatgttgtcttttagagacataccctgaaatatttatggacaaaattatacattttggatttgcttcaaaataatccagtggggccaggagtttgctgttaaaagagagatgtagaagaaacaagggtggtgataagttaataattactctagccgagttgtgggtaaatgggggaattattatgctatttacctgtttttttgtatgtttgagtttttccatgataaaatattgttctaaaatgaataggattttaaggtaggttgggtgaggtgatgttagagaaagggatggcaaggatgcttcttggtttctgatttgcttagtcacatagctgatttaggagggtgagggggtatgttaattttttttgcttaatgagagggacatgagatgtttaaatatctatgggaaaggtgtagttgaagagggtatggatggagttttgagtagagtagagaaggcttgaaatatagtgagcaggtaaatttacaagaaaaacaggaaacttgctaggtagttgacagatgcattgaaagtgatggtaatgaatttatagtggaacccactgtataactgtcttgagcagttcataatacagttgtgaagaaagctggtaattgagccaggacttgaattttgatagtgggcataatgaagagacagtgatgctaagcaatttagggtgttgatgttattgaaattatgggattatataagaaaaaaggtagagaatgaagagggttaatacattggggaaaggactacaggttcagtaaggataaactacttttgcagttggtgtaattgggccattgatcttgacagagaagcagccatgatcagatagcaggatgattcaattcaaaatttcagagctggagaaagttttggaatataacaaattttagattttgatcatgaaagtgggtgtctgaggagaagtagaaaggttgttggagatggattggtgaagaaactccaaggccaggctattggaagtctcacctccatggatatcacccaaggtgatgttaagttttaggtgagattggcttttagaaatatttataagatttatgaagtaataacttggagttctttattctcatgaagtatttgttggcgtcaatccatgcaaagcataatagcgacatatttctgaatataacagataaataacacccaacaattgtatattaaatcttactttacatacccatatctttcctatttgggataatgttgtattaagatgggacctctctattaacgcgatatctatattgccccagtgttctgtcctagaaatatgaaattctgtgctcataagcatgtaacatatgcacttttcttacatttttatcagttatcttttttcctgcatgtcaaataactctaaagctttatagataatatccaccataatttattcaactcatgagtctgcagttcaattgggtggttctgctgatttaggctaggtttggcttatctcaactaagtttactcatgcatctgtggtcagccgctgagttggctagggcctgagtagtctaggatggctgaaatgcatgactcaaagggatgcttctgtggtctctcatcccccaaagcctagtgagtcttgttcacatggcagctgggctggcttccaagaccacaggtggaggtggtgtgcaaggccttttgaggcctaggcttggatctgctgcagtcatttatatcacattctgttggccaaagcaagtcctaaagtcagtctagatttaagagataggaaacagaccctctgtcttgatgggaggaattataagtaacattgcagaggggtatggatacagggggaaaaataaacacagctatgtttttgaaacaatctaccagaacattgtattgtgagaatgcaaagtgtaggtgcaaaatcatgcaactgggtatgacaagtctgtattcctgctctttcatctccacttaattgcaacgtgtccttggacaagaaagttgaagaaaataggaaggaatattggctgaattatctacctgctattattagcgacggtcagataagagaattgatttgtattttggatggctttatcattgcaagatattattttatgctgataacatctcacatctctttaatgtggaatccacaaaagtgacttgaagggttaatggcacagaggtgtctcctggatactgttccttgtgctactatggcctgaggggcttgtcaagtaaggaaattggctagaaaggtggaaggctgatggctgaaagtcctccattcaccctgttgtgttctgttatgcacttgatgtatttgatattctgttccacagtggaacctcagggatttgtgtactaatagctcagaggctgggatagaggcagaaagccactgaagtgcagaggagggcacagaaagattggaaagtttggagtgaaatgaagcagaaaatcaatgaatatctaagactggtggaaagtacagcatcaaaacattgttataaaaaaggcagaagtacataagaagggcatttttggaggatcaacctctaaaactgtctagtagtatcatataagtgaaattaaacttgccaacaggaattaaatgcaattcgtggcccaatctaaaggttatgagagtgaatcataaaataaggaaaatctcttattttagatacattgatagctatgactccctgcccccccccgcccccaccaaatatcatgggatgagtaagaaattattaatctgaatcatgtactgtggtgaaatgttagcttaataacacatcagtgactattaggttttccataacatttttttgatgtttaaatatgacatatttaaagaaaattatcccaatcttaagtgtacagcagaaagaattttcacaaagtgaaccacctagtgattagtagctgtgttaggaaacaaaatactgccagaacccgaaggtctcctcatgccttttgtaatcactgcccctctcccaacaaagggagacactatgctcatttaaccccatggagtagttccatctgtttctgaactcttcagaaatggaatcatacagtatatactcttttgtatctagctccttttgctcaacatgatgtttgggggcaaaaaggagtttggtttgattggagcactagggctatgcagaggcatagagggaaatgacctggcagcatagacagagatgggattgcgggcattggaggcctgttcaagagattatgcttaatgtctgtgataagcccttggacgatatgctcagtgctgcctttcaggaagattaatattgcagcaatgatgtaggagagattgggggtaaggacaggaaggctgcagcgtggttggttgttgtgggaaatgcactcagaatctgaaggactgggtctgagtgatacttctgttccttgctaactgtgtctttggacgattcgttcaacctgtctgatcttcagtgtcctcatgtgaacaatgaaggtaggaatcctgctattataaaaacaaaatgaattgatccatgttagagaactgcagactatatagatataagagttccagggcctccacggacccctactgcgtggccattgctgtgactgagtggagggaaagaggaggctaggtatttaatctactttattcagtcatgtagagaatgctcatgtttaagccaatattgcaggtattcatgtggttggataagttacacattatactctaggtatagagactttcagaatgaacgaaggaaaattctggagacagactgcctgaatgtgaatctggcttcctcctcttactatgtatgtgaacttagtccaattatttttaacttttctgggccatgctttaatgataggtaccacataggattgttctgaattttaatttaattaatacaaagaaaacacttagaatagtacctggcatgtagtaaatactcaatgttattattgccttgtctgtcttttccaagtagcaataaatgacctaactttctgttggttaactgcatagaagtgtgtggcacaggcccattgaaatcctgtttgcatccttctatccctgtagctccagcctttttccaggttacccacattaggattatacagagtgagctcagccctcatccatgcactgtgtatttgaatataaatagtgccctgctccaatctccctttttccagttcctttcacatttcctaatagagttgagttttgaggggtttttttttttttggcagttctctgatgaatatattcaactgatctcctacatgtgtgacctagtgatatggtttggctgtttccccacccaaatctcatcttaaattgtagcttccataattccgaggtgttgtgagagggaccagttggagataattgaatcgtgggggtgtttcctccatactatttttgtggtagtgaataagtctcatgagatctgctggtttaataaggagtttctccatttgtttggctcttattctcttttgtgtgctgccatgtaagatgtgccttttgccttcctccatgattgtgaggcctccccagccgtgtggaactgtgagtccattaaacctcttttcctttacgaattaccgagtcttgggtatgtctttatcggcagcatgaaaatggagtaatacacctagtcagtgtagagattaaggagaatttctcttttgtactcaatgacatactctattaatgcaaccctaagttacattgactgttttgttctctacattatactgttaaatcattctgagtttgtaattaatcaaagccctccaaattgatccccaacatttgcttgtttcataaaagtttattctttcatttattgaattattggctgcttaacatattaccatatgccagctttgtaattgacagtagatctgctccttaaggagtttcctggaatgtcatacatgcaaacagacttgtagtaagtgtgacagtgaaaattgttataatagagatgtgcagaaactgtatgataacataaaggaaggatatcgaattctcccagtgggggacgggggagagtatgacaataaagatggcagaggcagggagatgatgtcagggaagtgcacatggaagagagagtatttgtcataaactgtatgtaagatcctaaccactaagagtgggggaaggaagcctttaaacagagagaataacttgtaacgtagcatgaaacagcatggacattctgggaactactcctatctgagaatggcagcagcctagagaacaggtggaggaattggcaggagagatgctgagcaggtaggtaggtacaaggtcctgatgggcttcgcgtgtcacacttggaaattaatatttattcctataggtaatgagccaacatgaaaagagtttatattagagagggacatggttagacagttgtgctttaaagaaatacgagactgatagcccttgtagtgtgatctgtgaattagaggaagcaagaatggaggtgggatggctgatggagaggcagttcctgtcacacaagtgagaaaaaaccaggaaatcatgaccaaacatgtctatgggaatggaagagaaggaaattttttgagagatttattaaatagatatattttgagcatttaggcactttgagtggtgagaccctcaggacttgataaccagctacatgtggcaggaaatgggaaaagttgaggcttcgccccaggtctgagtgactgggtggataatgatgtcattcacatgatagaagataactgatttgggagaagcaaacggttccctttaggacctatttttggatacctgtgggacatccaagaggaaacgcacggcagacatttggcttagtatcaataactcaggagagaggtttctttttgtgctaagtggacctgagaatgattcatatatggaagatggttgaaacctagatatgcagtagatcaaccagaagaggactgagggcaatcatgagaatcctaacatgaaatagaagcatggagaaggatagccctggaaagtgattttgagagggcgtcagttggagggttggctaaaaaccaagaggaagtagtgccatagaacctatggcagagagagtctataatgcttgatatatatgtgtatatattactaatattttatatatactttatgtatatatatcaagtatgtatatttactaatattttgttactttttaagcttgtaaaacattttataatgtttaagtggtgtcaaactacttctaaacctgtggcagagagagtctataatgctctctctctatataaaactgatattttatatatactttatatatcaagtatgtctatttactaatgttttattgctttttaagctcataaaacattttataatatttaagtagtgtcaaactacttctaaatattagaaaatgtgcttttgagtaagcagaatccagagcaggcctgtcaggatggtcacctccttttggagcaatctgcttgctagagatgagggatgtgtgtcttcccaccatttggacctcattctagtaggtcctaactcatgacattctagttggggtttgtgttggctttcttagtttgaatggggtgaagattttctctctgtttttccttctctttgctttaagctattttcagagaaaagaattcaggtagaaatgacttttctatgcagtatttaaacagaagtcccaaagttcctttaaaagtttgagctaaccagaaaatattatctataacatcattgtttttatttttaaactgaactctgtttgagtttttcatgtatttcgattatgcgtttctttagagcagaagtgaggcatatttatcttaatatccccagggcttaaaacagaacttggcatataggagtgctccataaatgtttatttttgtattacttgttgatgactgcactgttccatttttgaaagctttcaagccttccaacatctcatgtcactgaattacacaaatttgtcttctttatttcattaattctactctttttaactgactaaagtttagcatctttttcccccaagtgttaaagtgaaatgggaatttgtttttaggctgtatatatgctacaatatttgagagtttcaacttaaatagaggtaggcctaaggaaattgaagttgaggcagaaacccagcaggatgaccctgctactcctttgtttctatagggactcttgtttctacttctctttgttatctttctcttttaaattttcattatgaaaaatttcaaacacatgctgtcttatagaatatagtataacaaaccagatgcattcttaactgtttactttttttttttttttttttttgagacggagtctcgctctgttacccaggctggggtgcagtggcatgatctcggctcactgcaccctccgtctcccaggttcaagcaattccccctgcctcagcctccaagtagctgggattataggcacccaccaccatgcccggctaatttttgagtttttttagtagagacagggttttgccatgttggccaggctggtcttgaactcctgacctcaggtgatccacctgcctcggcttcccaaagttctgggattacaggcatgagccactgtgccctgccaactgtttccttcttaactgtcaggaactttaacatgcataattagagtcttattaatatacatctattctactgcaacaacaaattcctccttgctggtcagaattcatgtcagagtaagttatattagattccttgtctacattctgggagacagggttagcagtaaggaagtcatggatacgaatggatttgcaggtaatgactgcatgagaggcttcctggatcactgctccattttccctccctgcctattttgtgaactgcatcaggaatgaacttatcctacctctgcaggtggtctattacatgcttccaaaaaagtaactatgggactttcattgatttaagaaagcctatgctgtgctttgatttggataatcccttatttgttattttaagcttctcaacaaaatatgaattttccggctgctgttctttttttggtgttatttttggtgacttttgctagagaatggataggatagtaggccacacacccatttcaggttcagctctgttcacgttttcagagctctagaaatgcagtgattctcatgattgtggcaggaggtagtggggccaacaatggtatttgttcattttccccatatataccaaagtatttcctgtgtgattgcctgtaagactgtgcttcctttttcagagttctgctatttgtagctatcataaaataagaaatgaaaagaaaccttttagagtagagggaaagttttataggaaaaggaaataaaaggtctgaattcaacactcctatttgtatactctgtatataacgcatttgagcaattttcatcttcggtttctctctgtaccatttatattctacttatgaaaataaattgggaatttcttagctaatgaaatctgttttatctaataatttgaaaatatgaatttttgggtaggaagatatctatttttttaaagtttatcattttgacttttttgttttcttaaaatcagacctataatatacatatgttcttaatatataattggatggttaaatttatgaaggtgagccattgtattgtttccccagcctttttttttcctgaaaatgtggtgtaattttttttttttttttaaatccagggaatcagcagtctcttcagttctttaaaagtggtgcgtctcttacgactgggccgtgtggctaggaaactggaccattacctagaatatggagcagcagtcctcgtgctcctggtgtgtgtgtttggactggtggcccactggctggcctgcatatggtatagcatcggagactacgaggtcattgatgaagtcactaacaccatccaaatagacagttggctctaccagctggctttgagcattgggactccatatcgctacaataccagtgctgggatatgggaaggaggacccagcaaggattcattgtacgtgtcctctctctactttaccatgacaagccttacaaccataggatttggaaacatagctcctaccacagatgtggagaagatgttttcggtggctatgatgatggttggctgtaagtattttaattttttcattgaaaattattgttattggcaattttcctggctacaatctcagataggatgaaaacgaactactttgtttacagaaaggtatttaatccatcttatttgcaattgttttttttaatctaccttagaaaatagaaatgcaaaataatatattttactcttcaggacataataatgtgtgaaaaacatattaatgtgtgtacccagcagtgctctcttgaaggaaccaggaccagcatccagagaggtggcgtttcgcacattccatagattttgttggtaatgtgttaaattccaaaaaaaaaaaaaaaaagagataggatctgatgtgaaatatattgtttataaatattctagttaatactgaattcctaaattaaagttgaccttaggatacacttttgtataggtttttacaattaagactaggagaaagggtttataaagctagtcttcattatagccactctaggttgaatatatgcctgtttgagagaatgaaaggattactgaatataagcccattcagcaatgagaagtgtctaggatttaacaggtatacctgggtaccaagttcttggaagtagaataccccctaaaggaacaaagaccatgtgctctgcactcagactgtgactggatggcatcagaagaccagaacataaaggaaatacatacaaagaagctgcttttgaagatcttgagggagacttcaccatcattcacgccttcaagttgacttagatgacttatccacacctaaactaaccttaagattgtactttgattttgtatcctgagactttgctgaagttgcttatcagcttaaggagattttgggctgagacaatggggttttctagatatacaatcatgtcatctgcaaacagagacaatttgacttcctcttttcctaattgaatatcctttatttccttctcctgcctaattgccctggccagaacttccaacactatgttgaataggagtggtgagagagggcatccttgtcttgtgccagttttcaaagggaatgcttccagtttttgcccattcagtatgatattggctgtgggtttgtcatagatagctcttattattttgaaatatgtcccatcaatacctaatttattgagagtttttagcatgaaaggttgttgaattttgtcaaaggccttttctgcatctattgagataatcatgtggtttttgtctttggctctgtttatatgctggattacatttattgatttgcgtatattgaaccagccttgcatcccagggatgaagcccacttgatcatggtggataagctttttgatgtgctgctggattcggtttgccagtattttattgaggatttttgcatcaatgttcatcaaggatattggtctaaaattctctttttttgttatgtctctgcccggctttggtatcagaatgatgctggcctcataaaattagttagggaggattccctctttttctattgattggaatagtttcagaaggaatggtaccagttcctccttatacctctggtagaattcggctgtgaatccatctggtcctggactctttttggttggtaagctattgattattgccaaaatttcagctcctgttattggtctattcagagattcaacttcttcctggtttagtcttgggagagtgtatgtgtcaaggaatttatccatttcttctagattttctagtttatttgcgtagaggtgtttgtagtattctctgatggtagtttgtatttctgtgggatcggtggtgatatcccctttatatgctgctataaagacacatgcacacatatgtttattgcagcattattcaaaatagcaaagacttggaaccaacccaaatgtccaacaatgatagactggattaagaaaatgtggcacatatacaccatggaatactatgcagccataaaaaatgatgcgttcatgtcctttgtagggacatggatgaaattggaaaccatcattctcagtaaactatcgcaagaacaaaaaaccaaacaccgcatattctcactcataggtgggaattgaacaatgagattacatggacacaggaaggggaacatcacactctggggactgttgtggggtggggggagaggggagggatagcattgggagatatacctaatgctagatgacgagttagtgggtgcaacacaccagcatggcacatgtatacgtatgtaactaacctgcacaatgtgcatatgtaccctaaaacttaaagtataataataataaaaataaataaataaataaataaaaaagattgtactgaaggtgtgattagcattattagcgcctcttgagcctttggatcatggtcatcggtttttgtgtgtgtgtgtgtgtgtgtgtctaagctgtcctttctgagattccatgttgcagaggcttagattttgacattgatggcaaaagttctgggactccaagggcgtttgctggaacatgaaaggttaatatcttgagtctaagcaggtagttttcatcatttagaatgtctgaaagctattgaagcatcagtgttggcagttgttcagcttctgtttgtctaatgaacccttgtacaggtataggaacaagaacaggcaggctctatttgctggttagagcttgcagttagagggagagtgagaattccaagtgctgtttgctccagaggctttcagcaggaaaatgtccttatacacagagagagatgctgatgattaattaaatggatacctacgtatacaaagtggtaagatgtatgggcaaaaatgtactttataaattcagaagacaacattttgtcagaggctgtatttagcaccatactacttttaatatttatacattttgccttatacttgagcatagttagattaaaaaagaaaacctttttgttttgaagtaattatagattcattggaagttgcaaaaatagtgtggagagggcctttgttaccttcacctagtttcctccaataattacatcttatataactatagctcagtatcaaaattgacaatgatataatgtgtgtgtatagctctgtattgttttatcacatgtgcaggtttctttaattacaactgcaatcaagatacagaactgttcctttaccacaaagctgtcttttatatgtaacctacccatttcccccaactatccctattccctgaaaactactcatctgctctccatctttataattttgtgattttgagtatgttatataaattaaattatgtaaaatgtaaccttttgaaatggactttctccgctcagcataatgcccctgagatccatctaagttgaatgtatcagtaattaatttgttcttttttattgctgagtagtagttcatggttaggatgtactactgtttaactcaccatctattgaaggacattgtatttgtttccagattttggctattacaaataaagctgctatgttaatacctaggtgatgggttgatattgcagcaaaccaccatggcacacatttacccatgtaacaaacctgcacatcctgcacatgtaccctggaactgaaaataaaaaaaaaaaccacacaaaaaacacaaagctgctgtgaacatttgtgtataggtttttaatatggacattagttcttagttctctgggataagtgcccaggaatgtgattactgggacatgtgataagtgtatgttcaatttttaaagaaattgccaaactattttacagagtggatgtactagcacagttatatttttcataagagaattgtaggaaaataaaatctatgtagagtcaaaggacacaattatttactttgtttctgaggccccgaagttgggaatcatcctagatttctgtttttctatgttacatctattaataacatggcctgtagggtttaccttcaaaatacatttgattatttctctctccttccatagattaccacccaagaccaagtcaccatcatctctggcctgaacttttgaagtaacctcctatatcttcctaattttcttatgcttgccctacaatctctatcccaaagcttaagcagcccctttaaaagcaaatcagatcacaccattcctctgctcaaatccctccaatgtgtgtgaaataaagtccagattccctagctcatctttcaaggccttcctgatatggccctgcctacctcactcacttcactttcaaccattcttccttggcttatcctcctaagtccatgctcaccatctcattttccctgaaaacatcagtcttaggcctgtctcagagtctttgtacttgctttcccattgcttataacactcctctcctgacctatgacccgaattcatgtggctctccacggtatcgcctctacagaaattccttccagtgctaccctactataaaaaaacacctcaatgccaacctgtagtctctactctttaacctttcccttcattgtccctaccacgatccgaacccacgtgtacttggtttttcttttccttcagaatgtaagctccatgagaggtaggcctctgtccgtttcttgtatccccagtatctaaacaattcttaagagttttgtgctcaatcttaatttttcatatgaatgaatgaaattgaagatgtccctgatggtcgtgatgaagatcttctgtccttgaatccatcccagttagatctacgatcaagtacgtgccagcaaaatgcagggtgttagagctttgaccccgattcctttgtgaaaggcctggtaagctcacctgcattgtcttcctttgggggtgtagtcattcctttagctgagttggtaaccccgtgtcttatcggcctatcgatataagttctaagaagcaagtcactggaagctccaacaaaatgttctctcactgcttcttaccatctaccttctgaatctacctacagtggaaattttcacgtatattcagttgggtttccgaaactgtatttggttcagagttggttctattccttctctccttcatgaatagccaattatacttgctagatctaaatttccatttctcctcatctcttccattttctgaagttcctgttttgatttagagataaaaacctagttttaaagttggttgttttcttctctgagtttctattatattctttgaatacctgagtagcagttttctgtttgtataccaatttttgacatcttcttgccttttgacttaggttttccttttatgcttctgattaagtccagtttctatagccagagtattccagggagatacctttaaatttcccttttagtccttgggtccttggtaatttcatgggatatttcctttgaaaaacctgagaatattataaaaagctgtctagattcatgaagtgttatagtacctttgcacagttccaaaatttgttagacccgaaatgtcaaccaaatttggatattgtagctctttgtaaatatagtatcatttttttcctacaagaacaccaaggaaaacaaacaaatgaaaacaaaccacctgcattcttagaaaccaatatgtgctagcagccatagccagggatttagcggtgtgtgtgtgtgtatgtgtggtggggaagataggatagggaagaggcaggtagaaaacagaaaggttcattttttcacttgtgccagggttctagtcaatctgtgtggctgtctaagaagcaccacttgtaaccttataactcaaaaacagaaaaatgttttatcaaaaggttgatggagacaccaactgcctatattctgttgagaaaaataatcactacttgcaaatgatagactctttttctcgagaaagtcatccaaaatttatatgtctttcagaaaaatttagaagtatgaatgtggcaacaatcccgattcctaggtccttatgagccctcttttcaatggcctttcctttcctaggctcttgctaccataatgctaagttggatgtgggctctgtctaagactacagtctcaaaagttttccttgttcatatatcagacagatcttcaaaaaatagtataggccttcccctaattccactcaactgagattccttccagatccctcctatgtcagcagggtcccaggatacttttcttacctgctacctgggaatttcttagacttaaatcctttgttcctatatttgcccaacatgggaaatcttcctgttcagatttctgaattggaagggttgcctgatgcttctctatatacatctaccgtcatgcattctttaccttaaatttgtcttctcttggttttttcatactctgtctgccttgagtgacctccactgctctggtggcagccattactccccagggtagccacatcctccccattcctctgtatctgtccattcatgaatgaatccagctactctgctgacattcacaaaattcactaccaaagggcttttgtgagagaatatttttgcagcacttgtagaaaatagtatgtatgtacatacgtatgtgtgtgtgtatgtgtatttagatcaagatgtaagtaatctccttgctaatttgcttggtaaatacttaatgatgccttcatgaagtgttttctaatccattttatttacataatcttattattgagcccctaataatattagattttctaaggattaggcacactgactaattttgctgctattcagaaggcaccatagtacgtggatgatttattttgatgactataaaacaaaggaatgcaatgatggaatttttctaataggattatactcttgtcttcatatgtttttaaaaatcctcttccaaagatttatcaagaaagcagttacttagtcccttctttattgctaaattatcatataaactgtattttagtttaatccagccgttataagggactctacatctgcatatttcattataattttctaaaagaaagaaacatataaaataaaaatatgttttgaataactctttgccataagttcaaccataatttttttctctctccatatatatgttttagtacactgttaagtacattattaaatatgtattcagcatatgtcaaagggctatgagattggaatttgggtattcattttctctaaaagcatttttctactttttctattgtctgctttggtaaattgagacaggctgacccatgcagtatatgtcaatgagaatttgtcctgctgtgatgcaatgcaaactgagtcttataaagcaaaacaaaccaaactaaaaattataaatataaaaattgctggggtttaattggtagacaggaagccctgtcataatgatgctaatctgcaattttcaaataggatgtaattggtaatcacgtaaacatctaaaaactttctgtaattgactagtatgatctgtaatgcagtagacaaatggtttagcacatctaaaagtatagcaagaccatctgccagtgggatgtgtatgacaagaaatctgaatcttcatgtaggcggttaagtgcaactgggaagcatttagttgcacactggtcaatcagcaccatacagaggagaccaatgccacacactgtattctcatgttgatgagtttattcagcatcctctgtggaattcagataaaagtcaagctgaggttatgggcattgccctgacttctccccaccggaaaaggaaataaatagaagatggtaagatccagaaattgggagaatatagagtaagttgggagcaaaggcccgtgtgaccctggagagtctttacatctctctgagctttatttatttttttcaattgtgaaatgccaaagttgaaatcagtgacttttaaggtccctttcaggactaacattctatacttctaaggttctattggtgcatttatgcccctgtccatggcatggagctggttattggagatgaggttaagatggaaagaaagtggtgtcacaaagatgttagggctttttacatatagtgcatacattgctttatggagaataagatgtgttttctatagaaaatgttctgtaaaggttaagaggaaaagttgtcagagaataaatattatggagaaaagaaaatatgcttttggaaagagaagtgtttttccatatagaaattaggcagctaggaagactgaaaggcatgtgtctcagggtaaaggatcagggcccaggaagagactgcacaccatgcccagtgggacttggacttggagaggtactcgacctaggtggatatccagacaggcttaaaagtgggttgttgccctttcctaatattagaaaaaaattattctacaaatcttaatatgcgacttcaggtatttcaggtataatattaagttacatgttaaaatttgtcttggccttgttattgcggtgtaggtagaaaatgcagtgtgtacatgctgattttcatttctggctttagttttagccagatggggagagctttaagcctaatgtttattttggaaactgggtcaattctttgtgtctgctttaccatagcttgtaaagaaaactttgtcttttttcttttctttaatgagctgagtttcgcatgagaaaaaacattttatggagccccaagttcagggttataggcaccttttttcatggtttagcagtctcagatgtgtagtccagggcagtctcagatgtgtagtccagtagttagaaaaagactgtgtgatgtacactttactccctgattcttattccaactagggcttgtgtcttttgcaggaatgttcttttatacccatctttcttttcattcctagtcacattttcacaaagcctctcaaattctgtaaaggttgactttccccagaaaacagcatgacattttcttgatagcctattaactagcctgaacgttttacaaggatcttcatctcttgtgtccttgtatcactcaaaattatttaattcattcagccttgtgccaggtgttctggtatacattggtatttaagaaacactagatacttttgagccctcaataaccttttaatgtggtaagagggtcaaacaagaaaatcactgatccatctgtctctcccttactctctccatccccatctcaatgtccacctctgccttcatcctcgtctcatctgttcttatactatgaattaagagggaataaagaagctggacttgtgagaagaggatctgtctttgtcctgttcatcattgtgtatttagcacaaagcattatctcctacttgatggttgtgcccattgaacacatgttgaatgaattaatgaatgaataaaaatgtttgcctagttcagcctgagggagcccaggaggatttctaggagaaagtgactcttgagctcagaatacaaaataagtaggtaaatgaggcaggacttagctattttccaggtatagagaacatagtatatgcaaaaatgtaggcatcaaatagcttggccctttcggggaactccatgcatttcactttggcttgagtggaaagtagatgtgaatggaaagaaatgaaagaaccaagatgtcaaaaagctttccatagcttcacaaggagtttgccttttatcctaaaggttgtgggataaataagaaaaatttgattctttattgtggacaatgaattggaggagataaaggctactggcagagaaaccagttaggagactgttgcagcaatccaggaagacataaattgaggtggtaaatatatggaggacagtatagatttagagttggcaaactttttttttttctgtaaatgggcagatagtgactatcttaggctttgtgagccatatggtctctgttgcaaactactcacctctgcttttgtagtgctaaaacagccataaacaatacgtaaacagatgagtgtggctatgttccaatacaactttaagcaggtggcagatcagatttggcacgtggtctgtggtttcatggtttgtgaaaagactgtggactttggagtcagacaaatgaatctaggttcaattttttgcatcataatttataagaatttatatcagttatgtaaaccatcatttgtaaaatggagataatagtctctactttgcagagttatttttgatactccagaatagattgtacgtaagcttcctgaaaaaattttttttttgaggcagatttttgctcttgccacccagactgtagtgcaatggtgtgatctcagctcactgcagcctccgcctcctgggttcaaatgattgtcctgcctcagcctcccaagtaactggggttacgggcatgcaccaccacgtctggctaattttgtaattttagtagagttgggggtttcaccacgttggtcaggctggtctcgaactcctggcctcaggtgatccacccgccttggcctcccaaagtgctgagattacaggcatgagccaccatgcccagccaagcttcctgaaactttaaaaaatgtttttatgggtgaattaatgaatatgtggggtattttagaaggacgagttcaaaagcacttgtagatttctagcaaattcagctgaatgtatgatgaagcttttttctaaaataggaaaaaggtgcagttattactggaggaaagtggttctttttcctgcaggttattctgatggaaatgttcattaggtggttagaaatgtggttctggtttccagagctatgaggcacagagagatctctttgggaataacaatgtatagaaagtaatcatgtcaaggaagtgtacggtgcagtcagcataaagctggccaagagtagactctgaagaaggagagccacagaggggctgagaagagaacccagtgaggtagaatggaagcatgactctggaaggagagtctgttgctaacaaaggatgagagagctttaagaaggaagggagaacaacaggaccactgagagaggaagtcagaagagatctgggaggccttaggaggtcatcagtgactttatctgacttgtttgattggctagttgaggggagagagccacatggggaactcatggggtccaaaccgttttttctcctatatgaaggaaaataatgtattattagccattaacttcatggaggtagattatgctgatgcagtaattttcacagccaatatgtttttctaaatcaaatttcaaattcaacaaaatatacttgttcgattattagatgcataacatagacatagaatttctcttttgtgttataaaacgaaaggtagcattggcttagaagtttgtatgaaattgaactttcttagaacagacgttttagtcagaggagaattttatttacttatttggtgactttccaatgaatttaatattaattcctatgagaaaatatttttcaggacacactgtcacctggtaggtgaagtgatactctggtgtagaacagacagtggggatgtagatgattctcacatatgtgatatccatcaattgacatctgattttaattttgcttaatatgtaatacttaaatgttttttcacaggccgaaagactcacaaattcatagatgaatatatttagaacttattaaaataaatgtcataccaaaggcctttaggcatggatttaaggatttctttgatatggccagagaggggattttatttggagtaatttctaagccagctcctaagtgacttcttcttacctacttgtttaatattttcatatgttgtgacaactgagttagccctccctggaaggttaggtaccaggcacatggtggtagctttaggctgagtgtgtaggtaaggagatctttatggggtgagaactatatttaagtggactctcaggaaatactggaggctttaaaaattccctttgaagctggctctgtagctaccctttttagactctatctcctttaaagttgagcttatttttaacaacacccccccaccagatcttaagctgtgaaggtctaatttgggaccattactcatttaaagtgtcctgtaagggaaagacatttaaattcatgcccctatttaggcatcagcaaaggaggcaggtctggtattgactcttctgatgagacttcggtatgggaatagtagacctcgggaacttttcttagactgggctgttgagttttcctgttggtttccttagaaagggtccaaacggtcccttcataggtctgtttccccaacttctttcccttatgaggacccagctagagaatagcagaccctcctccccaggcacacactgacactccaaattccttcatcctgtgcccttttgctgccttaacaactccatctggatctatttgtctctttttctgttccagggttgctgagcactggctggagtcaactagacagccttgtgaacagctgcccctaaaatgaatgtttagcaatcttacgaatcttcttcctgtaacattttgctgagcaacaattcctgtacaatttgcacacgttctcctcctttccgaaacctatgaccactcatcttcattgcagcagatggccttccttttacttctgtgaaaaagaaatgtgttgcagatgtgcattcctttacactcctgactctccccttaggaaggtgggctaggggtggccaagggtgcaaaccattcagggccttataggacaggatagtagcccttactttgagccagatgggaagacttttgagggtttcagaccagattgacttgatttgtcttatgtcttacaaataccaatccagctgctgtgtggaaaatagactgtacagggtcaaaaatgaaagaagacagacaggtcaaggagagagatgatgatggtggtggttaggattggttagattccagacatacggtaagaccagcaaaacatgagggtttgagagaaagagagtcaggatttaaggctttcagggcaagcaactgctcttaagttagcgatggatggtcatttgttgtgtccagtgggcagtcacatatacgattctagcattctgtgaagtggccccggatttgtacatagatttgtgctgtagcttgattatttttcccttctaattgtttgtccttccttctcctcctctttcttcatctttttttttttttttttttttgagatggagtctcactctgttgcccaggctggagtgcaatggtgtgatctccactcaccccaacctctgcctcctgggttcaagtgattgtcctgcctcagcctcctgagtagctgggattacaggcatgtgccaccacgcctggctaatgttgtttttggatttttagtaaagacggggtttcaccctgttggtcaggcaggtcttgaactcctgacctcgtgatctgcctgccttggccgcccaaagtgctaggattacaggtgtgagccaccgtgcctggcctttttttttttttttgaggcagggtctcgctctatcaccaaggctgaagtgcagtggcgtgagctcagctcactgcaacctcctcctcccaggttgaagcaattctcatgtctcagcctcccaagtagctgggactacaggcatgcaccaccatgcccggctgatttttgtattttttggtaaagacagggttcaccatgttgcctaggctggtcttgaaatcctgacctcaagtgatccgcctgccttggccttccaaagtgctgggattacaggtgtgagccactgcacctgagcttgtttttctttcttctgcattgtccatctctctctctctctactggctctttctcttcagctgataaacatgctcatgtctttttaatcctaagctaatatacatatgtgaataaaacacttgacctggaccttgcattctctttgccttattacccagcaattcttcccttttaaagctttctaaagcatgtgtcttcacttccttttcttcatttactccctattgaaaatgggcctcttctcctatactgcctctcagagtacatttgctagatttcatagacactttttcatgcatacggaagtacttcttctttggcttctttaatatttctctctttctggctctcccctgacctctcttgctatttcttctctgtttgttttgctggatcatgttactgcattgctgtcgtaaatattgaaaactgtgatattgggaacaaattattgaaagatcaagggcagctctcctgataggctgagcagtttctcccacaaaaagtgacttcatgggagccagccgactctcagatattttgctcaatggtccaccattagaaatcctgctgcatgtgttcttgactccagaaggccccttgaagctgccattttgtcctctaaaggatgtaagttcctcatctctgtaccagattggactgagttttaaactggcacagtgtctcaatgaagagaaaataattgttgagatttcagaggagggtggagaagacgtctggagcatgggctgccgcttggcaggcaggggtgggaaggagctaaggtaatgatgccaagaggaagaagagaagccttttattttttcctagctctgtgggaaaaataaccagggattattaattcacaccaccttttccctcgtttactgccatgagacctttttcctccagtctgtctgaagtgtccctattactttatacttcattatttcttcatcatggtctctaattatattctttaattctttctttatgtaattattgcttgtctttctaactaaaatggagccacaaaggcagggaacttgtctttctagttccactctgtatccctagcataacaggagtgtagcaggtgctcagtaaatcctccttgaagagataaatgtattttgatctccatatttgtaaagttgtaaattcaaaaccatactagttctccagacctaaattcttcagtcttgggtttaaattttcatacagtgaaacataggtgaatgaacatgtgactgatttcatttttctgtacagagctaataacttagtttaggacctcttccctcatccccccacttttccacctttcatagtacgcttgactgccacatctgtgctatggctgtactggccactctgtgtctatcatgttgtagagttctggatgggaagctggatatacttctttgctgcctttgattttcccttcaacctattttgggtttctcttgttacctcctatagttccttttattctgccctcttatgtttcactgccacccaccaccatgttttctgggaaaagaactaagattttaaagtgaaaacaaaacacaacaagaaagacgacaaaaaaaccatttgctatctcgagggcctggcacttgcaaaggaaatctatgcttttaagattattgttttggctatgggctttaaaaaagtctaatttgaaactcaaagctaagctgctttctttgttctcagctgttaccacactcctcttgaaaagtgactgccactgtttcagtgagaggatagcaaaagggtcattaggaagagctaggaattagagggactgaaaacactctgcacctgtgtgtccctcatcctcgatcatgctgaggcctggcataaatgcacttgccatacttccaatctttctttgttcattggatacagaagagaacaacctgggaattttaatggtttggaaacaactgtctgtactatgggcagcatttgattatgaaatttggatagtctcttctatagagggcaacacaaggtcaggactgcttcaagttagatgagaagcacaaatatcatttttggtgtttgctaaagaaacaaaactatataagtgtgttttaaagaaatttgcgcctgtagtctcagctactagggaggctgacgcagaagaattgcttgaacccgggaggcggaggttgcagtgagatcatgccactgcactccagcctgggtgacagagtgagactctatctcaaaaaaaaaaaaaagaaagaaagaaagaaagaaatctgcatttgaaaaaagtgtgtccatttactcacagggagatttcagtggcttctgatgtttgatcagagcctttctgtgctgcgtaatttgaactgctaatttattcagtcattagagagaagtttccagagaaaaagtggtgattctactgggatttgggtaatggctaataccagggaagacagagctgagataaaccggaaggaacacagggcccacagatgaagggaaggaaatctcaaatattttccacgtctctggttctcctgccttctttttcatttaatctgtgtgctaattcagattatctgactgtagttttttaaatttaatttttagatcgaggtaatacatacatgtagtttaaagaaccaaatagcgctataaggtttattttgaaaaatggaaattccttgatcttcatgcctttagacatttcccagagatgactttcaaatcattttcatttttttggtggcatttatctttttgtttttacatgattattggagagaattttcagttttagtcattgtctgttgacttccatctttggaagatgaaaataaaattatataattctctttcctgtcctatgtctcttaactaccactacacacacacacataaacacacacacatacacacacacacacacataatatatatgtgcatatatatgcattttccaattttctaaatcttctctatatttagatcataattttgatataatcaatagctgttttcattattatgactaggtatatgctatttacaactgagtcatatgttatactgtgattattttcctgtacaacatttgatttcccctagtgtagtcattatcacaattttttttcttagtttcttatgttgcttcttttaaatttattaccaaattctcttccattctgtaactctaacctcatcatgctcacattaggcggttataactttttatctctggagggctctttctttgagccttctgactttctctagttgcactatcccaggcttgacttaaagccctcagcctgttgtctcccattagccctgatctccaggagtccctttgcctttctcttttgtggacccattgtttcctatatctgttttgaatgaacacctcttatagtagcctctagagaaagtatagataaaagaattttttgagattatgcgtgttttaaaatgtctttcatttatccttacacttaactgatagcttgtctgggtagagatttaaaggttagaaataattttatgaaaattttggtgcactgttcttttgtctttgaacttctaatggaactgttcagaggactccatttgagccttgattcttataaatgttatgtttttctttctgtttccactctggaaacatttagaatctttttttagttcccagtattgtgaggttactatgacaaggtatctttctatggattcgttttcatcccaatgggtatgtgtaatcatttggaaatgcctatttttcactactgggatattttcttgagttatttcattcacaagttactcctggttttatctttttccctttcttgaaattcttattatttggctattggatctcctggattggttttttagttttttttttttttttaatctcatttctacagttttctatgattttatcttttttactctatggtctagaagttttcgtgtattccaatttctaatccttcttttgagtttttgtttctgcttgcctacgttaatttccaagagctcttgccttttctctgtgttccttctcatagcattgtgttttcacttcatgagtgcaaaatctcctcttctctttctgagggtataagaaagtttatgtgtagttttcttatccccacatagtctgtttctatcaagatgatgttttgtttgttggttttggtctctgcttctcatggtggaggctttatgcagatgcctcggaatcctggctgtctgtttttggctgatttgtggctgtggactttatgtagggagatctaattgggttattttgtggaaaatcctcaacaccagtattttggggtcatttctattaggctgccaattccctcagggaggaattttctagtttccagcctggagaacatagcccttgcactgatctctctggaagctgaatggagaatagagctgagggtttgacactcagtgtgtaagctttcacataacccctgatttcagtgtgaaacccctactttctgctcttccttcattgcagggatcctctctagtctgctgaagtgtgaaaagggaaattgactggctctgtggaattagggaaggcatctggaggggtaggtgtccatctgtttcttaaacagactttcaataaatcctctagttttagccccacctttgctccttcacttcccaaagtacttggtggtgacaattcctgggatatttagtggctctgtactgcatatcagattgttaattatcattcctttctgctggtttaagatccagctttcttggatctgatgagttagttactacttgtcctatgctttccagcttccaaacttttgttgcttttgtctgttctactgttctgtttgttcttgtggctttatggctttacgcaatccatttactgttattttgtggagttttgagaggaaacagaggtatatacatgtcgtcaaccctctatctctggctgagtctctctgcttctttgcataggtctgttagttctgctggttcatgctcctctgtcatgtgtttatcatccggatttatgtagctcttgatcaaaacgttcccattgctatttaccatttgtctcaagctacttgtcactagagaatatcccaaccttgctaaatccatcagaggttcattgctataatatctgtctatttaacctgtaggtctacttactgtctgcttggcttcccagctgttctgcatggtctctgttttttggaagtcctctgctgttatatacaacctctgctcgatcattttctctgtactcattagatccaggccatccctgatactacatcattcctgaagcccatctccggcaggtatctctctccaatcccttaaatatatggattagcactgtaaaaatgatcaagcactgtgtcattatgtaggttgagtcaagggtctaaacttttcacatagggttaatactttagagttaaaggaaggcatgaaatgtaccagcatcatggataaagttggacctaaatatcttgcatttcttaaagtcaggtttctattatactcattggactagaagtggacagcaatagagaagtgagatgaaaaatcactctcattcagtactgtgaactaaatttaaaaaaatgagggctgaattcctgttctattagattttagtaaacagcattctgtagtgcacagggaattcttcacaatgctgtgtgaattttgttggtaaacctgttacaggtgtttttcagtttgtgtttgggctaaaatattgtcaagtggcatacttgcctgaggcagtcagtgtaggatcagaacatatgtgcctttgatgaaagctgcttttcagtttaaatcactgggatgcttgtgaagctgtatcttatgaacattgttatataaacattgcctttaaaatctttggcttgagtctcaagtaaataggtttatacagtatgatctgctggctgagcagcaatgaaaataaaatgtctccctgttgtggtacatggaatttttctgttgtcaggtagaactttgcctacagaaatttaaagtgaggcaaagctgactaatgaaaatcatcatggttagtggtgttaaaaacaaagcttctacactgtggtgggaatgtaaattagttcagcaactgtggagagcattttggggatttctgaaagaacttaaaacagagttaatattcaacccagaaatcccattatttggtatatagccaaaggaaaagagatcattataacaaaaagacacatgtgcctgtatgttcatagctgtgctatttacaataacgaagacatggaatcaacctaggtgtccatcgatggtggactggattaaaaaatgtgctacatatacaccacggaatactatgcagccacaaaaaagaatgaaatcatgtcttttgcagcaacttggatggagctggaggctgtgatcctaagtgaattactgcagaaacagaaaactaaattctgcatgggagctaaacattgagcacccatggacataaacatgggaataatagacactgtggattactagagggggagggagtggggcatgggttgtaaaactagatattggatactatgctcactacctgggtacaatatacccatgtaacaaatctacacgtatcttccctgtatgtaagataaaagttgaaaaagaaagaataagaaaaataagagtttttattttaccttcagaaaaaaagagaggttcaaaaatatcataattaaagtctatgtcctcattataaattgaacaaccagagtgtctgagataagagtgaggaagggagaaaatagtgcaggacgaagtcagaaaggtaatgagaccagaccatgaagggccctggtgaccattgttctgtggatggagacttctagagcattctgagtagaaaaatgacatgatatgacatattttaacagtatcactctgactgttgtgttgaacataaaccctagggttacaaggtgggatggagaaagataattcagggaggctattgcaatcattttagtgaaagacgatgttggtttgggccaagatagtaacaatggaggtggcaggaagtggcgagactctggttatgttttgaaaatagagccaacaagatttgctgacagactagatgcgggggggtggttgttaaaatcagagagaaatcagagatgactccaagagtttttttggtttatatatctcttaaggatgggaaataatttggggaaaacagaggagagagatgtgctagaattaagagctaagttttgataagtcatgttaagtttgagacgctgcatagacacgtaagtacatatgtctcgtaggcagtcccatagacaaatctggagttcaggggagaggtcctggctggacacatacattctggaattgttgatacagagctgatatttaaagtcatgagactggttgaaccctccttgatattgaatgtgaatagagaagaggtctaagcactaaactctggcgcattgcaatatgtagtggtcagtgagatgaggtgaaaccagcaaaaagactgagaatgaagtgagttaggaagaaatctaggagtgaggtatgctgtaggtcagctgaggaaagtgtttcaaggagggatgagtgagcagccatgggaagttcctcttacaggtcaatcaagacaaaatctgggaattgatcattggattttgcaatcttagggtcactggtgacctttagcagatttgatgtaatcttgggggcaaacgctcttacaaacccctaaacctcagttaccgcatcggtaaaatggggtagtaatattattacgtatcttataggattgttgtgaaaacccgataaattaattcatataaaatgctccaaataatgcctggctcattgtaaatgctaaataaatatttgctgttgtttctagaaacctctattcaggtgctcattaattgtcagtcataatcttttggtaaggtcctgcaactaattaagaatctacctaactgaatgagcatccagtcttccctgctaggctattattgaagatctttttcagcgcctcaccaaagtatagataaatctgaaaaacatgttaactctattaagcaagaaatgaggttatcaccgcatgacttctgcaggatcatgtgctgactcctcttatttctggatgcttatccattctaaatcttgtccaggaatgcttagttcactggtctcctattggaattcaccatattttcatattcttatttgaaaactacagttgggtttgccttatttctagtcttttaccaactctttttcaaacatagctggcagtggcatagttatctctctggcacgttcttcacagtgtcgggatgaaatctgatggggctagaacacatgaactcatttagagctattaatgttttgttttcttcacaacccatcatttttaaattgcagtaaaatatatgtaacataaattttactatcttaacaatttttaaggatacagttcagtggcattaaatacattcataatgttgtacatccttaacccctatatagcctcataactcttgcaaaacaaaaactctttacccatgaaacaatagcttccattccccttttcttcagcccctggagaccaccatccgactttctgtctctatgaatttgagtattttaggtgcttcatagaagtagaataaaagtatttgtatttttgtgactgaattatttcacttagcatagtgtcctcaagatttctccattttgtagcatatgtcaaatttttccttttgtaagggtgaacaatattcctttgtatgtatataccacattttgttcatgcatgcatctgttgatggacacttggttgcttccacattagctactgtaaataatgctcctatagacatgggtgtataaatatctccttgagaccttgctttcaattcttttggatatctatccagaagtgaaattgctggatcatatggtagttttatttgtaatattttgaggaaccaccacagtgtgttccacagtgcttgtaccatttcacattcccaccaacagtgcacaagggtttcagtttctccacatccctgtcaacacttgttattttctgcaagtagccatcttaatggtgtgaggtagtatctcattgtagttttgatttgcatttccctaatgattattgatgttggacatctgttcatgtgactattggctttttgtatatgttctttgaagaagggtctattcaagttctttgccctttattgaatctgattgttttcttcttgttgagcttttgttttctttttaaatgtttgccttttattgggtttatatcgtctctcagcagtgcttataatccacattctgctcgttataatctgtcattctgtgtgaaatggggacaggcagagcaggagtcaaggacttgtgagtcctctgcatcattcatcaacactgacccataaccaaagaagcagatgcagtggactgaattgtgtctccctcaatttcatgtgttaaatcccaacccttcatgtgactgtatgagatacagggcctttaagaaggtaattaagattaaatgggttaaatgagagtggagccctgatccagtggagctggtctcctcataagaagagggagagacaacaggactctcttccaccatatgaagacacagtgagaagctggctgtctgcaagctaggaagagggccctcaccagagcctgaccatgctggcaccctgatctcagacttcatgcctccaaaactgtgaaaaataaatttctgttgttcaagccactcagtctttttgttatggtagctcaaatggactaagacaccaaggctcttctttctttctcctttttgttgtccttagcattttatgtatgcgtgtgcatgtgtgtgtgtgcgtgtgtgtgcatgtgcacaagcattacttctttggggactttagatttcctaagttgcatggaaaaaattctcatttatgctttgagataccggcagctttttaaactaaatccaacatagtggtttgagctgatgaccacctaaaagtttcaagaacttatcagagcaactacgaaggtatacttctagcttatcaaatatcttagcactaatttctttaattctctagagctgatgcaagcctatccttcttgtcttccttgcatcatttatttttctgtctccccttattttccttctataccatccacttgcaatattttctgctgaaacattttgaaatgcttattgtatgttactttagcatatatgaagcattcgtacaatatttatcaatatatggcctttgtcattcttaaagcttgtgcaagtctataatggtgagaagaataccttgtctatgcctctaatttatacattgacaaaaaatgccagcactgtaaggacttttatctgatttttccaagtcgtgtttttcttaatgtgggaatttctttcttctttaattttatgtcagagagcactcaaccatttaactattatttatagtctgtggaaatccataattgggaatctaacttcagagtacacaattatgtctacaaggcttgattacaagctttattgtggtcttatgatccagactgtggatcatacacatgtgggcacaaaggacaatggctgcttattgggaatgtaaaaactaaaagaaatcaggtatatgtgccaggggtgctgagatggggttggttaatattttatttttctgtctttacctgtgaaatgcagaacgagtatgtatcaaaatctgtatacctatataacatatgtaagtatattttaggctgacaaaaatttgatgctgaagaatattcattataacactcaaggggaaaggataaatataatagtatactttgggagaattttgaaagaggagaaggaaacatttagatgaagagttaaatatgcaagctacagttacacaaaagaaagaccatatggtttaatgccatacattagtttgttttaaaccttttgtagtttattttcattttaaaatgaatgtgtgctttaattagtgttgaagtgggctagcaaaacatatgtcttttagttaaacagtaatttatattgtattctctcccttagtcttagtgatagatctaaattctggttaaccaacaaaatgtggtctacaggcaccagggcaaacaatcaatttcttgtttgtttatttttatgttttcacagaactatgacaaataaaaattttatatatatataaaatgtgcagattgatgtcttgaaatatgtatattcttaagtgattatcccaatgaagctaattaacatatccaccacctcacagttaccttttatgtttatgtgtgtggtaagaatacttaagatctactttcttagcaaatttcaagtatacactattattgactatagtcgccatgctatacattaggtcttcagaacttattcatcttatcactgaaagttcataccctttgatcaaatctccccatttcccccacttctaagtacctggtaactacctttctactctgattctatgagttcaactttttcagattccacttgtaagtgagatcatgcattgtctttctgtgcctggcttgtttcacttaacataatgtcctccaggttcatccatgttattgcaaatggcagcaggattttctttttttcaaggctttataatacttaaaaatatatagacattttctttattcattcatctgttgatggtcactaggttgattccatatcttggctattgtaaataatgctgcaatgaacaaaggagtgcaactacctcttcaaaatactgatttcatgtcttttcgataagtacccagaagtgggattgctggattatatggtggttctatttttaattttttgaggaacctccatacggttttccataatggctgtactaatttacattcccaccaacagtgtataagtggtcccttttcttcatatcattgtgaacaattgctatcttttgactttttgataatagtcatcctatcatgtgtgaggtgacatctcattgtggttttgacttgcatttcctaatgactaatgatgttgagtaccttctcatatgcttcttggccattcgtatgtcttctttttagaaatgactattcaggtcctttgcccattttaaagtcgggttatttgtttctttgcttttgagttgtatgggttccttatatattttggatattaacctcttatcagattagtggtttgcaaatatttcctcccattctgtaggtcgccttttcattttgataattgtttcttttgctgtgcagaaactattttgtttgatgtggtcccacgtgtttgtttttacttttgttgcttgtacttttggtgtcatatcaaaaaaatcattgccaagaccaattttaaggaaatttccctccatgttttcttctaggacttttatgatttcaattcttatgttcaagtatttaatccattttgagtggatttttggatatgatgtgagatgaagtcccaattttattcttttgtatgcagataactagttttcccaaaacaatttattgaagatactgttctttccccattgtgtactcttggcatctttgctgaagattagttgactttacaggtgtgggtttatttttggattctctgtcctgttccattggtctacatgtttgttttaatgccagtaccatactattctgattattgaagctttgtaatataatttgaaatcagagagaataatgcctctagctttgtattttttgcacaagattgctttagctattcagggtcttttgtgggttacatgaattttataattgtttttctatttttctgaaaaatgtcattggaatcttgataggaattgcattgaatctgatgtgtagattcctttggtgggtattttgacaatattaattctttcaatctgtgaacatgggatgtctttccatttatttgtgtcttcttcaatttctttcaccactgttttatagtttacagtgtacagatttttcacttccatagttaaatttattactaagtattttattctccttgatgctattgtgaatgggattgctttcttaatctctgttttggataattcattgttagtgtatagaaacacaactgatttttgtttgttgataacatatactgcaactgtactgaatttgttttagctttaacagctttgtcatgaagtctttatgattattctatatataagatatatgtttttctgtatataagatttatggttttctatatataaggtctgcaaacagagacacttttactgtttcctttctaaattggatgttatttacttattttgcctaattgctctaagacttcaggtactatattgaatagaagtggtgagaatgggcattcttgtttttctgatcttacggaaaaggctttaagcttttcaccgttgaatataatgttagctgtgggcttgccatatatagcctttattgagttgaggtatattcttcctatacctaatgtgttgagagtttttatcaataaatatgtcaaatgttttttctgcatctactgagatggtcatgaaaattttattcttcattctgttaatgtggtgtaacatattttttggtttgtgcatgttgaaccatcctggcatcctagaaatagattcagcttgatcatggcgtatagtgtatgatccttttaatatgctgttgaattcagtttgctagtattttgttgatggtttttgcatctatgttcatcagggatattagatacaaccaacacttaacatgttgaaaatgtgctttggttttattctattacactttgcttaactgagaacaaagaatttataggtgttaatttaactattaataattaagtcacatgcttatttggaatatttcatatatatgcatgtctactatataatgtaaatttatgtttgcatacatatttgtgtcttcagttccttgacatatctttgtgcatgtagatggatacacatacagataaagatgtagatgtagctatagatagagctatagatatagatataaatgcagttatctacgtctaaggattaaaaaaatcaagtaaaattattttcctttcctcaaaacctcagggattacaaaggaagacccctatatgcaactgaatctaaaaatgcactgtataaggtggaacccagaatgtatatcatttgcattattatatcataggataataagccagaaaaagagctctggttctagacataattatatagtcctacctatgttacacagttgttatgagatctagtcaaataacattgcaagcatgttttaagcttttaagtacaaaattattgttactattctcagaatactcaaaatccagcccctatgtgtctgttcctgtcaaaagaggtcaacttaagatgtattttattcatcaaatcttgctccacaaggctgttagataaaaagatctgtccttctttgtccattctgaaatcaggtcataactaggctggtgaaccccaagagccaggtcagtcgtgactcattcaagtctttcagaacagccagtgaaatggttgggaagttgtttcagggtgttttttgctctgatttctgcaggatggttgtctgttcttcctatgtccagaggtgtagagctttcctgggtcatttatggctatgagaaatcatatggcttagtccagatttcccagaatgctggtgattcataatttgataaaaccaggctgaagtcatctccaaatccttctccatcacactcaatttctaggtgatagtgaaaacattttcttccctttacttggcattttcttcccattacttaatggtctgttagacattacgcattcagttaaggttttgagactgtaccttcaaaatcatgaaaacataaatcatactttcctgtattttaaagaacagattttaatttatcttctttctatttagaaaagttacaggtttttagctcttatttttactttggatcagtgggtaagtttttgatagcaagagagtgaaaaacgaagcctcccattcctgcaactgtgtttaattacggaacatgctgaaccacatttgactttttttttgtttctgaacttatgtcagcttccccagtctgtgatgaaacacgttttgcagctctacaacaaaggataaaaataaaataaatgtttaggaaagtactttgggatagctaaagagagagagccatacaaaaacacataggcattggtaggaatgacaaattaattgtgctgcctttaagtaataacacagagcaattaatgcatttaatagctttattgaaacaaaaagctcttttgcagtttgcataatttctttgtgtaataagaatgtttcataagtttatagatgaatgcatgacctctgacttagggagttttggtaatatgtatatctctgtgtttctattttcattttcagacagtattttttccttattgtgtaaattcagatctttattgcataaagccagatctaatggctttgaataattgattggtctttcagatttcatgatttatgactctcattttcaagattgtaatttttatttcttgatacaaacataccctaaatcagtttgtttcaagcattttttttgaacccagaacaacactgaatctagtgatttttaagttgcacaggcgggtcgaagattcttgagggattatcttggaactcagggaggtgtaaggcaggtgagtaggcagggcatcacactggaggttatgtgagggttttgtaccccattataagcctagcacttagcacagttgacacattggaataaatgaatgaaaaagtttaccccaccctgcatccctgctttaacctgaaaggttcatttttcccatttttttattgttctcagagtaagttttccagagtttagtagagaatttcagaaacgatgtaaactcttctctgggggctgctaatctgttgctgctactgacatacattagtatcctggctattttctctccatgacctgccttcttttccctatccctccacatcattcttcctaagcctctagcttccctgtaccatttgcccccataggagttggtatcctaaagtgctggttgagcacagtctccattcccacattcaactggcagcatgatcagaaagactgccaactcatcatggagatgggcaagttcccccaaaactctcatgcactgtataaatgcaaggtagtagtaatagtttaatatagaagtttattgatttgtcaaagtaattgatatcaccttgccagaattggacaacctcagatatcctggactttggctctctggtacgccttcgctgacctctctctctctccccgcttggtttgatgatgctatatttaaatgtaatcacactcagtagactatttgactgtcaatactctgggacagcaaaaattattagtcctctcacagtgtccttaggtgacacatgataataagagtaatcagtactttcatgatgggccacgtagatattgtgtatgatttcattttacaatgaacggcagacttcttttctaggatgtcagctataaatctaagagctttaaagacattgattcatttcatcctaatagtaatcttactagataagtgttattattacccatattttacagaagagagaaaattgagcgcacagagattaagtaacttgcagaaagccacccagctagtaagatgtggaacttggtaaggcagcctttttcaagtttggaatgtgagatgctctcaatttaatcatctctgcaatgttccaatttcgttttatccctgtgagtcccagaaatgcatttctaactttataaaacatatagaaaaagacctagagcagttatatcattattaaaatattatctctagggaagtagtatatttgttttctaataaaatgaaaatagcttcattttctctgattgtaaaaataatacatactcgtgaagaaaaatgaagcaatacagaaaatacaaatgagaaatcagaataattggaagcttcattacctagtggcatttgagtgaatatactttctgatatttctctaggcacatgtatatatataaatatagcatttttatgtatgaaactatactacactttttgtaatcaatttctatgcctacagtgtgtcatggatatttttctgtggcagcaaatacaagtatataccacgtttttggattggttgtatagtgctactttgtatggctgtaacattctttatttaagcaattctatattgaagaacatttaaattacttccaatattaatattaaaaataatacgataaaaatgattttcataagtattttggtacatggacaattacctatttgggagcaaatttctagaagatttttggcacaaaggttacgcattttttttattggatatatagtgtcaaacctgaaagactgtaatgacttaacagtctactgacatattttgagtgtgtccatttctcttattccttgcaaatggtgattttgcccatttaaaaatacctctgcttgtctgaatttgaatttattgtatggtttttattttggatattcagtgattagtgaggttgaatgtatttattatgtttattgaccatttgtatgttttgcaaattgcctactatgtcctctatccattgtttttattagtatgctgtttcttttaaattaacttttatgatctttttaaaaaacatattagcgatataagcctttcgtttatcttacgtgttgcaaatagtttttccagctaacaattgattcttcggtcctattttagtaactatttatttatttattatttgccacgtagaaattttaaatttttatatggtcaaacagaccttttcttttatggtttcttgcttttggggccttctgtacttgtagagttgtatgttgtacattacattgtagaaatggcttctttttaatgggacccagagccaggatatgtaaccaacacttatatgtcagttactttaaagtttactaagagctcccacaaacactttcttatttaattcaattaatactttaacattattattaacattcttcagatgaggaaaatgaggcaaagagaataccttaaacttcccatggctcatcccaaatcacacatctagtaaggattagaatataggccagtctgatgccaaagccatggttttagtcatgactctataccaggatcctttagacagatggaacagcagagaaagaggaaggttaaatggcccctgcctcatgctgaacagcatttccctcttttgatagaaagattaggaactgaattcttgactgttaatatgatccttcttggagtaatcggattccagttcagtcttttgaaagaaatttcagtggaaaatcaattagatgttaaaagaaaagagccataggaatgttaaggtattaagaataatgtggggtatgctttgggttttaagaattaagaggatgatgtccaagtagttaaatgaatttgtgaacatgggtcagtgaaagagtaccacgtcagagtgcttggtccatttgcagccaggcatattgaatgaactcttctctcatctcatttctaataaatagtcagagcaagtattaatcaggattttacatgtacaattagaaagggttttattcttggtattatgctggattttggtgcagataaatttctcattcacaggacactttcagtcttcaggtcagattttgcttttctaataaagaggtatatggatttcagttgattcacatcattaattatcagcatttgtgtggatgcaggatatcttgggcaaagctctgtatctgagataaagcaaaaaaaaaaaaaaaacctaacaaaccatttctgccttttatgtccctctttaaagataaattgagtagggagcagtaaacacatgatttcaggtcttgcaatgaaataagcagagctcagtctcgtaaaaataaattaggtaattcaacacagaacaaaagaaggaatataacaatgtaaagctatgtattaggtacagcagatcttacactgactatggcaaatcaaagtgtcatcattttctaatatatctcctctcagggcagttaaatatattttaaactatagagtaagttgcagtttttatgttagtttgtattccaatatcattggtgtgaaatcatcaaactctaatttctagcatttctagaaaatgaacctctttagctcccacatgaattctagaattttcaggattcttctcagtcagtgatcaagttgttaaaaaattgccttggtatacaatgtgggctctgctatttttaactttgtctggacctctttccttaacagttgagataaatcaatcatttgttgggactgagagccgtaaacgatgagaagactgttttcagagcctcagcatttatttgcacctgtgccacactgcaggaatattggcatgaccctccgttgagctgtgctctctcctttcaaatcaaacatgcagtctcagagcccctctgtgttctcaaatctcattagtagtgttttctggcttggaggttttcagaatccactgtttgtatggcagtggaaaaagacattttttctcatcagaaatcagagaaggcacgtcaatggcacaacaaacttaattgttttactgttctaataaaaaggcttcattgaaccaggggctttccctcgaagttaattatttctcacatcaggtttgttctgtctaataaaattaagcagtgaccctaagaagatgccaattgtttgacattgttataaagaacacattaaggaatttggatgcctgagaaatttattgtccttctctttaattgtgtcttccttttggtagtgttcctccaattaaccaattatttggggtatggttgtggttaagaacatgaacatcagccacacttggattgaaaccctggctggctgggcgtggtggctcacgcctgtaatcccagcactttgggaggctgaggcaggcagatcacgaggtcaggagatcgagcccatcctggctaacacggtaaaaccccgtctctactaaaaatacaaaaaattagccgggcgtagtggcgggcgcctgtagtcccagctactcgggagcctgaggcaggagaatggtgtgaacccgggaggcagagcttgcagtgagccaagatctccactgcactccagcctgggagacaaagcgagactccatctcaaaaaaaaaaaaagaaaaaaaagaaaaaaaaagaaaaaaagaaaccctggctaagccacttactatgcaggtgactttggcaagtcactcatttctaaaacacagtttttcatttatcacgtgggggttatgacacctatctcatattaaagttgtagttaagattaaatgaagtaatgtacgtgcaatactttgatagtactgcctaatatcaagtagatgttcgataaaaagattttattactgtttttaagcactgattgttaccaaactattggtgctttcataaatagcttttataaatgcttattggaatagcatttttttccatttatgtatactttcacttcaatgtaaattggggtcctgctatgtattcagtatcaggattcaaagaataatagtatgtagcccttgttctaaaggagtgcagaagataaataattctacctttacttttactgcattcacttgtttaaatattatatgtgcatttttaatggcatttgtaacctttaactctactgggaaagaatataagcatgctacccataagaattatatttcttactatagtattctgtagtatgttttcatcacgtttcttccaaaaatgacagtagttttggaaccttatagacctgaaatattctattcaatgtgtcatgccaaaacatatagtccccgctctcaagaaacaggaagggaagaacttagaagaatatgcaaatttaaatagtgagtttatgacatgaattcaacaaacaggaaaaaagcacaattagttctacacaaataattagtaagaatctcacatgagtttggccagttacaaagtggcaaagccagttaggcatatgtgacttttcacatattgcttaactggagcagggagatctctggttcacacctgtggtgcattggtctgattccgtaagacacttattgtctgttctgtgccaggcactggctcagctctggaaatacaaggtgactaaaacaaagcctccattcttcaaggaacgtaaaatcccaaatccattgggaatgtgcctgataatttatgtttgagaaatcgcttccagcctgtcctcactgcccacatggcgaggtatgcacgttcggcatgtgggtatctcatgagtgttgtctagtctatttgggctgctgtaagaaattaccatagtctgaggagcttataaacaacagaaatttatttctcatagttctgggaagtccaagatcatggtaccagtgatgtctggtaagagtctgcttcctcatagatggtgtcttctagttttgtcctcacatggtggaaggggcaaaggacctccaaagaaacacatacatgtaatatgctttgtatacatgtaaaatatatgtaaatgtgagaagagagagatcaataagatttttctctcttccagtggaaaattcctaggaaattaacagtgctgatcatttataaaaaatgattataaaaccacagtatactccaccctcctttttaatgaagttttatataagatcattattttaagtatctgtttccaactgtctctctgagtacagttttatttaatttattctgtgattggagttctatgatgatacagaatctttgttgcattctctatctctattactgtgtctctttcaatttataagggtggcttcggggcttccagaaaatataaacatgagtgagactatctcagactacattaggccaacataaatgatgactcaccacgagtaactcagttgagatggttattaacgatttctatttttgtggaaggcatatggttagcatgcaagagctctttatacatcattagcaaatttaatttttgtaataatctttgatgtatttttcaattttaagaaagcacatgagagtggtgttcatttactcctgaaaattcagcccttttcactctgattacattcattactgggatttttgtgaatgtgtttattgatactttctcaagcttgaggctgaagtgagaattaatttttgatttttatataaatgatgagggattttagctgggatgtttgaggctaacattgttgcttctctgttcaagattatactgtgggatgaaagccaagagtaattttttaaaaaagcttcaggggtgtattagtgccctacagatgctttaaagatgaatacatttttttgataaactctgtgattttagctaatgattattaatcattaagaaacaatgcttcttctagtatagagtaaaagccatctaagcttgggttttatattgttcttattttgtagtttctcccaagtactataattattctaggtggctatactaattgaatttagaaggggtccctactaattaaacaaaccattgctacattacctaaaattctaaatcagttgttcactgacctctaaatataaaaagttttggccgggcgcagtggctcatgcctgtaatcccaacactttgggaggccaaggcaggtggatcatgaagtcaggagtttgagaccagcctggacaatatggtaaaaccccgtctctactaaaaatacaaaaattagccgggcatgctggcacgtgcctgtagtcccagctactcagaaggctaaggcaggagaattgcttgaacctgggaggcggacgttgcagtgagccgagatcgcaccactgcactccagcctgggagacaagagcaaaactccgtctcaaaaaaaaaaagtttcacatttaacacatgatctgttcttgatttatatcagtattgattattcctggctaattttatattcgaggccaacaagatgcatcagatttattctgcagcttcattaatcttgacaaatcactaccttaccccatacattttgactccttagacaaaaattttaactaagttcagatttagaagtcattttatgtagatattattggaaaatatagatacatttgttagataattctcaatttaagataagaaaaacttaaaacattttgctctctgtagcaatttatattcccagcaggggtttagccttaagtagacagacataccaatctgtgaaactagaagggactataccttactgcctgtaaatttcttcagtgttaaaaaagatagttgaagctttctatcttcattttccacacttaaagtggcttatgaaaactattaattttatatttaactatgtcatatttgtgtgtggaacattgcttttagagacaattattaaaagaaatctagatggccaggtacggtggctcacgcctgtagtcccagcactttgggaggccgaggctggcggattgcttgaggtcaggagtttgagacagcctggccaacatggtgaaaccccgtctctactaaaaatacaaaaaatagctgggtgtggtggcgggcacctataatcccagctactcaggaggctgaggcaggagaatcgcttgaacctgggaggcagaggctgcagtgagccaagattgtgccattgcactccatccagggcgaaaaaagcgaaactccgtctaaaaaaaaaaaaaatcaagatatagaaggaagtaaatgatgataaagcaagataagagaaagtagcagactggattctgatttaactcagcaaacagtataagtactaaaagacaaagaataagatttgatggttgtcatcaaccaaatttctatttattataataaaaatttgaaaaaattattaacactgaatttgctgagatttattatgtgagggacatattaatgcatttcattgttcttttacatgcactacctcatgtaatcctcataacaaccctaataggtaggcaggcttaggtaaaaataatcttgagtcatattttgtaagtagtataacagaggtatgtctaaaacactttacttttttttttttttttttttgattaggagtctcgctctgtcacccaggctggaatgcagtggcatgatctcggctcactgcaacatccgcctcccggtttcaagcaattctcctgcctcagcctctcgagtagctgcaattacaggtgcctgccaccacgcccagctaatttttaaaatatttttagtagagacggggtgttactatgttggccaggcttgtctggaactcctggcctcaagtgatccacctgcctccctcctaaagtgctgggattacaggtgtgagccaccgtgcccagctacttgacagtttttgagttaaaaaaaaaaaaagctagttaaaagccttcctccagtaatctgacatgctgatgtttttttcttatatacaaaatgttcacaaatattgacccacttctctaatttgtattctattttattgatcaagttgtctatttctgaatcaatgttgtgttttcttaattcttatatctttgtaatatattttggatctggtagggtacaattccaggctttgtctattcctgatcatttactcttctgtatgaatttcagaattatctcatcaagttccatggaaacattctacttggcttttgattaagattatgttgaattttcccagctactcgggaggctgaggcaggagaatgatgtgaacctgggaggtggagcttgcagtgagccgagattgcgccactgcactccagcttgggtaaaagagcaagactccgtctcaaaaaaaaaaaaaagaaaaaaaaaagaaagaaagattgtgttgaatttataggttaaatcaagatcattatgttgtttataccatcaacatttcctctccatgcacatggtataccttcatttattcatatattcttgtgtgtccttcactcaacaaatatttttaagtatatactattttagagtactgttctaggtgttagggatacatcattgtttaaatgcccctactcttaagtagtagtttgtatttcagtgagggaagagagaaaatagagaaataagaaacaaatgtataatatgttccattatgatacaataaagtagggtataggatgacagaacaacggggtgtgtgtgtgtgtgtgtgtgtgtgtgtgtgtgtgtgtgtgtgtgtgtggtgtatgcacacacataccctgtttgattagcagagtcttctctgataaagtaacatttgaatcagggaaaaaagtgagccatgtgaacatcttgagaaaaagctgctttccagagggaacactggtgcaaaactgtgagctgggaagctgcctgatgtgctcaaagaaccgtacagagcccagcatggttagagtcgtgagagagagggagaaacattttgtagttttctccataaagatcttgaatattccttgttagatttattcccaggtattttacagcctgtgctctgaatgtctattttatgttctttccaaaactaccttttcaatttgttattgctgctgtgtaggagaattactgattcttgtatgttgattttatgtcctgttacataacttagtgctagtattttagcagttgattctatttgtttttttaaattaagtgaaaatcttgtgtaatgactatttgtctccatcctagactgttttattaatatttttttccttgtcttgttacatttctaggacaccccgtaaaatatgtactagtatctgtgaaaatgagcatctgttttcctttctctaattttaatgaaatgcttccaatttcataataagcatgatgtttgctatttctttaataaaacaggcaatatttcttctatttataatttgtaaggtttttaaaaatgaaactttttagcatctattaagcttgtgtgtgtgtgtgtgtgtgtgtgtgtgtgtaacatgttagtgtagtgaattgccttgatatctttcttatctggaactatttttcaattcttggtcacatactgattcaaaaaatatcaagtgcctacaggaactggtaccattctaggcacttgagttacgttagtgaacaaaacactcaaaaattcctggcataatgaagctgatattctaatgatggaaagcaaaaaaagaaaaaaaccaatacatataataaatgaaatattgtatttttcgttagaagagataagtacaatggcaagcggaaggagcaaagcatataaggagcagagtgtgtttggggggtttgtactctcagttagatgggctgacattgtgtggttctaagcagaggtatggcatcacctgcctgtgcctctgcgggctcactctggacaaatagactgtgtgggggtgtgggtggcgggtgagcaaaggaagcaaatggagacatataaagagcttattataggaatacaggagggaggtgattgagactgacttggtggatggcagtgggggtgaagaacatccacttctattttgaaatagaggtaactggatgttttctgaccaattgcatacaaggtgtgagaggaagagagagagaggttgaggtttttggcctgagcaacctgatcatgatgtttgttttaataaaaagctagatttgatttgctaataatttatttaggacttttacaatgttgctcataattaaaattgtgtgagaactttctgttcttccatatcccttgtctggttctattagcctttaaaatacgtagcataggccgggcgcggtggctcacgcctgtaatcccagcactttgggaggccgaggcgggcggatcacgaggtcaggagatcgagaccatcccggctaaaacggtgaaaccccgtctctactaaaaatacaaaaaattagccgggcgtagtggcgggcgcctgtagtcccagctacttgggaggctgaggcaggagaatggcgtgaacccgggaggcggagcttgcagtgagccgagatcccgccactgcactccagcctgggcgacagagcgagattccgtctcaaaaaaaaaaaaaaaaaaaaaaaaaaaaaaatacgtagcatagtgttttctatgtttgagagcagcttggctacagttagttttcttttacttaaaactttggttgagtttgctcaaagagtcatttggacctggtcaggtagtaggtcaatgagtcagcatcccccagaccacccccaagtttggtgatttgctagaaggagtcacaggactccatattgtgatactcatgactaagatttattacagcaaaaaaaaaaaaaaaaaaaaaaaaaaaaaaaaaatccaaagcaaaatcaacaaagggcaaaggcacatggggcaaagtctggaggacactgggcacaatcttccaaaaattctttcacagcgaagtcacacaggacaagcctgattcctccagctatagctggacacatgtgaagtgttatttgccaggagggctccagtctgtgcctctgggtgtttgcagctttatgtcccttctttgtttaggtgctgtctcctatctttgaaggattcctaatagtttccctgaatttgaggtttactgaggattcttcctctaagtttcaacaagctattttgtaatttctaggaatttggggtgggaaggagagatcatagcatgttctaaggctaccatcttggccagggaggctctttttgtgttactgagtaggcgggtgaacaggaagcaggaaggtgattgaaagtcagacgtatccgtctgtcatgtctgtgctcatctctgctcccctgacaactaacaaacccgttgacttcattgcatttcagattcctaacctgtaaaatggagatcactgtagtcctgtgaagatgaaatgtgttcaagaatggtagcctcctatttactacatattgatgcttaacaaactgtttttttccccttttttggtcaaataaaatgaaatatactgttatacaaactgagctgaaaacatgtagaatccattacccacaaaagtttgtgtagtatgtatacataattatgtttgaaaatcatttaaataaggtctttgtggatagattcataatggagagtcaaggagacccttgggatgcttgggaaagtatctttaatattttgaagacgtcattgtggtagaagatgaccttcatcttgcacaatgccctcatgtgactaacagcaggagaacatcgactattggttgatccactaagttctttattatgctgttacacagggcaggggccagagcaagttgcacatgctgctctgctttgtgcttgtcacttgccgctccagccaggccacatgagcttgagaacggcttcctgttttatagaaaggccatgagtgcacagggaatgacaaaacggaatgactaggtatggcaatcctacttgcttttagttttctatacctgttactcagactccttgtctaggcaattgaccctcaatttccagaccctgcagtcatttgtggattgcagtgcttggtttcctgtcctggaaacctgatctccctggatttcaggactcttattatatactaaccttggcagttgccctttccttccagacttgcatgaagttgtcaatgagaccatcatgtgggagagaataaaaatgcacgataaactaggaaatagtcagtgtggcactgtgaagacaaatcatggcagacttatttcatttcttctctgatagagtgacaggcatcataaacaagggagagtaatgggctagatctatcttgcttccctgtaatcactcctgaaacactcaaggtatgactgggtcatattttatatttccatatagatgagaaacaggatctttgtcatagggtctgattgatctgtctagtttctctgagattccacatccaagccaacatcctggataagttgcactaacaaaaaatcagagcagcagaatttaataaagaattaaggagagaagactgtctagaaagacagtgagacacatcctacatgtggaaagtatagtcagaattcaggaagggattgggattgtaaagttaagaaaatggattagggttgaaaatgcaagctgaatctttacaaagaattcaggaagaattgagacagtgctatacgttgttcattgcaggatacattttttattttgcttttgagacaccctaggtaaggtacttgagaacactttggggtcggttggattctgattccttctcaagtacagtaaactctctttacagatatatacatttcttgctgatgaggaaagtggaatgagaaagaatatggatgtcaccataaaatgagacaagaaaaaaaaagttttgttatgtttaaaaaactctcctaatttgtattctattgatggtgagtaaacaatataacccttacatgtgaagagtagtctattcatttctctttatgaatttaacaatatcaattagaaagccaaaggggaaaagcccatctatattctatttgttgttcaacagagagagaaatgagttgtacatttttagtatctgaccttttttttaaaggaagatagattattctcattcttaatggaaacctgtgaatagtgttgatccaagtgaaatatagatttttgtaaaagagaggaaagggattttgttacagaatgagcttctatgtttcctttacatcttggctcaatcactatttcattagagaagccttctctgacttcccagacaaggtcagctcaaccttttctatattctcacagcaccaagtatgtgcgtgtctgtctgtgtgtggttacacacacagacatactatatttgtgactcttttacgtgatattcccctttagatagactgtaagctccactgaacacaggaaatgcacatgttttggctcatctttcctaaccaaagcctagcatggtgtctaacacctaatacactctcaataaatgaatgagccaataaacagtgaatgtggtctagatattaaaatgctgagaaaaccctatgcagttgaatagaactatattcattgctcatgaaaggagattttacttaaaagttttaccttagatgtgctacctttttgagtaagggaggcaaattttcaaacctatgggagagttagggtggggagtaggagacagcactgccacattctgggtgggtgagagctggatgtgaagtgggcctggtgccagtctcagtcttgacctaattttgataactgttactgaacacgttgctcttttatcatggcgttgaaagcctatctaaaagcactctgtgggacctttagatatagcaagtgaaagggatcaaagccctgaaaactagacattgttggctcaccctggaaggctggcttcagtaacactgcttccctcttctccactgacaactggttcactgagcaggaagttgggattaatttactggagagcagggaaggtgacaggatttccacagcaattgaacacatttagcagagaaatgttctaaccattggtgacttcatgatttcctctttcttgggaaagtccaagactcttacctaacatttgtcatccttctcccctgcccccctcaatgaaggagaatgatagaaaggagatcttagcaaaaaaaggaaaaaataagaacaaatccaaacttttatcttatagttactatggaattaagtccaaaaatgatgctggctttcatggcaaacatgcatacttctctccttccatagcctcagtttctgtgccttattattgtttatattcattaataattttagctaatagggttattatgcaaatgttaccaggtgtttttatttgaagctaaaacaaaacaaaagaggtttaattgtattctgaaggatctaatgaactggggaggctttgagttctgaagataggacaaaaaaagaagatggggctacttgtttggtgaggtagattttcttttcttagcctactaagggtataatgccatcagaacctgaagcgtggcttggtgacttttcaaagtctctaccagctctttgattctgtgggcaataccgaagaaatacactgatactcaaaaatgcaactagaaccatggtagcgtatattttgaattttataaatgagtgtcctttattttgtaatctccgaggttagttccatttgcttctaaacttcctttgatctaaaaagcaaagcttgaacatttgacccagctattaacattggtggtagggtttagagaagtcagacataatttcagatgcaggatatgcatttggcttgtcatgggggaaaatgaaatgagaagtacaccccaagtcacaattcaggcctttttatttgatcaaagtccagccttgtagtcatctttaacagccactgaagcctcagtgtagcatttgtgaaaaatataaaacatgataaatatgtctaaaagaaaatgttttttctaactttgatgaaggcttactttctgtgacatgtatgtgcgtgtgtgtgtgtgttgagtattggtggtgggtgacccaagacatctccacatcatcaggaagggtgtggtttacaaggaaaccattgaggaccataggggaagaggtaggggcatgtgtatgtgggattttgctgaagatgtgaggaactttttggttgaataggaaaaatcaaatgtaacacccactctagttaataagtctgactctaactaggttcatctgctttttcttctgtcatagtagcatacaagtgaggtagtatggctgaatttagcgtggagacccttcacttgtgtaacataataagtttatgccagcgaaggaaaaataggtacagtgactaagagaaaatagactggtaatttcattttcaattcgtaaataattcacttaaactaaaattatttataggccattgtggaaacaattactttttgacttatttgcattcttaatgaagacgatgtgagtttttgagtggcttgcatttgtgacaaatgcatcaggtatggtcttggaatatttttgtagaaatgccataatttctgacatattggaaaatcacactcttaattgaaccaaagatgttttagtttcttaagaaatatgtaaaaatgatatttttcatttaagaaaatagcgtgtgacctcctcactaaaatattttctgaaaaataaaaaaatatgatttataatataataaaattataatattagatctactttttagtattaaaactgtaatagcatcagtaatcatacattctgtgtaactttgatagccccacaaatggagagaattattctttcatctatatctattcattatttttctctttagatatctccttgggccatatgaatgatgcagtctagcttcatctttgtcagtatggaataggttttttttaacgtttgtttactattgtgctttgacacattccctgctacttctagattctattttctgagcacccaatgactgtcagcatcctacacgggctaagagaatgcgacaactgaagaggaccttacatattatctgaccaaacgcttatgaaaccaaagcttagatatacaaagtcatacaacttcttctatatttactttaactgtcctcctagttctcatatttttttccaatttgagaatagtatgtgttccttgcttcaaaatggacagtcgctgtattgggtcttgtgcctaccctttcttggagaaacctaatttccataatgaacatttgacatattttcaccctgagatttttagcataatacagatgaggaatgaactgagatttggtagtacaagggtgtgtgtgtgggtagtggtgaaggttgtggtttgagaagtccatcttttatggagtgaagagaaggaagacaggcctattttttcatttggcaaacatttgctgaagggctactgtattgtactcctacacacaaccatttattattccgaaataataggcttggtggtgtttcagttttcagatttttaaataatttgtgaaaaatcacatagttgtcatacatttattcataactgtcttatgaaatagatattatcgcagacgtggtggctcatgcctgtaatcccagcacttggggaggccgaggtgggtggatcacgagtctaggagtttgagaccagcctggccaacatggtgaaaccccatctctactaaaaatacaaaaaattagccaggggtggtggcaccgcctgtaatcccagctactcgggaggctgaggtgggagaatcgcttgaaccctggaggtagaggttgcagtgagccgagatcgtgccattgcactccagcccgcatgacagagtgagactcttgtctcgagaaaaaaaaaaaaaagacatagatattattatccacatttttttcagataaaactgatacaaagaaaaattaagtgatttgcctaaattcctattgctaactggaggtagagctaggatttaaatcagctttttctgactaaaaaattgggctcttacaaaatatactatattgcctgtattagactcaacctatgctggtgttagagagatgaattaagtcatagtgtctaagcattattttatataaaagaaagaaaaactactattataatcacttcccataatgtctactttttaatttgtatttattgtacaatttaaatccctacctttcaccacatagaaaaattaattcaagatggattaaagatttcaatgtaagacctcaaactataagaatcctagaaaaaaaaaaactaggaaacaccattctagtcatcagccttggaaaagcatttatgagtaagtcctcaaaagaaactgaagaaaaatcaaaaattgacacacggggaactaatgaaactaaacaggttatgcatagcaaaagaaaccatcaactgagtaaagtggcagcctacataatgggagaaaatatttgcaaactacaatgacaaaagtctaacatccagaatctgtaagaaacttaaaaagttgaacaaggaaaaaaaaacccattaaaatgggctaaggacatgaacagatacttcttaaatgaagacataacagcagacaacaaacatgaaaacatgtgccacacctctgatcatcagagaaatgcaaatcaaaaccacagtgatacaccatctcacaccagtcagaattactgttactaaaaagtaaaaatagatgctggtgaggttgcagagaaaagagaatgcatatacattgttgattggaatgtaaattagtttggccattgttgaaagcagtataacaatttctcaaagagcttaaaacagaagtgccatttgacccagcaatcccattactgggtatattttcaaaagaaatccaatcattctaccaaaaagacacatgcactcacatgttcttcacagcactattcacaatagcaaagacatttgatcagcctaggtgcccatcagtggtagactggataaagaaaatgtggtacatatctaccatggaatactacacagccataaaaaagaatgaaattatattctttccagcaacatggatgcagctggaacccattatcctaagtgaattaacccaggaacagaaaactaaatactgcaggtttccacttttaagtgggagctaaacattgggtactcatggacataaatatggcagtaatagaaactgggttctactagcttggggagagagggagggggcaagggttggaaaactattgtgtactatcctcggtatctgggtgatggaatcagtcacaccctacacctcagtatcacacaatatacctaggtaagaaatctgaacatgaaccctctgaatctaaagttgaaaaaaacccaaaaataaataaatgaaaataaataaaaaacattttaaaatcgaataaaacttttgggaatgaaaaaagtgatggaggctggacacagtggctcatgcttgtaatcccagctatttaggaggctgaggcaggagtagtgcttgaaccggggaggcggaggttgtattgagccgagatcatgccactgcactccagcctgggcgacagagcaagactctgtctcaaaaacaaaacaaaacaaaacaaaaagataggaagcatttcatgtatactatcctgtaaagcaactttttaagtcttttgttcatttttattgggttgtctctttaattgattcgtaagcgttctttctatattctggacatattctttgttgggtatatatgttacaaatatcttctccctgtgtgtcacatgtgttttcattatcttatgggattttttttcaaaaacttttagttttgttgaccctcctcatcatatctttgttttcttcttcattaaaatttgctcttatcttactgatttccttcattaaatttcttttcattttttagaaaactttttcatttggatgcagagctcatttattttcaagctttgatttctttactgtaaatatccactacttactgtaacttagctttaccaccaaatttaacatgtggtaccataatcatcttctataagatacagcattattttatgtaaaagaaagaaaagctgctattataatcacttcccataatgtctacttttttatttctatttattggaagatttaaaaattttgttgaaagacataattttgccatatattcttcttgtgcatacacataaaagtatatataaaaataaattgcttaagctattcattggttaagctatttattaaacttccccacatacaaattccaactcttctgaatttcttcacattatgtaattcttatagtatccgttacataatcaagagcatttcctatagagtgctttactattttccctgggatttgcttcctaattgttgacaattattctgtgagttttgttgctggtactttattgatcttactagaaatatgctactggatttttttggtcaacaaacaggatttctatttcttcctcagatggtcctacaagtttgcagactgaaacatggagaatgctatttccttgtcactccactgggaataacaattgcttatatgcagatcatggcaattatgtcatctggccaacgataattagaagtcgttgttgattacaagatacagtttgatttcagagatattaaaatatgaaaaaatatgtgccttaggttagacatttagacacaaggtcctgttccaagaattaaaaatttttttaattcaattttttttttttttttgagacggagtctcgctctgtcgcccaggctggagtgcagtggcgggatctcggctcactgcaagctccgcctcccgggttcacgccattctcctgcctcagcctcccaagtagctgggactacaggcgcccgccactacgcccggctaattttttttgtatttttagtagagacggggtttcaccgtttttagccgggatggtctcgatctcctgacctcgtgatccgcccgcctcggcctcccaaagtgctgggattacaggcgtgagccaccgcgcccggcctcaattttttttactgtatagatttatggggtaaaaagtcatgttttgatagaagtgtatacattatggaatgaataaatcaagccatttaacatatctgtcaccttatttatttatttattttttggcgagatcatttaaaatctactctcctagcaattttcaagtatacagtacatgatttgttttcctattttgatgtcttctttcttccttgacccatacataggttattggaaagcttattttaacattactgtacacatgagtttttggattgttttatttttgctattaatttttaatatttttttaaatcagaaagtaagttattatacaaatgtttttgaaattttcaagacttgctttatgaccatgatgtggtgatgtgctttttgttaacattcctgaatgctttagaataatgaaatttttgtgggttgtgaattgtgttgtccaaatctgtaattatttagaaaaactgtatggtaaatcactttttaaaataaatgtgttaaaatctccaattacttttgtgaatttttcaaaatctccctttacagtggcaatttatattttatatatttgaggctacgttacaaggtgcataccaatttaaaattatgtctccctggggaattgaaattttgatggatttctaattatcatccaccaactattaaccattaataattatgagtaattacatataactattctgcatataatttctattatgtagcaataatttatgatacctctatccattatttttacattattgtatctctagcaatatttgcatttatgtctagcaatgacttgtagattaaggaacattttgtctgctattaataccagatttattttgctgagtatttctctgtatgtcatttttagacattaacttccaatgttcttatactcttttgaatctcttgtaaacagtacatagttatatttttttaaaaaatcactttgacaatttttgttttaacctgttgttagtctatttacattagtttgaattgccaatacatttaaattcatgtctgtaatcttactttgtgctttctgttttcctttagaatgacttttttctcgtttactattttgggagttaaaatctccaagtctattatttcagcgatttctttagatatcttaatgtgtatgcttaacatagtctaatgttaatgagtgtctttaccttcttccagtgtaatgcaaaggctttaaaacaaaatctattcattctcttctgaacttttatgccattgttcacttctgttcttttagccctttctatttagttttaactccagaaattagacatcatagttattattttttctcttactttctaaaatgtcttagaatttaacagtttattacattatatttttcaacctgtgttcctaacatattctaagatacttaagaccaagtatctggtcttatttatttttcattggtccccagtgcccgggcaatgccatatacttagcaggtgcttaataaatacttgctggctcattgactcagcatccaattatactcatgagtttcattaaatgagaaattttcacatccaaattaaaacatttaagttttttttcctctgtggttagtattggtttgccatgctccatttccatgggactgatttaacagaagtttcaattaccacccctccccctcaatttgttgtgggaagtggtgggtggaaagagagataacaagaaacaaagagggaacacaaaaataccactgtattttgtaactacgtgaaaaatggtaaaactaaaatagtttcatttttcatttgattttttttaacctaactgtgttcttcctttttcacttattgacatctatcagttctcataatattcctgtgctgtagaagaggcagtaatacattttattcttgggccttgttctgggtcaaacagggccatggtagagctaagacaaagttcaattctcctttctctttatccgtgcagttttttttccccccatattccagcatattccaggtaaaaagcttctttcttctgtgtgggttgagcactcttgttaagttttcattcttctctttgttacttggttcatctagaaaaacatttctttcccactaataaaaatacttttcttgccttacaatacctgacctaagaatagcttgaaaataaacctgaatttcccttaagataatgtaataaagggacaccagatcagacatctgttactcattacttataatccatggctaaaagtcatgctaataaggagttattgctatttgtttctcagatgcttgctcaagagactcatgcattgtctttagtcattttcactttgcttgtgatgtcagtaaagcattagcaaaattggaaacactggctattaatggggaggaggggactcccaccataacacaatttagtgatcaaaatgtgtcagttctagccactgctcacagtgaccatgagttacatttctcagttgctgaagagcgatttggaattcttagctttctataattgttttgttttaaagagaggcaggctgcttgttatgtatattcctcatatgtggctgtggtgatattacttatttatgtgcccctcaactaacaatgccattgttaagttgaaaatattggaagttgaaaatgcatttaatgctagcaatgcagtattgtacatacacaatctttgacaatgtctaaatattccgttgagattatttattgtattaagttgtatatagttactgggactgaaaagactcaacaaagggctacctgtgacctcacgaaggtctttgtttctgaaaaatctttaaattctgatcaggatacctataaagaaaaaaaagcaattcacttcatactccatatgtcagatagcaatttattgtgtgaattctgttgctggatggacaacatgtgctatgttgattgtaaaactgaaccgtgaatctaccttaggaagaattttgaaaacatacagattaatctatttttccttttcctttaaggatactcctcatggtaagaggaaggtgaaagggaggctccttcacaatttcaaatatttgttggcaatgtgaaatgaagaattgaagtagctataccaatagtaggcctccatcttgtactcactccccaatcctaaagcattttcatctcagttatctgcaatttgctgaaaaaagtgaattgaactgtttcactgtgttaacatatataggtccttatgcagccaaacagaatggaagtctggttgattcataggcttagctgtaggtggcctattgacatttcaaatagaaagaaggatttgcttggagctactgatgactattgctgctgctcttttccttttagactgtgaatgttaccatcagggaaagtaatttttcttgggactgttgctgtaggttccctgcttctggacatatatatggactattgggttgaaaacacagtagaaattttcatcatttttgcctactgggaaagcttatgatgtgaaaacaatttctttcttatagtcccccacccttaattattatttttccctactgtcagggtaacttaaatttttacctaaatgaaattaggggtatatctgcttcaggagttcatagaaggcagagttcaaagtagactaggctatccatgtgtgctacatagaggtgttcctaagtaatgctgatgaacctttacaaaatatgtctttggagtctaagttctaccactagattttttaatgagaaaaagacatcagtctttggcttttgttaactttcaatgtctccttgtcatctctctgaactgagaaggctataactataggtatggcatatggtgcatatttatttgttttttactcccatactgactcaggaaatgttttgcttcattaaactcatgatgctgacattgggaagccaaggtgggtggatcacctgaggtcaggagtttgagaccagcctggacaacatagtgaaaccctgtctctactaaagaaaatacaaaattagctgggtgtggtggcgcatacctgtaatcccagctactcgggaggctgaggcaggagaatcgcttgaactcgtgaggcagaggttgcagtgaactgagattatgccattgcactccagcctgggcaacaagagcagaactttgtctcaaaaaaaaaaaaagtcatgatgctgaatgaattattattgactaatagagttcttaatctgtactgataccagaagggttaaatttgtggggtactaagtcatcagaatctttctataatttcctaggtgcataaaaaaattaacaaagaacacttaattgtaatatgctaaaatatctcaaaaatagatgtaggaaagaacgttgccatctcacatatgcaaagcttaaaggcttactaagagttaattgagcacatgggaattatatattatttgtaattttattagctgagtctaaaaccaaagaaaggctgaatgtcaactctcctttcattattaagttcagtgttatgaatttaaggtctttggctctgtttctgagttatcattagagtagattataggattcgttatctatagattcccagctgtagaacagaggggaatgtattcatttagagttttagaaatgaaattaagaagagttgtcttttgaaatatctgaaaagtttattgagctttggtgagtttaatttcagtgcatttaatgaaagtcaaaggtggattcatttagttaaggccatcagatggagccaactgttctgtgcaaagagaaagtaagactggaaaaatgacatacaattaaccttttgcttgtaattcagcaaatggtcaggcaaaagctatatagaattggttggatgttaatatagtagaaattattgacaactgacctcagcttccaggttgttctagggggtgttgtttgaatatggtgatataagtaaagatatagtaattttctggaataagaaacctggattaattcattggttctgccacttgagatggagggaatctacatgaggtagatgaacacatacacacttacaaacgtgcaggagcaaaataaaagaaaacacttaaattgcttgattgatgacagtgtttattatttactagtctgaattcttccctttgcactcctacagtttccggtccataggagtatagatctctcctctttaatacttagattcagtgtgcctgtgtgcgtgttttgtgatgtgatgtcttaaaatatccagcacaaacgtatctcagagatattataggttcaattctaggccacctcagtgaagtgaatattgtaatacaatgagtctctcataattttttgttttcccagtacatataaaagttatgtttacatgatactgcagtctattaaatatggaatactattatgtctaaaaaacaatgttcataccttaatttaaaatgctttcttgctaaaaaatgcaaaaaatcatctgagtcttcaatgaggcataatctttttgcgggtggaagatcttgcctcaacatacgtagatagctgctgactgatgagtagtcattgctgaaggttaaggtggctgtggcaatttcttaaaataaaataaaatgtttgcatgcagtcttcacaaaagatttctctatagcatgcaatgttgtttgattttacccacaatagaacttctttcaaaactagagtcatttctttcaaatcctgctgctgcttgatcaactaagtttatgtactattcttttttttgagttggagtctcgctctgtcgcccaggctgaagtgcagtggcatgatctcagctcactgcagcctcccaagttcaagcaattctcttgccttagcctcccaagtagctgggattacaggcacacaccaccatgcccagctaatttttgtatttttagtggaggcaggatttcaccatgttggccagactggtcacaaactcctgacctcaagtgatccacctacttcggcctcccaaagtgctgggattacaggcttgagccatcatgcccggccatttatgtactattctaaatcttatgttatcatttgaaaaatgttcatagtatcttcaccaggagtagattccatctcaaggaaccactttcttcacttatccgtaagaagcaactccttgttagttagttttatagtgaattcactgcagaattaaaatgctccagttctaattctagttctcttggtatccccaccacatctgcagttactccctccactgaaatcttgaacccctcaaagtcatccatgagggtcacaatcaacttcttccagactcatgttaatgtagatattttggcctcctcacatgaatcatgatgttccaaatggcctctagaatggtgaattctttctagaaggttttcaattttctttgcccagatctatcaggggaatcactgtctacactagctatagccttatgaaatatattatcttaaataataagacttgaaagtcaaatttactccttgatccatgggctgcagaatggatgttgtgttagcaggtatgaaaacaatattcatcttcttgtacatctctgtttcagctcttaggtgaccaggtgcattgtcagagagaagcacccttttgaaaaaaaaatttttgggggggtacaccaggtctcaacaataggcttaaaatatccagtgaatcatgctttaaacatatgtgttgtcattcaagctttgttgtcccatttatagggcacaggtagagtagatttcgcataatttttaagacctttgggtttttgcaattgtcagtgagctctggcttcaagatgaagtcactggctgcattaactactgacaagagagggtttgaggttttgaagccagacatgacttctctgtagctatgaaagtcctagatagtatctccttccaaaagagggccatttcatttacattgaaaatttgttgtttagtgtagccatttttaccaggcatcttggccagatgatctgaataacttgctgaagcttcttcatcagcacttgcttcaccttgcactttcatgttatggaaatggcttctttatttaaacctctggaccaatctctggtagcttgcaacttctgcagcttccttacctctttcagccttcatacaattggggagagttagagccttgctctggcttagtctttggcttaagtcaatgttgtggctgtttgattttctatccagatcatttaaattttctttatagcagcgataaagctgtttctctttcgcattatttgtgtgtttagaggaggaacacttttaactagttcttcaagaacttttcctttgcattcacaacttggcttattttttgttgcaagaagcctagcttttggactctttcagcttttggcataccttcctcactaagcttaattatttctagcttttgatttaaaatgagagatgtgggactcttcctttcactgcaacacttaaagaccattgtagagtgattaactggcctaatttcaatattgttgtgtctcagggaacagggagacccaagtaggggaagaaagacaggggaatggctggctgatggagcattcaaaacacaaaacatttattgattaagttcactgccttacattggccaagtttgtgacatccctaaacaatcacaataatatccaagattaccaatcatagatcaccataaaaatatgataataatgaaaacatttgaaatattgtgagaattaccaaaatgtgacacagagacacaaaatgagcacatactgttggaaaaatgacatcaatagacttgcttgatgcagagctgccacaacctttaatttgcaaaacgacagtatttgtgaagcacaataaaatgaggtatgcctatatagggttataggattaggggcatgatgtttagtttcaagtcttttttttttaacttttaggtttgggggtccatatgaaggtttgttacataggtaaactcatgtcacgggggtttgttgtaccgattattttatcacccaggaatgaagcccagtaccaatagttatcttttatgctcctctccctcctcccacttccaccctcaagtagaccccagtgtctgctgtttccttctttgtgttcataagttgtcatcatttagctcctacttagaagtgagaacatgcggtatttggttatctgttcctatgttagtttgctgaggataatagcctctagctccatccatattcctgcaaaagacatgatctcattgttttttatggctgaataatattccatggtgtagatgtactacattttctttattcagtctgtcattgatgggcatttaggttgattccatgtctttgctattgtgaacagtgctgcagtgaacagttgtgtgcatgtgtctttatggtagaatgatttataatcctctgggtatatacccagtagtaggattgctggtttgaatggcagttctacttttagctctttgaggaatcgccatactgctttccacaatagttgaactaattcacactccctccaacagtgtgttagtgttcccttttctctgcaacctcgccagcatttgttattttttgactttttaataatagctattctgactttttaataatagctattcagagatggtatctcactgtgattttgatttgcatctctctaatgatcagtgatactgagtttttttgcatgtgcttgttggctgcatgtatctcttcttttgaaaagtgtctgtttatgtcctttgcccacttttttttttttttttttttttgagacggagtctcgctctgtcccccaggctggagtgcagtggcgcgatctcggctcactgcaagctccgcctcccgggttcacgccattctcctgactcagcctcccaagtagctgggactacaggcgcctgccaccacgcccggctaattttttttttgtatttttagtagagacggggtttcaccgtgttagccgggatggtctcgatctcctgacctcgtgatccgcccgcctcggcctcccaaagtgctgggattacaggcgtgagccaccgcgcccggccctttgcccactttttaatggggttgtttttctcttgtaaatttaagttccttatagatgatggatattagacctttcccagatacatagtttgcaaatattttctcccattctgtaggctgtctgtttactctattgatggtttcttttgctgtgcagaagctctttagtttaattagatcccatttgtcaatttttgctattggtgcgattgcttttggtgtctttgtcatgaaatctttgcccattcctacgtccaggatggtattgcctaggttgtcttccagggtttttatagttttgggttttacatttacatctttaatccatcttgcattgatttttgtatatggtgtaagaaagggtccagtttcagtcttctgcgtatggctagccagttctcccagcaccatttattgaatagtgagtcttttccccattgcttgtttttgtcaactttgccgaagatgggttatattaatttgatggctggttgaatcagaacatgtttatgaacttcgtcttctaatttttctacttagttttctaatgcctttttaaacaaccatctttaatacccatggataattagcttctctcctatgtagttatacattcaattgaaatgcaatagtactatgcaggataatttattaccatacagaattgttattgtgtagaatatggcacttaatgagccaagttttttctcacatccaaacattataggtactgaagtagtctgaatgtcagagtctggaatctgtcctggctgcttgtcttatggagattctactctcttaggaatcggagaggcagaggaatgggaacagggccagcatctaaaactccaggccggctctgtcagttaatgtgctcatcggctgctctctcgactactgcatcatcatcccccaatatctctgctcttagttgttgacttttcccttgcttcctgccatgtggctttgtcatgcatgatattcttctcctctgcaattgagctttttttggtgcagtctctgcttttcctggcttggcccccatgtgatgctctgctgggatgtaagctctgtgagggggaggttttcattccttttgttcaattctgtgccctcagtgcctagaacagtgtgtctggcaggtagctgactctcaatcaataagtatttgttgagtaaaatccttggacttttgtctatatctttttattttaactctcacttttgcatttccatgagtagcctttgtcatcaggtacataacttatatcacctagggtgtggtataggaactttagacaaaatctcctccttctcagagctcatgcacatccagccacttccagcccatgaatgtccactgcaaggacgttactgttgtagggtgttatcacccattagaatatgttgcagctggcacttaaggataaatttgactccaagtgacttttgcctgtcccagattagatattcttgtggctaagaaattcttaggttttatcggagagcaacttcagtaaatgcttagataagtgaacttatttgtctaaattctctaattgggttggggtcagtgaccttttctgtgatattaacaattatttttaggaagagggatacaggtccagatgaattatgcagatgtgtgacaggctttctgcaatcctaggaagtctacaaataataatgatattattatggtttgggtcaacatatgcacagaaacttgctttttaatatctggtgacactattcctgctcctgagaattaatctaatacagttatctgagtggaaccttaaaatcccataagacagagtcttataggaatatatgtaaaattagtttccaacttaaaaccaaaaaatataaaaatatagatcttattgctgaatggaaccttgagatcatctgtttcagatgcctgcccactgccaggttaggtgtaattcaaatttctcacaaatcatctatctgagactcagaggttgaatgattttcctgccaagggtgataaaacaaagttaaatttcatctattgaattacagtacaaaagagaatatacactctcataatttctgtttaaattctcctttcatagtaaccttttacaacaatctgcaacttcattagcacatcttatagtatgtgcaggactttcagtctgtatagtttcagtttgaatggaattaaaagataaaattaaacttcattccctttcttcaaagcaggaagtttatattcttggtaagacaaagcacaacaaatctaataaaataggttttattagtaggctgtaaaagttacctgcagagcctcagtcttgattgggaattagcatgccaacatttttaaatccctcttaggaaagtttcgaatgctcttagaaacacatgtgttagaattagtaaaaagatttataaagggagacagctgaaactaaaactaatttcatttatccttcttgttttaaggagtaagaactggaccctagcaggtgatgaggctacatagttcaacacagttgagaaaaaaagtgatgaggccccaaaagtttcatgtgagactactcaatagcaatgctaacactagaacaccttttttttttcttatgcagtaagaagctttaataataatttcagggtatgggcaaacaagaggtatgagcaaagcagacagtctggcacatcaagggcagctccatgggtcttttctccccacctcatacatgtattctctgacccagaagctggaacgctatattctgaccccagcttcaaggctttttccattttgatgaagtgagtccctccctttaagtcttaaatcttgtataatactcaatgttacctcatctagtgtgttcagtactgtggtttaacttcagatctatttagacacttcttttgttaaatatacacaaatgatttttgaagcatcagtaagaggcaaatttgttcttacttttttcttatacttctggaaatattcatcatatagccttcaaatactgacattgaattgcatgagctacataactttacatcttaagtcttgggctgtcttcatttatcattatagtttgcagcactaccagaatatctaactaatgcaattctgctcctcccttaatcaagaactgatttcgcttgtatcatttcctgctattgccaaaaagaccatacaaactggtattgctctgaagtctacttgaagtctaggctagcaggtgaaattgaatagacctgtattttctcggatttctgcagtgataataataaaataaacatctcatttcagtaagtagcataataagagtttaagcaaaattaggagcaaggggctaattatgtattttccctttacatgctctttatgccattgtcaaagatagaggattaagtcaaccaaatatggcattttgtttggcattttttgatgtatagaaatattttaacactcctgggaagtatgacttcccttgtcatcacgttcactaccggttctattcatatctaaatattctattattaaatgatatcatctaataaagtcttaactattctggtattagttcctcccttttttaaatcaagatacagtaatttgtatattttcaaagtgctttataaacctcaaactatactgtaccatagccaagtctttgaaaggaaaggcacatccagctatgtgtgtatgttagaataatgcccgtgttgacaggaaccatattctccctgaaaagtatgattgatgaagtcagttttcagacaaagagctcatgaccaatttctttcaagcttcaaatcaagcttgacaacatgaagaatttcacatagcatatgagaaatattcactttaccttttcaactggtatcacaatcattgtgggcttccagacacatgcacaccgcactcctggttcaagccataagaaaccctgtcatgccagagtgttagttcagtacagccattaaagagaacatgtggctgggtgtgctcttgaaaacatgaaccctgcaggattctgtttattgctagttttatgtgcagaccactagtccaatataaaaatcaaagcacaaattttcacgtgctacacagtattgcagtttttggccgaattgcttcgtgcttatctgttatcttttgggttgatgggttccagaggaagccagctgtgcaattagagatgtttgggcacatctgttccaaagttgcagcctgaagatgctcagagagtgatattcttgtgtgtgtgtgtgtgtgtgtgtgtgtgtgtgtgtgtgtcctctgcaggtgctgtgttttcaaggagagaagtgttcagcatgaacaaacatgactaatgattgtgagaggtttatttgcaaacagacaggtgttggcaacacagaatgtaaagcagaaattattacattagggaagtgctatgggatttggggctataaatattttcctcacagacccaggtctttcttctaacctttgtttttgaatttcaacactgtatttatttgtaaaacaattaacactgtatattaaactatctctcattaatgttatattttaattgtgcttctcccttctactacattatgataaataatgactctgaaacacaaaaggatgtttaggtagtgaaatcaccattctttcatcacatttttcttcttacactcataattgtttaaagaactcatttaattaactgcctctgctgaactcgaactccctgaaggcactggccatgccatttcatcttgtattcccactgtctgacacagtgcgtgacacataggaggtgtttagaaaacatataatgaataaactatgatgttattttcactgtttgttcaatatgtgtttgtcctttaaatatttaaaagttttgtcatcaagtatggtatgtaggagaattctccattagcaaataccttgtccaatcatgtaaataaagaacatgttttcctgtaagaatattttcaactattattcttcgatgattatttatgagcctggtcaatagtgaaaactgatcatcttagttattatatgcttactatgttctcaggataagggatatcataataattttagttaacataattgtcttagagctaagaagaactttagatgtcacatcaccccaagaggaataattaaggtacagaaaggtaaaaagcttgtctagtaacattagtaggttttggttttcagttgtgggtttcttaattatgttttttaaaaaaattggtgggatttcaagaatcttttttgagcattaagatcaagcatagaaatatcataattactatcattatccaacttactcttcaagaatttgtctttactttcattaattaaagtgaaatacttcttttatagagtactgggatttgagatcgttgttgttttttgtacactggcatcctataaagttatacaactagttcataaattgattatgtgcttttgtttgctatgttgtatttaaagcatttagtttgtgtctaattcactttcatgttgaaagtgacataattatatgttacagaattcaaatgaaaattttctcaactttgaatatgcactaattcaaactgaaatgttttcatctttaatattttccacattctgattttatcatctaaccttttactcctttgtggtttgcatttgccttctttttttaacagctggcacatttaaaaatatcacctacatacacatatctcaaagctgtatacatggaaagactagtttttttctttctttctttttttgagacagagtcttattctctcgcccaggctggagtgcagtggcgcgatctcagctcactgcaacctccgcctcccgggttcaagcaattctcctgcctcagcctctcaagttgctgagatgacaggcgcatactgccacacctggctaattttttgtattttagtagagacagcgtttcaccgtgttgcccagggctggtcgtgaactcctgaagccaggcaatctgcccaccttggcctcccagagtgctgggattacaggtgtgaaccaccgtgcccggccattatttccatttttaaaaattaattgttgtagtaattttcatttctaagtcaattgtttggaatgcaattcacagactcagagaaatccaatttcaaatatgggctatatccatactgagcgctgttagtgccgtattatagatacattgtgggttaaatagaattttttgagttattttcaagttttattataatttcactaagaaaaatattttaaattctaacacagagcttgaagaaaacatcccatttctgcagtactggtggttctctaagaggcaagaagggctgtggctaacagattaaatacttctgggactatttaatcccagaagtttataaacttgttatatctctgtgtctgaataagagaaacaactggctatgattatatacctagatgttgggatatagactggagcaaattgagatcaaatatgtaaattggggcaaaggacctttgcctctgtggcttaaagattcttaactcacactcctccaactttcctctttgtatctattgtgagccacttcttattattcattattattatattattgtaatagtattattattattattgtactacatatctgtggtggaaaaaaggacaacagtgtgtaacgtgaaaagtaaaagtctccctccaccctcattatcccatcattctactccacagaggtaattagtactattgatagattcttgtgtattctaacataaattttctgtatctgcaaatatatatttcatttaggtgatatgaatttcaatttttctttctgtatatgccatttataagtctagtattaatgaacactagattgccagcatcctgattttaaagtgtcctggaattttgatcttcttaatttgaattccatgagcagcagcagagttacccttgtcctgagcctagaagtcgtccctagttaatcataatcaccctccacagagaaaagactctttttttatttcaagtaaaatcattgcatttcctaagggtaagggactaattcatttactagctttccaaacaggactgctaaattttttagatacatcctaggtaattgaattctcctgaacttgggaatatatccaattcttactcaaaaagttgtcccgattggatcaaatagttaaatggacagtaaggatgtgggaaaagaaagataactcagaaagcaggcatctgctatttatctcccagattgatgagtgcaactctattagaagagtaagtactaattaactcattaaacagttcccagtgtgattcctcaatgtaattttaggtgaatctgatgtttagagatttaaaatctaactgtagaagcgtatcattgcaagctattgataaaactttcagagatattagaaacatttcttaggccataaagtagaaaggaagtaatataaagctaaaggctcttgttgtatagaaagtacttaaaaacttttttagcttagttttctgaatgctaagtcagatgaccaatatgagcttaaaatcccatgttaataagagctctgatggcttgggaatttgcatctgtgtccaattctgaagagttatgttcctcaattaaaatctacccaagaagcatgttcagcatgtaatctaatggtaaagcaaatttagtaaactacattaaaaaagaaagacagtaaaacgaatgttccataccctgttgtaaagcgattattgtatggatcagcatggtggccctatttctccagggcacatatagcatggattagaaccacaaaagcatgtggtcctactccacagtctgctatgcaaacctcagcgttgtgaagactgtccagttatgagtgtcatacaataagcataagtctggttactgagtgtatagcacattgcttgtgagacttggctaaagtcccatggttgtgcatgtcttggagcatagaaattacagcatgcagctcaatactagttctttcagtagagagaattcttagtttcctgaaaaagatctgtggtcttctcagatgatcaggagaagagcaatattgaagggttttcagttttttctttcttttttatttttgagacaggtatcactctgtcacccgggctagagtacagtggcctgatctagctcactgcagccttgaacatgtgggcccaagcctcagcttcccaagtagctgagactactggctcataccaccatgccccagctttttttttttttttttttttttaagaaatggggtttctctatgttagcccaggctggtctcaaactctgggcctcaatggatccttccacctcagcctcccaaagtgctgggattacaggcattgagccactgtgcctggcctcagttttttcttgaaggccccacaaatattgttaaatgtttaaaataagttttctaagagtgatagacatatagtggaccatcaaagttattttaggagacagtctattaatcttttcaggaactagggctttgaaggtagagagtctgatagtataagactttatcactcactagcagtgtgactttgagaaatgatttaatctgaatattctttttcgtctgggtctgtaaaatatggatacttatatcaaccatgcagagtactgttgtggtacaaaatgcttgttaaatggtacccatgactagtaatgtgcatagtgataatgaattgttttccctttctcatagcatgagggatttctactagaaatgagacattcttatataggtaaactcgtgtcctgggggtttgctgtatagattatttcatcacccacgtattaagccaggcacctattggttatttctcctgatcctctcccttctcccaccctccgccttctggcaggccccagtgtgtgttgttctgttctcatcatttagttcccacttatcagttatgtatcaggaaaaagaattttaaacaaaaacagaaaaaatataatggcttgaataggataaaagtttcttactaaaaaaaaaaagaagtgagacattcttataatgagggtttataaatggtgaggttttccatgaaaatctttaaacaagtgatgtgcatatagtttctgtttatgtacttcaatattgcttattttagaatctaagctcttgggggctaagcactgtgtcagggtatcattgactacctgtaatgccaaatatgagtagaaaaatgtggtctgttatgtggcctaaatggcgcttaatgcataagcattttattgaaggcttaaagatgtttccatggaatgttgacacaacagattgaaaagtgaccgatttaggtaaatctggctcttataaaatggctgtagttttgtagcattcttttctccctctgtgtcaatgtagagaaggactgatccatttatcagcggctggctggcactctatgcgggacctttgttagttccaaattctgtttggcaacaaacatccaggacttatttattttcatcttctaaaaataagtctatgtttctgagatcttttcaaatgaataaatactatactaaatttacagtgattgctcattattcaaccaaagagaaaacagtaaatattgagcatggtgattaatttgccactaatcatgataaaattattcacagtcctctcttctctgctcacctacagtctactttttcttatttctttctcttgtccccaagaacatctattcttattttaatatcgttctaaacatgtatgactatatgtagtttccagttccagaaaacagctgatgctcaataattgtttttttggcgaggactctcctggctgctgagtgccacaatatccagtgtgctcaatgacatcaaagaatttctcattccaccagcatttgaaaatcaattcctggtttttactcttttgccttgtgaaagaagttttaaaacttaatgttggcttttcttctttgaaaaactaatacttttgaaatctttttcctttaagtttgagaattcacagtggtatatggaattgagcacatgagtgtgcacgtgtatgtgtttttaaaaagaataggatttatagctctaatatataactgcaccactaatgaactgtcttttctagtgccactgtctattccatagaaaatataattacctatgtaatggttgctaataaagaaactgttgcaatgcccttgactatgaacgcataagtaggaattgaaatgaaatgtttagtttagtgtctcccacatatagtcaccatccaaaacttcactgaatgtaataatacatttctaatacaaaaaattaaaagtatattttttgaagcatatatgtattaaacacattgcttggtgtgcttaatgaaatgttttttaataaaaatgttcttatgtagcagaaagtagatacaaagtcctgctttaattctgtaaatttaaaaattatgtagactgtgttatgattagaagacatggatgacatttgcttttgtataatgagcaaatcataatgcacaactataaaaatagactctgaaatttacaaagaagaaacaaattctatggaaaaagatcaatacctcttataattagggaagtacaagttaacattaaattacaaatcaaattggcaatggtacagtgaattttaatgcctgatactgggtaaagagcagagtaagataactgtatcacgctacagatagtaatataaaaattggcacaagttttttggagagtattcgggaaggtccttcaggaggcttgaaatatgcctaaattacaagatacgtgactgtagatttacctttacactggaaataacctaaatgttcaataataataatttgcgggttaaagaaatcccattcatttattcattcattcgataaatattttgtctgtacttaacatgtggcagataatgttggagtctctggggttattgctgggaacaaattatttgtacatgattacataattagagtataatcacggagattacgtgggactgttggtcatatggtttaactttataggagactgcctaactagttttgcaaagtgattgtaccaatttgcattcctaccagcaatgcatgagagttccagttgctctgtattctctccaacatattctattcttagtctttatcatttttaccattctgattggcatgtagtagtatctaaatgtgattttagtttctattaaactgattactaatgattttgataattgtttttgtttttattagtcattagtatactgttttaataaagtatgttttgggctgactagtattgtaaaattgaagttcccagtacctcaaattcctacatcgaagttcccagtacctcaaaatgcaaccgtgtttggagacagcatcttcaaagagataattaatttaaaatgaagttattagggtgggtcctaatctagtacgactagtatccttacaataagaggaaattcggacacagatatacacagagggaagaccatgtgaagatataaggagaagacagccatctataggcaaggacagaggccccagaagaaaccaaccctgctgacatcttaagcttgaacttttagcatccagcacagtaagtaaatgaattattgtttaagttccccagtcttggtactttgttacagcagctctagaaaatgaatgtaaaggaccttcaaactttttgctcattttaaattagattgctggtttatttattgagttataagtattctttatatattttgtatattttctcatacaccacatgtattgtgaatatttgccctcctcgcctcagactgtggtgtgaattttttgtctaatgatatttggaagtggagaaagtttaaattgtcaagaagtccaattatcaatttaaaaaaatattttgtgattatgatgttctttagagataatttttactccaaagtgaacaagactttctcctatggtttcttttttttctttttttattttattattaatatactttaagttttagggtacatgtgcaccatgtgcaggttagttacatatgtatacatgtgccatgctggtgtgctggacccattaactagtcatttagcattaggtatatctcctaatgctattccgcgggatccccccccatccccacaacagtgcccagagtgtgatgttccccttcctgtgtccatgtgttctcattgttcaattcccacctatgagtgagaacatgtggtgtttggttttttgtccttgcgatagtttactgagaatgatgatttccaatttcatccatgtccctagaaaggacatgaactcatcattttttatggctgcatagtattccatggtgtatatgtgccacattttcttaatccagtctatcattgttggacatttgggttggttccaagtctttgctattgtgaatagtgccgcaataaacatacgtgtgcatgtgtctttatagcagcatgatttatagtcctttgggtatatagctagtaatgggatggctggatcaaatggtatttcaagttctagatccctgaggaatcaccacactgacttccacaatggttgaactagtttacagtcccaccaacagtgtaaaagtgttcctatttctccacatcctctccagcacctgttgtttcctgactttttaatgatcgccattctaactggtgtgagatggtatctcattgtggttttgatttgcatttctctgatggccagtgattgtgagcattttttcatgtgttttttggctgcataaatgtcttgttttgagaaatgtctgttcatgtccttcgcccacttgttgatggggttgtttgtttttttcttgtaaatttgtttgagttcattgtagattctggatattagccctttgtcacatgagtaggttgcgaaaactttctcccattttgtaggttgcctgttcactctgatggtagtttcttttgctgtgcagaagctctttagtttaattagatcccatttgtcaattttgtcttttgttgccattgcttttggtgttttagacatgaagtccttgcccatgcctatgtcctgaatggtaatgcctaggttttcttctagggtttttatggttttaggtctaacgtttaagtctttaatccatcttgaattaatttttgtataaggtgtaaggaagggatccagtttcagctttctacatatggctagccagttttcccagcaccatttattaaatagggaatccagagatatagatcaatggaacagaacggagccctcagaaataatgccacatatctacaactatctgatctttgacaaacttgagaaaaacaagcaatggggaaaggattctatcctatgttttcttttagaaatttctagctttagttttaccttcaggtctttgatctattttcaaaatttttacatataatgtgaagtaagaatcagtattctttttgttttatgtggagatcctgttgttctacctccatttattgtggactactgtcttttctctatttaattattcatacttcagcaaaatcaattgaccaaacaggtgtgcttctatttctggactctattctgtttcactgattacatatttacccttatggcaataccctgttgtcttgataaaggtcgctatatagtatgtgaggttttgtggattttattgtccaggatttatacatattcagttaaatttatccttacatttttctgctacttgattttttaaaaatgtcagtttttctaacttttcaactatttgttggtagtgtatagaaataaaactggatttttgtttgttctttttgtgtctttctatatgactatattcacttgtattgttcatattgcttttgatagatttattaaacattttctatttgtgcaatcatatcctttccatgtaaactatacgtcacctttctaattggtgtgtcttatttctttttcctgcattattgcactggataaaatttcaacaaaatatataatagaagtggtgagagtgagtatgcattatttactttgaatcttagggtaacatcttaagtctttcactattaaatatgttatcaactattagtttctcagagattccctttatgactctgaagatacttccatcaacatctagttttcaacactttgtttttttagacagagtctcactctgttacccagtctggagtgcagtggcaccatctcgactcactgcaacctccgcctcccaggttcaagcaattctcctgcctcagcctcctaggtagctgggattacaggcacatgccaccatgcctggctaatttttgtattttcagtagagatggggtttcactatcttggccaggctgttctcaaactcctgacctcatgatttgcctgcctcggcctcccaaagtgctgggatacaggcatgagccatagcaccaggccaacatttcttaaaggaaggcaataaaacctaatcaacaacgtaacattgacaatttctaacaccaggctggtcttaatctcctgacctcgtgatccacttgcctcggcctcccaaagtgctaggattacaggcatgagccactgcgcctggccacatgcatgtatctttataatagaatgatttatatttctttgggtatatacccaggaatgggattgatgggtcacatggtatttctagatctttgaggaatcgccactgtcttccacaatggttgaactaatttatattcccaccaagagtgtaaaagcattcctgtttctcctcgccagcatctgttgtttcttgactttttaatttctgagggctctgttctgttccattgatctatatctctgttttggtaccagtaccatgctgttttggttactgtagcctagtagtatagtttgaagtggggtagagtgatgcctccagctttgttcttttggcttaggattgacttggcgatgcgggctcttttttggttccatatgaactttaaagtaggtttttccaattctgtgaagaaagtcattggtagcttgatggggatggcattgaatctataaattaccttgggcagtatggccattttcacgatattgattcttcctacccatgagcatggaatgttcttccatttgtttgtatcctcttttatttccttgagcagtggattgtagttctccttgaagaggtccttcacatcccttgtaagttggattcctaggtattttattctctttgaagcaattgtgaatgggagttcactcatgatttggctctctgtttgtctgttgttggtgtataagaatgcttgtgatttttgtacattgattttgtatcctgagactttgctgaagttgcttatcagcttaaggagattttgggctgagacgatggggttttctagatatacaatgatgtcgtctgcaaacagggacaatttgacttcctcttttcctaattgaataccctttatttccttctcctgcctaattgccctggccagaacttccaacactatgttgaataggagcggtgagagagggcatccctgtcttgtgccagttttcaaagggaatgcttccagtttttgcccattcagtatgatattggctgtgggtttgtcatagatagctcttattattttgaaatacgtcccatcaatacctaatttattgagagtttttagcatgaaggttgttgaattttgtcaaaggccttttctgcatctattgagataatcatgtggtttttgtctttggctctgtttatatgctggattacatttattgatttgcgtatattgaaccagccttgcatcccagggatgaagcccacttgatcgtggtggataagctttctgatgtgctgctggtttcttgactttttaataatcgccattctgactggtgtgagatggtatctcattgtggttttgatttgcatttctctaatgatcagtgatgttgagcttttttacatatgttcgtttgctgcataaatgtcttcttttgagaagtgtctttttgtttgcctactttttgatgaggtttttttttcttgtaaatttgtttaagttcttgtcaatattatgagccatttttaagaaacacacgtttatacacaagatgctacattccttttattatgagtttccttgtgaagttaaaatcttctgtagtagtaaacagatatacaaagtgtcccgcaaaaacctcacttctttgggaatgaaagtccaggaggtaaactttagtccatgttcagttctttcttctgtgggaggatatgtttacttgttttaaatataaattatttttatcattagcctcaggagtttcaggtctcctgcatgcttaagagttagtgcatattgagaccccgaaaatatgatgtcatgttgcaagcctgggatcataattaaaaatagcaaaactagacccagatcagtccttggagcatggaccatcaattgagccatgcattcacagacatcactttgtgtctgtcagcagcagactggtgacagtcaccccttgaggcttgtagattctaagggctgttatcatttcttgttatttctagaccactttgttcctttcattgcggggaaaaatattgaggaggatttttgggcatgtataataaacagatagggaattgtattattttcttctataaatcttttcaggtaagtaaaaaaaataattgtttgatttcttaaatgccttcaaacgctatataattcaaagcattagataatttacaattatacttcccatatgtaatgtctgtgatctagccagtaggacaactcatttttattcagtgctcaagtgggtataatatattgacacatgcttgaatctgatttatatattgttcttattttcagataaatcatatgaatttgtctgcctaatacctgaaacaattacaaaaatcacttctttcactcaagagccacattctagacctatgcattggtaacaatataaagagctgtccttcatgtatcctctatttttaaattatcattattttgaaactgtcattccttttttaatagcttaaaacaaattaatttttacacttgagggtatataacatgccaaattagaaatttacatttgcattttaccattttctttctcttccttctcttcttcttcttcttttttttttttttgagtcagagtctcgttctgtcgcccaggctggagtgcagtggcgcgatcttggctcactgcaagctctgcctcctgggttcacaccattctcctgcctcagcctcctgagtagctgggactacaggcgcccgccaccacacctggctaatattttttatttccagtagaaacggagtttcactgtgttagctaggatggtctcgatctcctgacctcgtgatccaccagccttggcctcccaaagtgctgggattacaggcgggagccttctcttcttttttctgtcatttccactgccatctcaccatactccaaggtcctcatctatttgtcactacctctgtcagttagtagaaggcaagttcttagaacttttctatatgtcaacatcacaaatttctattcattcagtgcccttatacagtgtgcactgagctaagagtagattttttctttaagatggagtcttgctctgttgcccaggctggagtgcagtggcatggtatctgctcactgcaacctccgcctcccagattcaagcggttctcctgcctcaacctcccaagtagctgggagtacaggcacatgccaccacgcccagctaattttttttggtctttttagtagagatgaggtttcattgtgttagctagaatggtcttgatctcctgaccttgtgatctgcacgcctcagcctcccaaagtcctggaattacaggcaagagtaggaatttaaagataagttgtatcttccttcatttcttttattatttggcatagatatttcaatgtaatactttaattcttgctccttaacatttgccagaaccatctttagggaaaatgttgaattaggtatcatagagattctcttttttaaaataataccatagagtgattaaaaccaccagcattgggcatggactgagactattttttcatctctgtgttatctgtgcatctgacacgtagtagaaaccaaatgaatatttgtagaatcaatgaatgaatgaccaggaaatgaaattgtgaaagaatcaaagaggattttttttcttttcaataagctggaagaagcttgtatatgcttaactgctgattagaaaattcccattgaagggagaaatttactattcaaaagggagaagggtgagagagatgataacaggatttcttagaaaaaggaatttaatgggatcagagcattggattcactgaccttagggatgccactgaacacaaacaatgactcagtctgagattttcatacaaattacctattcttcctgattctgattagtcttcttctgagatatgtaggcagagccaccctaaaccaatccttgcctaccacactgcttgtacagcccatctcttacacactgatgcacatggaagcatatatgtccttccacatcctttgcttatgtccttgtccccctcttctcacatatcataacaagctataatgcacattttcttgcctaatgcttagggctttctattcatttcaattcctcattccccagaatcaacacagctaatgtgtggtggtgtcagaactacatcctaaatttccaacccaactctattgttttagacatatctctaaatgaaactgtaaatgagacatttccttgttttccacaaggagagttttattatctcatattaatggagaagtaattgaactgtctttcaatcgatatagcttaatacaaattttagctgttatgatgttggagccccaccaaacaactttagcaagtacttggaaattgctcctctgggaagcttttcttaaacccccagtattgggtttggtgcccctccagtgagttcgtcttatagcaccctatgtagcatttgtgacactgaacagaaattgtttaactggctactattaactacggtttccctggggatagatgtgatcttttataccattgtattttagcatctcacaaagagtctggtacacagatgataatcaatattgaataatacccaataagccaatcaaaaaatctgaagacaagagcttgacatgtttgacttttcattttcttcacaagtggatgttcaattgcagtgaaaacagttttcactgatatgttatataaacagagagagcctattttaagatcttatggctaatgggaacaattttaaagtgtttattgagaggcagttttagacaatgattcaaaacacaggatttggggtcagaatacctgtgttggaatcttgacttcataacttactagcggtttgaccttgaacaagcaacctatcctctccacctttaatttcatcatctctaaagtagaaatgataatagacctatgccagagagttttttttaaggttaagtgagtttataaaagttatatataataatgactgtacatgtattattattaaattgtgagcataatattttccaaaatactttgtattaaaactatgccttatattttccagtggttaaaggtttccatgcattatcctataaaagatactcactgccttgcttttattttacatctgaaggctagaaaaataactagatttataaatagaataaaacttagacttttttaagttaaaaaaattattacctatttttatgtgtgtgatctgccactactcagaggacttgactttccttctgtgccatgccattaggacatgactactttggacacataagcttctaatcaaatgattcattactactcacatttaaatataagaacttgattcttcagatgaagaagtcatgacatttgtatatatagcaggtaaaatatccatttttaggagaaattctttacatgtgattgctccaagcagtcaaaaaaaattaccatcactttatgaaatgcatgagaatatttacagaagtgtttccatgtatgtgtgtcaaagaaaccagtggaggctaatttgtatgtaacttgtcctaagcagatgtgacactgagtatttgattaattggccaaaatggtaagcttgttgggagacttataaagaaaagaaatttacttacttcctaaaaggtctcttttgcagtggctgtagcatacactcgaagtagccatggacatagaaactatagatgtattcagttggtgcaaaagtaatcatggttttgccattaaaagtaatgacattacgtttaaatcttcaattaatcttgagttaatttttgtataagatgtaaggaaggggcccagtttcagttttctgcatatggctagccagttttcccaacaccattgattaaatagggaatcctttccccattgcttgtttttgtcaggtttgtcaaagatcagatggttgtagatgtgtggcgttatttctgaggcctctgttctgttctgctggtctatgtatctgttttggtaccagtaccatgctgtttcagttactgcagccttgtagtatagtttgaagtcaggtagtgtgatgcctccaagacctaaaataataaaaaccctagaagaaaacctaggcaataccattcaggacataggcatggataaaaacttcatgactgaaacaccaaaagcaatggcaacaaaagccaaaattgacaaatgagatctatttaaaagagcttctgcacggcaaaagaaactatcatcagagtgaacaagcaacgtactgaatgggagaaaatttttgcaatctatccatctgacaaagggttaatatccagaatctacaaagaacttaaacagatttacaagaaaaaaaaaaaccccatcaaaaagtaggcaaaggatatgaacagacacttctcaaaagaagacatttatatggccaaaaaacatgaaaaaaagctagtcatcactggtcattagagaaatgcaaatcaaaaccacaatgagataccatctcatgccagttagaatggcgatcattaaaaagtaaggaaataacagatgctggaggggatgtggagaaataggaatgcttttacactgttggtgggagtgtaaattagttcaaccattgtggaagacagtgtggtgattcctcaaggatctggaaccagaaataccatttgaccaagcaatcccattactgggtacataccaaaaggattataaatcattctactataaagacacatgcacacgtatgtttattgcagcactgttaacaataacaaagacttcgaaccaacccaaatgcccatcagtgatagactggataaagaaaatgtggcacatatacatcatggaatactatgcagccataaaaaaggatgagttcatgtcctttgcagggacatggatgaagctggaaaccatcattctcagcaaaataacacaggaacagaaaaccaaacactgcatgttctcgctcttaagtaggagttgaacaatgagaacacatggacacagggaggggaacatcacacaccagggcctgtcagcgggtagggggataggggagggataacatgtagataacaggttgatgggtgcagcaaatcactatggcacgtgtatacctgtgtaacaaacctgcacgttcagcacatatgtcccagaacttaaagtataataaaaataaaattaaattaaaaaattttaaaagcacaatgtgataattgctcagaaacagaatgatcatgagaccataaagaaaatccaaaaatagaccaaagataaatatgaattaaatgaaggtaatggcaaaaacagcaattacttttgcaccaacctaataggtttgcatctcttgttacctaacttattacctacttgccatttggcctgttgccttggagaatttatgaattgagtaaaattgttgaatgtctgcagcatgtcagacactgtagtaagagacctgagggcacaggagaggaatcacactgggactgggcaagttcctggtgggaagaatgtggaaggcttgagtaaatcctcagggaagctgcaggatagactagctaccacatgacatcagataaagtgccttccaggcatagagggtcaggatttaccccctcactcaatgattgatttgttcattctgcattgattgcaccaagtcctgggaatattatattcaatttgacagagaacagccggatctcaaggagtttacattttggagagagcgtcaggttatacagacaacaagcatattcacaatccaatgtcaggtaggggtaagtgttgtgaagaacaataaagcaggttatgtgcatggcataagggggtttctgttttagacggtgacatttaggagacctgaatgaagttaaggtgggaaccatgtaagcatgttctatgtgtcaggagcagaaaatgcatagctcctgcagcaggagggtgccaagtgggcacaggaatccatggggccagtgcctggtgaggaggaagagagggttagagatgaatttggagatgaagattgtgcagcctttggttttattctacttgtgataagagcccctggaaacttttcagcaggtcagtgacatgatctgatgttattttaaagtaatgtactagctgctgtgttgagaatatattgtaaagatcaaaataaagaactagttaggaggctattgtagaggtatagggaagagatgggttgagcatggatggtagctgtggatgtagttaagaattggtcataattatgattttttggaaaaacattagcaaatgttaaaaactgcatagtgtataagaagccagtggttgaatgtttgtggagcttgagttttggggtgtgaagtatcagaagatgaaggtagagattaaacctgtgggtgttaggaagccattgtaggagattcagaaggggagtgacatgagcagatttgtgttttagccaatccgcctgactgcactgaaccttggtgcggcagaggctatttttacttatcacgtatctatgtgcttctctaccttttgcagcctcccatgctgtgggttggggccacatgacggggctctgcagtgagaggtgggaggaatgttctgtgtggcctctgatccctcctctttgctgataacatggggagagaatgaagtgcgggtggagcaagcgtatccatttggggcatcactcctgggtaatggtagatcacatttaccctacagaactataagtaaaagttggttactgttaaaatactgagttgcaggaggctttgtttccctaggaaaccttaatattactcagttcttactatcaggacatgattgtttgcaagagtatcaattaggaggctgttccagtaatttagctgagagaggagtacctagaccagggcagtggtaatgtggatgaggagaagtgaccaatttctgatctgtaaatggaaaggaatgcccctcccatatttgtcagaaggattaaatgggaacttgaaagcacctgtaaagtgaaagctgggacacttagctggcatatttcttcttcttcatattgttaatgacagctgtcagcctcagtcatgcaacctcttcatgtaaatgttcagttttaacctactgtcaggttatgtagtacctgacaggagccctgaagatctttttcatcacatgcttattatagttgacatttctgccacaatgatgtgcccggtagaatgaacttgatatggctttattccatacatgtcaagccttggcagtaatgatttattgaaaaggtgaacatttggtaccaagtgttgctagaaaagaataaaacttagtaatgtggtagacagtaagagaagaaattcagtaatgtgtcttacagtctttcataggatacagtgtttcatggggtacacagtcttgaaaattagaaaggtggggataattttatcaagtcaaaacttacactctttgaaacctattaaaccagtgccatttttgtgaaccttgcaggtttttattgattccattcatcataagcaattaactaaggttacttttcggccagcttctaatgaataggctgaagatagaaacattctataggcacaacactcaacgtttctccaaatcccagttcctaggaagtataataagtagagtaatatattctgcttcttaagtttccagatgatggagttttcctgtcttcatatgtcatcacatggatttgttctagttagatgacgatgatgattgtcaagtatatgataatcaattgatgattgctctttaaaagatccaatcttgttttacataggatggaatattgtctttaaaataagtcagtgaagtaccccatcatatataaaataacttgcagtgcttgcttaccaacaattaactttacatcagttaatctattgctctaagcaatgcacaaggtagctctaggaaatacacaattcctcgaaaatatgttttcttgtcttcaatacatttgcactttatgtagggcagtcaaaagtacacaactgaagggatttgaaaaaaagaattagaaaggaaccagtcaacataaaggaagagagtacagactgaatatgcagagtgccaagacagcgcagatagcccccgggccctccaggtctgcaagaatgtagctgtgttagagtcctctgacttaagtttagccactctgtcctgtgattcttcctcatttctattggtttacttatttctctcttcatctgctatacctgtgcgattccagattatcttcatttctttcctcatggagatggcgaccaatctggtagcttgtttacctgtcttcagtctctttcccactccagtccaacttgtctaaaactgcaagaataagcttttttttttttttttttaaatagcattttacccttattcaccagacactgacttaagactcaattaaaaaaattctgctttaagacccacggaacacagtggcagggaatacagagagtctgtgtctaaacccaacaagccttgtaaagaaaacatcaagccctgccaactcacgtagactgtccttcaccttgctctctgtcactacctaggttatttttttggtgaaattgaagttgggccttaccacctagcactcctactcttgcttttcttgtaagtaggcatggcctttcatgactagttccatctcgttttcagtctgtgacactggttggtgtagtaaacacctgtttttagatttgctaaaataggctcctctgttgctgcctgtattagcctcctgggattgtggcaacagcctctcatgtgccccaatgccaggacctgctccttcctgcctactgcagggattgtaaaacagttttccatggtgatctgcaaaatattcatagatttttaatgaacaaaaaaggttctaaaaacaaacaagcatgaaaaatggtgtcttactgcaaagcctctcagagcttttgatatgctaatatgcattgtgacatgctaatgtgaattgggactctccaagaggaagaattaatatgcaacattaatgaaacttatttgatccagaaactacttttttagataaacatctgttaccatcacagagaattacagtgttccaagagagtacagtttgcaaattttggactgctccatcaaataaaattccttccaccttgaccaactcatcttttcttctttgggcatacttggttcagctcagtcatataatttgcaaaattcactatccattttaaagcctcaggtcagcttagtctgtgtacagtcccagcaagaaaagaaaacagtggtttcaggttctagagctgtgtttttatactttatgttcattcagatgaatgtgaaaaccagtttggagaagagtgatattctccaaattggaaattgacctaattgctctttacagagaattatagtttctacttttctgaaaaatataagtacctattctttatctaaaaattattcagggttattgtaaaataatcaattaatacagaaaagtctttatacactttttaaaaaatttgcttctttaaagcaaaagaaccccacaaatcctattgctcaaaagtaacaacgttaacattttgtaagcatccccttagtcatgtttctaggaattttgcctcttggtcatgtacagatggtattataacagagaatagaagtaaggagaacaattaggaaagcattatggtaacctatggaatgataagaccatactttgggatgtaaatagaaaggaggccatgagtataagaggtaattgtatactcaagaggtgcccataaatcattcaccctcacattcagatacatataaaaaagtatacatacaaattaagtaaatttttagacaaaaatatgccattaatcttttcagatctgtgcctagagatccccatcattaccttaatggctgcctggtttacaactgtattaaggtgccaatgtttgtatcacctaatcttcattttgaaacattttactgtttttcttatatagcatataaaatttcagtgaatatttttatgtattatttttataataccatagtatagtctctaagaaatgaaataattgcactaaatggtaaacccatttgaacttttaatctatacttggtagaggcatctcttcttgattaatttctgaggaagtctttatatactatggcttataatatatttttcataaactgccaggtttcaacaattgatgttcccaggttttaatattcttggaagagattaggagataattttcaccttgtgattagccatagccttgtgatttcatccctcttaatggtttgttttttgtcttccatctcttcagactggcatgtcagagtactttaaaagtattctcagtcatatttaaactgggatggtggttcttgtgcacttgctgtttactttgctacacaaggagaatatttaagtttaattccatttgtatctttgatgtaaatatagcatagttatgtgtccagaactatgctgtcaattatagagagatgtaaggacctcattagatttatagaagatatgtcaacacacgttaaagactataaagcaagatgaatgattaatattttaaacagtggtatgttgctaggttctgtagaagaatagaaagaaaaatttcttgacccgggataaccagaagaggtttcatgaagaaaataataggccctgaagagtgtctgggacttaggaaggatggagcaaaacggagggctttcatgggagaaagatgcatcggttgtttattgctgtctaagaaatgactccaaagtgacctaaatccacacccattcatcatttctcatgatcctctgggttgactgagcaattggttcttctgctcatttagcttgggtttcctcaggcagctacatttagctgatgcattagttgggagctaggttcagtggggactacaagaataactagacttcgctattcttgctctcttgttgtccctcagtacaacccagacttcttcagggtgatgatttcaaggcagcatcctaagagagtaaaggcaaaaacttcaagtcttctgaaggtctagctctggaagttgcataatctcatctctgccacatcctattggtcaaaggaatttacaaagctagggaagactcaaggaaatagattccatcttttagtgggagaagcagtaaagtcttaccacgaagggatttgcataccgagagaggaaaaatttgtggtaatgtttttaaacccaccacaagggaactgtatgaacaaagatttagaagcaaaaatgaatttttttgagaatcagccagaagacatattaagacatgatttctcagaagttatgagaagctcctggctattccatagggatcattctcaggaccccaaactatttaggttattggcagtgccggccacttcagtctttgtatctcggatcaatcttactggtattttaataaaatttcagtattattttaagtattatcctaatgcttccatatttaagtaagcataatagtaacactaactttatagataaatagaaaaagtgatgtaagttatattctgtatttgttgcttcttttacatgctggtgcttatgattggagaaatggcttgcaggtatcaccacggaaaagcaaagattcctgggtcatttaaatgtgtttctagtacaaaataaacagagaagagccataaacaaaagaaattcagtttttcatcatagtaagagaggacttgttgtattttcttattccttttttttcttctgtagctgataaagctagacttataaataggtaaggtaatctttgcattttataaattcaaggtcataggaaaatctctgtatcgaaataatggattgctacatagctgaagtcttatcattgtagttttcttattttgtgctttaaagttgttttttaaagatgcaatcaaagaatttacaaatatcctgaaagatacatctcatgctattatcaatcatcagatcagatcataattataccgtgtgtgtgtgtgtgtgtgtgtgtgtgtgtgtgtgtgtaaatggagatggtggggggaaatgtgccttttcctaacttaacataggaaaaaaatagaaacaaaatagaagcgacaaagacatgtgtcatcagctacataatttgtgaaatatgttatactttcagttgttccttgaatctataaaaatagcagttttccagcctgggaaccatagcaagaccctgtctgtacaaaaaaatgagccaggtgtgttggcacatatctgtgatcccagctactctggaagctaaggtgggaggattgcttgagcctgagaggtcaaggctgcagtgagctgtgattacgtcactgcactccagcctgggtgacagagtgagagactctgtctcaaaaaaaaaaaaatcaatttttagagatagaaaataaaagcaaaccaaaatttcagcggcaaaataagtcagtcctactatcttttccaagttggtgttctgctccttgagaacataaagttgtgtgttggtgttgacccttgtccagctttgcatcttttaacacagacctatctgatttctccttagtcatttgtattcagctgaagttttagtctttgtaactatagattttgaaaaatcatgtcacaaaaaaggcttcattttccttctgggaacctctgagtgactgtgcatcatcagcagtctctggctgtgtttcttgtagaacctccctcactttctttcttcctctgcttctttccaagctgggtttaaaatttctgagaaacatggagaagtgacgagtgttccaaggttggcatagatagcattgcactcacttgagattgtggcttagtgcctaagacagctcccctccagagaatcttttagtgactaagttagcctttgtattagatgggcaactgcaccaactaggagggtgtgatgccttaagcaatggggtaggtcctgtgagaagggggcttagagtgatggtagcaagtaagaagttgggaaaagatgggcactaagaggtagctgggggcttctaaagatagcatagagttttactctctggttgtctatggtggcctgacagttgttacatttaggaactattgtttgatccataataaatgagtctgaaatggtgagttcagtattccctgaacatctactattattcctatttcagagggatttttctatattgcccagatagtttttaatcaaagttacaaaaaaatctgtagctgtgtaagcaaggcaagtgtactaattttattagaagctaaatgagttttgctggattagagagaataaagaaaatgaatttacttagtgactgagcagatccaatggtgcttgaggtgtcaatggtagatagggatgctgtttggagcctttggcaggcccccatagatgaatcacagtggaggcctctaggattttggagcaaggccctgccgtcttctgcagataactactctccttttgagagacagctcttagcctgttactgggctttggtggaaactgaacatttgactatgggtaatcaagtcactgtgcaacctaaactgtctatcatgaactgggtgctttctgacctatccagtcataaagtgagtcatgcacagcagcattctatcatcaaatggaagtgatatatatgtgatccgactcaagcaagtcttgaaggcataagtaagttacatgaagaagtgtctcaaatgcccatggtctccattcctgccaccctgccttctcttccccagcctgcaccggtggcctcatggggagttccctatgatcagtttacagaggaagagaagactagggcctgattcacagatggttctgcatggtatgcaggtatcacccgaaagtggacagctgcagcactacagcccctttctaggacctccctgaaggacagcagtgaagggaagtcttcccagtgggcagaacttcaagcaggccacctggttatgcactttgcatggaaggagaaatggccagatgcgcgattatgtactgattcatgggctgtagccagtggtttggctggatggtcagggacttgaaagaagcatgtttggaaaattggtgacaaagaaatttggggaagaggtatgtggatggacttttttgagtggtcaaaaactgtgaagatatttgtagctcatgtgagtgctcaccaacaggtgacctcagcaggagaagactttaataatcaagtggataggatgacttgttgtgtggacaccccttggcctctttccccagccaccccgtcatcgcccatgaacaaagtggccatggtggcagggatggaggttatgcatgggctcagcaacatggacttccactcaccaaggctgatctggctatggccactgctgagcgtccaatttgccagcaacagagaccaacaccgagccctcgatatggcaccattactctgggtaatcagcccgctacctggtggcaggttgattatattggaactcttccatcatggaaagggcagaggtttgtcctcactggaatagacacttactccaggtataggtttgcctatcctgcatgcagtgcttctgccaaaactaccatccatggactcatggaatgccttatcctccatcatggtattccatacagcattgcctctgaccaaggcactcactttacagctaaagaagtgtggcagtgggctcatgttcatggaattcactggtcttaccatgttccccatcgtcctgaggcagctggatgaatagaatggtggaatggtcttttgaagtcagaattacaatgccaattaggtgataatactttgcaggtcttggccagagttctccagaaggccatgtatgctctgaatcagcatccgatatatggtattgtttctcccatagccaagattcatgggtctagtaattaaggggtggaagtggaagtggcaccattcaccatcacccctagggatcaactagcaaaattttcacttcctgttcctgcgatataacattctgctgacctagaggtcttggttccagagggaggagccaggagacacaacaaagattccattaaactggaagttaagattgccacctggacactttgggctcttcctacctttaagtcaacaggctaagaagggagatacagtgttggcttgggtgattgtcccacactttcaagatgaaattagtttactactccctagtggaggtaaggaacagtatgcatggaatacaggagatccattagggcatctcttagtattaccatgccctgtgattaaggtcaatgggaaactacaacaacccaatccaggcaggactacaaatgactcagactcttcaggaatgaaggtttgggtcactccaccaggaaaaaacacgacctgctgaagtgcttgctgaaggcaaaaggactacagaatgggtagtagaaggtagtcatcaataccagctactgccatctgaccagctgcagaaatgagggctgtaattgtcatcagtatttcctccttttgtgaaaaacgtgtttgtgcatgtatatacttgtactaagaaaatatcttcattttatttccttttttttttctttatcatgttgacttcatatcagcatttaagtattgttaactttaatagtatttgggttggggattggtgtgtttctggttgtacaaaggatagttgtattatattaggtgtaattatgactttattattgtctttatttgaagattatgatctcaggagatgtatatgggttcaagttgacaaggagtggacttgtgatgggtaataatgagtgtcaccttgattagattgaaggatgcaaagtattgatcctgggtatgtctgtgagggtgttgccaaaggagtttaacatttgagtcagtggactgggaagggtagacccacccataatctgggtgggcaccatctaatcagctgccagtgcagctagaatataaaacaggcagaaaaacataaaaagattagactggcctagcctcccagcctgcatctttctcccatgatggatgcttcctgccattgaacatcagactccaagttcttcagttttgggactcgggttggctcttcttgctcctcagtttgcagatggcctattgtgggaccttacgatcatgtgagttaacacttaataaacttccctttatatattaagattaatattaagtgaagatatatcctattagttctgtccctctaaagaacactgactaatacacttagcttaaaagagaataactatcatagaaggataaagtggagatcaagccatctgaatactttgattctttgtttttactgttatgttaatttcttataattttttcaagtaaacaatcttcccacatctttcccttcattcctcttcctctctccatttcttccgtctttgttacattagtaattgattaatgcaggtttgtgattaactttctaaagttaagtggttctttagggcatataggaaataatatcaatagtcgttgccatgtaattattggggctattttgacaaagtcagttatggtaatcacaggatcagctctaagataggtgacatctatccaatattatactaaaatttggtaagttccaaaagtgatcctgctgtgtcctaactaattctactagttgacagttcattcaaatagtgattcagtcaactcactgtatcacttggaatttccctttccaaattccagcatctcttagagggaaaatgcgtcaaatagttttcagtatttaacacttaaagttattgatgagaccagtttctaacaaaacagttggcacagcccagatactagatggaatggggtgtagattaagtgaagattggaaaatagaaattgcctggctcgtagcagatgcatagagggtgcctacatatatgggtcactgcaaaagagcatccagcgaagccaggagccattatgagagagatggaaggagagcaacttggaaactggaagtttctgaagatgagcttctccactttgtgctaaggccaaccggagccatttcaaatgttttaacaagctgtgtgctacacagatgatcacagattgctggaacattttccttccacatcataaatgtcattattaaaggtgaactttaatgaatagaaataaaagtagaaaatgatggttggatcacctatgaggccttaagcgttactgccaatgcattatcatatcaatagtttaaactgcttagcctaaggccaatatcacttggcaagatttataaaaggaagataattaggaaaagttagtactggttatcattatggaggggcacaaaatataatatctaagaaggaaaaattactaataaggagatggagagatgcagcttgacctaatgagcaaacgaaataactggaccacatttttttagagacctgaatatcactatttgatctcttatcatgagcaatttataagagtgaaggccaggttacagttaattagcttaacatgatttttctttgactctacaaattgtttaaccccgagaaataaactatattgtttatatgcttagattggctatatgaatttttataaactataaaaagagaaagattcatcttctttcaaagaatataatttgggagaattaaggatgaatagttttctatagggaggagtggatactactggagggtggggattatgtctgtcttttttatcattgtgttcccagaggttggtatagtggctggcatataataggtgtcaaataaatatctactaaattcagcaatgcttgaatgaatagtgatgtctgtgatgagttataacattgttcaatcttctgacctgtctctttttgataacattgtgtattctttcatgtctttaatgttcatattataaaaaggcatttttccattttaaaatataaaactatattacatattaaaaattgttcttcagagtattctcttgggctgtgatgtgtgtcataaaggactcactaccctcttcctccaggacctctgcccaattgagaaccactctgtgttattaacgttaaattgatcatagttacataactaatcacatttagtggcttaagaaaagaataattatttattttattcatgaatctacaatttgcacagggctatgagggtatgacttatttcaagttcatgtggtatcagctaggatggcttcagtggtcctgaaaactacttagttgactcagccacatggctggtaggctgatgttctcaagctgtatcctgcacatacaatcacagactgatggaacattttgttttatttcttaagtatcattattaaatatcatgaatatgaaaagaaaaaacggaatggtcgaaccacctacatagtcgtaagtgttaaccagaaatgtatactcacatcaatattgtaaattgctcagctatggccagtgcttagctgggagttcagccaaagctattggccaggggcctttattcttctctatgtgggcctctccagaaaaatgctcgggcttcctcacagcatgaaaactagattccaagagcaggtgtttcaatagtgaggaattagaagtttctagttttgtaaggcctctgggcctagacattggcacaaaatcatggtcacaatattctagtggtcaaagagtcatagggtatgcctacattcaagggatcagaatatagaccttgcctctcaatggaagagttctcaaagaatttctgaccccttccattgagaggcaaggtctatattccatcttttgtgtgtcataattatcttcaaaataatccttttgtggtgaataagaaaaatataagactttctatgtaaggcatttgctggtatgtatgccagatttactaagaccttaagtatgattagcttgcacaattagcagttatctgaagtctgtaagtctgcaggagagcatataaaaagacccttatgaaattgtcataaattaacctaattattactattaacagtaaagtacatggattgactatatgataccttcatttaaaaggtaaaataatgtaaggggtctctataaaactgacaaaactggccagaccatgggaattcatgttcaatgaatgacaatggaacttccaatttatttttaccttaatatggttaggacatgaataaccttagcctttaaatgtttcactcccctacctgccttaacagtgtatattccttctgtatatttataacactggtagtaagattttgatatgaaaataaaatgtttctgaaaaactgttttttagtttttggtgtgtgaatttacaggaaaaaaatatttgaacacttgccatgttctaggaactggtctatattgggaaaatacagcagtgagccaaaaggaccaggcccacacctgccctcttggaatttgcattcctaggggaaaagatggataataaatgaataaataaataaataaataagtaatgtaagttaaagtagtgataaattatgataaagcatagtaaggaggtggatagtgatagtgagggaagaggatgtttagacagcatggtcagggaaggcctcagtgatgaatgagggttgttttttttgttttttttgttttttttttttttgacagagtctcgctctgtcgcccaggctggagtgcagtggtgctatctcggctcactgcaacctccgcctcccgggttcaagcgattctcctgcctcagccccataagtagctgggatatcaggtgtgcaccaccatgcccagctaatttttgtatttttagtagagatggggtttcaccatgttggtgaggctggtattgaactcctgaccttgtgatcgcctgccttggcctcccaaaatgctgagattacaggcatgagccactgcacccagccgatgagtcaggttttgagcagagacctgaatgaggagcggaaacagaccaagtgaggatcatggagaagagtgttcaaggaacagctagtaaaggggctctgaagaatgagttagtttaggttgtttgatcagcatcaagaagatgtatactgaagcagagggaatgaagagaagactgataggagtgatggctagtggaagaggcagtgctatgattatatgtggccaagattatatatatatatgatatatatatatatatatatatatgattattctttttgtttgggaaatgattttgtggtgataatgatgcatagcatttctggatacctagtcgctactagactctttttttatacttttttatatgcgttatctcatttagcgcaacccttttgtgaagattccagtgtaattttaaagttctaagtgaggacatagaggccaacggaggtttagtaattggtccaaagacacgcactcttagagactgcaaggatgctggtagaggtagtgagaagtgattgaattgaagctatacgttgaaggtaaagccaacaggaattgttgatggatcagatataggagatgaatcaaagaatggatttaagaataactttgaggtttttgatctgagcaactaggtatggctttgctgtttgcagaggtgaaaagtgcatttggctgttggagagagggtgctatagactgagtttcttttcggatgtgttagatccaaataatgattagacatccaagaagataggtatgtctgtaatatgggagggaggtattattttgagagttagcagtttagagggagcttctactgagatcagtttccctcattattgtgtgtcatgctccaaggcctctctcattaaagatgtgcccatttgttcaggcagtgctgttgttgcttgctggagtatcatacatgctgtcacattatctcttttgaaatgtattccagactcaagattgaagatattcataaggaagaagtgatttctctttttaaaaatatatgtaaatgacatgaatctatatatgtgataaaattttataaaactatacaccgaagaaacaagtgcatacgaaaaaaagaaaaactggccaaaaaaaaaaagctctctagtttggttaattgtactgtgccattatcagtttcctggttttgatatattactataattgtgtaggatgtcatccttgcgagaagctgcatgtgggcaatgcaagctttctgcagtatttctgcaacttcttttgagtctaaaattatttcaaaataaaattacaaaaatgtaaacatacaattgaatctctgactttaaattattatcttgtttagtcttatctgatgtagggaccctacattcacatgaaaatgagaagcagtgagggataaagagcagttggttaatgggtacaaaaatacaagtaagatccaggttcagtagcacaatagggcaactatgggtaataataattgattgtaaattgcctgagaactggaagagtggaactggaatgttcctaacacaaagaaatgataaccaattaccctgatttgatcattatacattatatgcttatatcaagatatcattgtacctcataaatatgtataagtattatgtgttcataaaataatgaaagtgaaaaatgaacaaaatggatatttttataataggccaaacttaatgggatgttgataattcttcacttattagtgctgcagacttttaatacattagcaggttcttcatattttatcttaaacttttatatgagcagaatatattttgtgtgtacatttaatgtaccctaaaagatgaaatgtgtcgtaatttgttaaactagaaggcagtaataagacatttggcaaatgtagcatatcgcaagcatcttagagagccaaacaagttaaacatgtcaaaataatagatagttctgtgacatttattgacaatttatgatagctgagcactactaaaaatcgtaattgcagcattatttcattaacccctaaatactcattattttaaaaatttaaaattttcttatttctcttttctgaaaatgtaaaattccatatttgttagatgattctgctatcattaatttgttaaccttatttctgtttgtttttcttaatagcaacaatggtggaatagagatgttaagtctgtgattacctttagtttttttttttttttttttaggaaagacctctatatcttttaataaacttcataattctttatagaatcaagatctcaggatactataaccagaatcctagtaacctcttcatttcaacatggaaaactgatacattaaagataaacacatttattttgaactattaaaataaatatatgcacacaggacgttgaaagactgacaaaatgataatttttttgtttttaaatatgaatattgaaaggtataaagactcacttgggaaatgtcaacactgtattcctcctacacaggtctaacaaaatctgtcttaaaaatctgtcttaaaaaattgtcctgcactggcatcaaataatagcagaaaaactgactacatttttttaaaataatagctttctgttgtgaaattgtaatttgttatactcagaggagaacagctcttcttgaagaaaacaaataattttctaaaagcagtatattaaagatcttaagttgcttcactagcttgattttataccacttccatcaaatgggatttggctgatgaaactgcaaagtgaaacagcctatattttgtttacagtcatttttcaaatgcttggaggatgtaggatggaaattatcgttgcctgtgagtctacttacttgtgaaatgcttatgaaatgcctgtgtactgaacattaaggtgaataaagtactgcccccttttcaaaaaagattccagttaacaagagagtgaaaccagaggggcagggaagttgcgggtagtgtgctattgaagattggaagtttgttcagtttaggctgaactgtaccctaaataagcttttgtaggatcctgtcagcattaatagcctgactaggtctggagaaagaagagttggtgaattatggattgaggaggagggagcagttggggctttgaaataccctataccacctgtagtcccctgtagatgaatgacaattgtcagtgggctaactttacatttaattaaaatgatggaataaaaaaaatcactggaataattacatgaatttaataactggaatttctcggcattgccaaagttttattttggctaaaaactccaaacctctttatcttcagaaccttctaaacatgaagcacattaatttgtctccactccctaaatttctgatgttctgtcaaaaatatttataaccagggaggtattccaaaaattggaaggagcaggcagtgagaaagagcatatgtttctaaactggatcatcaatccctgaagaatttaaattgattaggcttcattcaggaggacaaagtggaggataactttaatctactaacaaatagaatttcttaggctaaattataactttggatcatctgattcttcagaaaattataactttggatcatctgattcttcagaaaagatgactcttacattttgtcatgttgactagagctctgcatgctcataaagtcatgtttctcctactgcaggtaatgttttctgagtgaataccaggtgtcaggcagtcttctcagagttcaacatgtatttacccctgcaagtttataaggatgtctctgtcaaattattcattgatttagcaaatatttgtatttttttcacatgagatatttgttttatttttatcatttcttctctttcagctcttctttatgcaactatttttggaaatgttacaacaattttccagcaaatgtatgccaacaccaaccgataccatgagatgctgaataatgtacgggacttcctaaaactctatcaggtcccaaaaggccttagtgagcgagtcatggattatattgtctcaacatggtccatgtcaaaaggcattgatacagaaaaggtatgggttattattgttattatttagtttctattttagtaggatcttcagatgcattaagcttttccagtcacgtattgcttgtataattgcttcgtaactgttattctgtatttgtaagtgacatatcagtcaatcagtcatatttattaagtgcttagaaggtgcaaagcactgaaccattaatcatcaattattaccagtcatcacattcaatttagaaaattcagttcgtgaaaataactcattattctatttccccaaaacagtcttattacctctcacagtaatttgttgcattcctctaaaactcagagtgctgccatttttcctgctagaatttattcttgattttccctttgccttttttgctcatttaaaaattagaaagagacttcctgcctataaatttaaaatgtatgtgtcttctatgctgtcctccacctaaatttctcctgtctcatatgttttataaagaacttataagtctttattttccactttaccttacacacatctataaaatagatatctccctctccaatcatctggtatctctaatctcttccttgccttttcatggagctgattttaatttttctcatgtatctcatatttggggcaaagaagaactcaagatcctccttaaaataaataaaaccaaattttaaaaaatcctcacttcctacacccagctgattcacatcaaatacagaagatgaaaaataaagcttgtacacagagttttagaggaaaccagtcttgagctattttactttataaacatcattggagactattctttttaggtactgatttttgacacgtgataattagatggcataatactttcctggccatttcccacaatttttttttttgttcttttaaccttgtgaggttgacttacggtttttctttaagacctgctcaaaaagcatctttcaatgtcaaagggaaaaagcaaatgagcaaagtagatgtttagttaggagaatttcatgaagcaacatgtaagtaagttgttttaagccagggcaggtgttgttaggaataggttgagtggaggcatagggaatggacgaggaacttaggagttgagggagagaagccttcagagggagtgcaggtgagatacttgggggcagctatgtggaggaattgtgaaagggggtgagatttactcccttttcaatattttacaagatacagtataaattttccagttaaatggccccttgaagtagtacgcatgaaaacagaagggagaaagcaagctacatttctatggaatttcattaatgtatatctgagccaatatatggttagtagagagagtatccaaagaagaaacagaatcttccttggagtgaaggtgagagtaacagaatttaagtcatcaaaagcagggtgtctgttgaagtccacattaaatgaaacagatcaagaggcaaccaccggcctcgtcaatcactatctcagcaagaagctttcctttccagaaaatgcaatagagccacatggtaactaataaaaatcagtaaatgatggaataatggccttttacgtatttgaaaagagtctgagccagggcctctggcacaaatctagtacagggcagagttttgagtccttgctctctatattcttgaatactgagttattcatgaatggagccgagtagattgtcttcaagcctccccttgaggacatgcttaactgtctgattcaagatggagttagggtctgatgcactggcatgcagtgtgtctcaaagtgcgcatgccatgtggcagggaaaaatttctgggtacctaccatggactgccttaaataatattttgtttccttgttcatttgcagttaaagaaaggtacttctgattagcaaagtagccaaggaaaatggagtaatagaacgaatatggggagactaatattaaaagtgaaataaaaatttaatttcaatgaaaagattttttaaggggatattttaagatatcaaaattgattagcatttggataagaaaaaatcatggatgtagcttttaattgagtgaggaatccttaaagttgtttttgactaataggagaagcatatttaaataactgtgacaaatataaaagtttccttgttcatatatgaaacatactctatgcctgtattgatttatcccagtctattaagaaaatccctacccagatgcataagttctaggttaacagcactgaaggaaagagaaggaaggaaagacatctgccaaattctgggcttagaaagggggtgtagggatttctagtattgcatcatcaaagagactgaatttaaaaatgattcttagattacacaccatatgctatactaaacaagaggaaaacaaaaactgtcattcagctctctggttttgtaaagaacctgacaactagagcagaagactcctatgcctgttaggcattcagctatttaacaaataaattatatatataatatatatatataaaaaatatataaaaatatttaattttaaaatacaataataaagatacaatacagggccgggcgcggtggctcacgcctgtaatcccagcactttgggaggccgaggtgggcggatcacgaggtcaggagattgagaccatcctggctaacactgtgaaactctgtctctactaaaaataaaaaaaattagccgggcgtgctggcgggcgcctgtagtcccagctactcgagaggctgaggcaggagaatggtgtgaacccgggaggcggagcttgcagtgagctgagatggcaccactgcactccagcctgggccgcagagccagactctgtctccaaaaaaaaaaaaaaaaaaaaaaaaaaaagatacaatacaataatacaatacaataataaataaagacttgaagcatagacaaaagaattagtaattaaagaaaagagagggaatagatatctcagaactagattccactataaataaggactgaatataagttaaagaatgaattgtaaagatggaattgacatactacttaatatcattataaaatgaactaaaaatctaagaaaatatttataagggtcttcactcatgacctaacataaatatcagaaaaactgagaattaaatgcaaaaaaacaagaaactgtaaactattagaagaaaatatgtgaatatatttaatttatctttgtacatattaaagtaatggaatatataacaaggtaactgacaaatagattttgctaaaaagtgtaaaatctttcacactagaaaactatgaaaatgaaaatgacataaagcatttgcaacaaattttgcaagtgaaaggttaattaccttaatatgtaaagtgatttattaattaataagaagaattagaatacttggggagaaaaacgatctgaggacataagtaatttatggaagacagaatgcaaattactaataagcataaaaaaggcttattttcccttggaacaaagagttaaaacttaaaaaaacaaacaaacaaaaagacatagaaacatttttaatatggtaaatggtcaaagatgatgcccaatcttagcaaaggttggtgactggcattattgtatgattctgggaggtgtgtaaattggtagcacatttcttgaaagcaatttgaataagataatattttaaatttggtggtattttagagttcagtccttgtgcctcgtcccttttctgtctgtattccattctttcatgatatcctgcagtctcattactttaaaccaacaccacccagtgttcatacttctcttgaacttgattccctgaactatagactctcccctccaactgcctactcatgtccagtgaagttgtccaaaaccaaacttccaatcatctcctaaaaacctgttttacacacatttttttcccattgaaattaacggaaacactacctttcagttgcttaagacaaaatctcccacatttaaacctctgctgaatccttttggctctacctccgattctcaccaccttcattcaccttctatcacctggtccacatcaccatcatgtcttccctggatttttctaataccaactaactggccggtgcttccacctttgtcccctgtatagtctgttctcaaaagagcagcgagtgagcacatatggcttttgtaacaaaactttctatgtatgtgtgtgtgtatctacctatctatttatgtttatatcaatcatcaattatctatctatgccatagacttttgattatgagttaaattgattaaacctgttaaaatacaagtgtaggaaaaataaaatgaaaggttgatgacagtaataatataaattccttaattgcagtcaccatcttagaattatgtatgtacttttggatgtagctttaataaacggtatctgaattttaacaatcacccagtatttaatgttcgagacctctgttagacttcctgttcctccataagccaaatacattttattactttatgtttcttattttatattttattgataatttttttcaaatattttaaatagaggttatcaaatttaactatgaatatatactttaaaaggaaatataatatatgaagccaaatgtctttgttttaatgcttctcttctctggttagttttaaaatagctgtatattttttcaattgcttgtacaaagaaatttaatgattcattgaagctaattagagaaaaaaccttcgccccaatgactgagatttccttctatcatttccacatatttagttttatagatttttgaattcagctttaacccacaagcaaattaatcactgtgatttaattctgtcttaatgtgacttatgtgaataatgctttctctaatataattgtggcattaaaatctgtactgatgtggagattgcagcatttctatcatgaaagtttgctttaggcaatattttttaatatagaacagtgcctagttcaattttatttagttgaaaatatgttattgactgctcattagtacggttgctttagattttttttaaatttaatagccaaatccatcatctgggctttgctgcttgctaatattctgtgtacatgaaggaagaagaaatgggtggaataagtgaggatttaaaaggggaagaggagattatgggaaaaaatagaaaggatgatggttgaagctcaacaaattcgaccccacagtttgaaatgactttgctgggaaataattcaaatgaagtaaatggctggggactttattttcagctttttggaacatgtgaaaaaatgtaagacctgtaaaacaatgtgtagaccacatatttcccatcatactggatttttttcagcttgttgcatacaatgaaaggtctaaaaccttaccttttgtattttccaatatcttacttttttctctaacatgtagcttgaaaaaaatcagaaaaagctctttagtcttcatttttgtttcatatgttttataataaacataaggtatcagtaggaagatgctattatatgaaatgtcccagcagaattacacaaaaaaatcaggtaggagtatgcctttagaatttaaacaaattgaaattttgaacgttttaaaattttttattatcttttaaccgaatctatcagagaagcactctgctttcaaatacagtaggcaatatatatattttttacaagttaatttccttttgacagtttaattttgtatatttttttaatttgggaaatgatgtttaaatatttcatcgtattactagatatgaaaaatggattatattttcatacatgtcatcattttcttggttcgatattaaaatacttcaagaggttcccgtgatggtatatatcatagttgaagccaagaccaaaggcactagtcttgtaagaaaactccaccgacaaatgtgctgtatttaaaagccatgtaggggccgggctcagtggctcacgcctgtaatcccagcactttgggaggctgaggcaggcggatcacgaggtgaggagatcgagaccatcctggccaacatggtgaaatcccgtctctactaaaaatacaaaaattagctgggcgtggtggtgcacgcctgtagtcccagctactcaggaggctgaggcaggagaattgcttgaacccgggaggaggaggctgcagtgagctgagatcaccccactgtactccagcctgggcaacagagtgagatactgtcaaaaaaaaaaaaaaaaaaaaagccatgtaaatatatccatgtgaatataataaaataaagctgaattggtcttaagatgcactaaaagtaatctagcctttgaatcaagaaagataatgatcatgccagtacagcccattttaatcagatcatagattgtgtttggatattgtgttcaacttctgctggatattttaaaagaaatgtcatcctataaagcagcacacttaccaggagataagcatgatggcacaaagttcttggaattttgttatatgatgggtagttaaaataaatatgaatatttagtttagctgagagaagacttgggagagatatgacaggtaagttgaagtatttggcatttttaaaaatggaatgatctgtttcaggaggaaattcacagtctgccagtaaaagatttaggcacatatgtagaacatagtactaaatgaacttgcaggtcctgacagtaagattatatgattgtgtctgaatgatttggagtactattatatattacatctcatttacaatttacatatatgtatttaagggattttatataaaaagaattatagtataaaaatctgtaataattcactaattattttccaacaactttttattaggacagctaagtactgtagttttacatatgacatgaaagggcttttccaaggtgatagaacatatactaccttaaaaaattaggattcagaatgtctaatagaggggctatgccaggccagtatgggacaactgtagtagttttccctgtggtctttgagttacctgcttgttgagcaagagacgctattaagaaactattataagaaaccagcatatcattgcaagaaactattcttcagcttattatttgaaagcattatgcaacaaatatatgaaaactataatttttccatcagtacctaaacgtaatcagagaacttaactattgttacatctacatgtgtttctcagttgttacctactgaaatattacaaagtaagcattcagaattattattgacatttttcttttctgactgacctacacattttatgtgagaaagtagactttatttgaaacctcagttttttcgtttcacgtatcacaagttaagtaaaataacagccagtggcttattgaaaacattacaagcagatgaaaactttaagcaatactttttataatagtaatttcgaacactcaaacatatatattagttttcatggcttttagcgtagtttaagagggttccattgcaagctttacattattgtcagctaatataattattagtaaacttttcatgtgtcaaatcttaggctgtgttatttgattcaaacctatctttggggataatattaagcacattcttttcttgtatcacgttgaaatttagcgtaatagtgtgggctaatttatatttcattttctcatcactctgatactagcttctgaggaaggaccaaaggaatcgtttgatagccacagtccagaaatgagaaggtaggattgtttacagaggtccatggataacttgctcagtaccctacttcatctagaccataagcatcaggttccacgcttttgtgttcacatctgtattggagttaccaccagccacatttacttagttggctgggaggtgaaaaatgcccacatggtgcttgcgcaaggtaggcaataataagaggtagcagataatttagtctattgcggttataatacatttcatcctttacaggttataaactacaggcactgtgttatgcctggcaccattttaaatcttagtttttgcttggtattcagtgggcactgttttatttaagcatagatgaaaatagaacatcaattgtggagtaatttggatgaatgacatatttctatatatatacacattgtacagaaatatacgttagactttggggaaaaattaaaccatgaatacttccacatgctgcagacagtgttatagtatgagtaggtgtttgtatccaacctattattgtattctgagctgccttgattgatctgttttcaaacttccactgccgtaaatctgcagtaatggctattgatacacttatttttaaatgagaccataatgcttccgagactttttcagtttttaaggtaaaagtagaattatgcagatttgaattttataaactaaacttttaagaaacagtgtttcaatttctttgatttctgttgttattattatttgactgcgtttgttatttttcatttctcatccagtgctttttgtagctttctcctctccactcactctcccatctctttcttgatttttttttaatggtaatgactaaaagatgcctgtcttttggctcaggctgattgcttttgattttgtattcatttatataatttatattcagtactgaaaatccacttttagttcctttactagtagtgccaaataaccatgggcatcattgtctggcacagcagaaggcagcaacaggttgtagaaaaatatagtgaatagattgaaataaaaggaaaaattgttatgtaagaaagagattctgcagggtgtggcagctcatgcctgtaatcctagcacctggggaggtcaacgtgagtggatcatgaggtcaggagcgagaccatcctggacaacatggtgaaaccctgtctctactaaaaatacaaaaattagctggatgtggtggcgcgtacttgtaatccagctacttcggaggctgagacaggagaatcacttgaacccaggaggcagagtttgcagtgagccaaaattgtgccactgcactccagcctggctacagagcaagactccgtctcaaaaaaaaaaaaaaaaaaaaaaagaaaaaaaagaaaaaagaaaaacaaaacaaaacaaaacaaaaaacagaaaagaaaaagaaaaaagaaagagatgcatctggttcattgccagctgcctggggtgctgctccatgtcccctcctgggcatgggtctggagtcaaggagagggctgcatggctatgcaacctgttggcttcctctcagctttgctttttatggttcttgacttctttcttaagaccttcaggaggcattttcttcttttctcataatagcaaccttccttatttctctataccttatacttccttgaggaagtctttatgtccctagtttatactgggacatctctgagagatggcatatataaatttaagaaagatctatataatgggagaatttaaaaatatggacatagccatttttaaaatttgcattcatatggaaggaaactatggtattagagggttttgtggtccttgctatagagtgataaatagaaataaacataatccctgctcttatgttgttcagagtctgatgggggagaaaaatcttcaatagttaccctgataaacatatgattttatattgtgatgatgcttgaaatacaatacaggaagccatgtcagattttaaaaaaggagagactgcatttaagttgtgaagatgagagtcaaggaaagtaatagaaaaaaacaatagaatttggacgtgaaagattgttagaagctgaaacttttcacctattttataataaaattcaaattacctgtgtgctaacagtcaaataactggtctgaaggtggaaaacaaatgtaaggagggaattcaaatacctagttaatctattaactactaataactcattaaataaattaataatattaaatggtctgtgtgttccatgtaaataatagaatgatttccactgaatagtcatgatggtttaaaatattactctaataccaataacaacacgtaaattgatccaggaacatattggtacccaaatatgattgaactaatcatcacatatttgtttagaataatgctaaataaatatgtgggtctgctgcctttgagggcattatccacagacttaacccatatgtattgtgacagcacagatggcacaggggagtctgcagggcaaatatcagaatatattcagatcagggtatagctttactcccactactacttctctcaaggataaataaatgttagaatatattatttattatgaataagtgttaatatttatataaccattttgttttcaaaagtgcttgtttagttgaatacatgactgttacataaaattagaaaaaagagctagaaaaagaaaatatgatgtcactcataatgctacgacttacagaagtatattgtgccacatttatctgtatgattttgtaaacatcaatttatgttataagtatacaatataataacatttgtagtctattctatgtctgtattacatcatccacatattattgaatatttaagatgtctaatgagtacattaagataaacactgagaataaggggtgccaagtccaaggttatgtacatttttttgtttttattatttttgtagcttatttcttctaaagtatcaaatgagctacaaccaacattaatttacatatgtcttttttcagaataacattgtcagtactaggtattaattttcttttaatctttgtgaattcagaaggccaataatcttagcatgtttaatgtttactctttccaacacatgtatactataattattcccatttactgatacagacactgggctgtaagaggttaaatgacgtggcttagatcacacacagggaaacttggattttgtactatgtctgcactgtaaaggcaatgttcttagtcactctgctgcttgttgaatatcagtatctggtagacaagtgtctccttatcacaccttaattatggctcttttcaatgtgtttattcttctaaataaactttccttatccttcccactcatcttcatactacgcaccccagataaatcccattagcttttgactgaaattgtattgtcctaatctcagagttcaaccattcagcagagaccatctgaaaacaagttcaggttgcttagatggggcatgatgggcttatgagaaacaattagagaccttggacctagattatctaatgcagggttagagattccactcctagaaaccagcatgaaaaccaaaggattccacagtgtgagtatgaatcagaggtagtgcagttggaatatgatgaataaaatactgcaccagcagtagggagtctcctgttctagttaacatgtcttctaggctagttcctgtattccggctggatgaccaatcagacttagtctcagaatatatatgcttgatgatcttttccaagatttttaaggttgaaaattaaatgcatgtttcgaaagagttagtgagaaatattagtgatttttggtgccaaggaagaagtcagaagacataatttaaatcagtagtttaatattgtaacccttgtatcaaacttcatcttgataataaatgagaagttaatgggaagcagcctgcctagggaaaaccagtcactgttaaatgagaaacaacccagcccaactcccagtgttacatccacctgtttcaattaagatccctcttgtctaataacacaatttgaaatgtcagtacatccgtagagacttcacttgtttaatctggtagttattatttggtttcagagtgcctggtaaagtagtaaaatcaactgtcacataattttacaatgtttttactgattcatataatttgataaatcatagaagacagtatgatcagaagtagttcatttattcagccattctcaatacacttgagtgctgtccttccatataacagggaagcaaacaaaactccaaacctcaaacttcaaatcatttttactattaaggattaatgcttcatcatcatttaagttttctgttagagaaattttgatttaatgatggcttatttactatgtaataaaatattttatgcttagaggaaaacatggaaaattgtaaaaggaggtaaaattcttttatgctgaaagctgaggcctgaccggaagtttaaccaagaattcacaaatatttaggtagatattgatgtatgtgttgatatttacttgaaagatatacttccccatttcagtatttaatagtaaatgtccattaagcccctgcttacattcaagacattgttccagtctctggaatgacagtggtggatatgaggcagttcctgccacgcaggactcacagtctagtaggactgaacaagtacatttttactttctttgacctcctggcactattttgtggttacacaaagagacacttggccttcaggtgtgggccacctggaagagtgcagaccaagagtcagagggtaagggaacacacatttagggactgtgcccatctctaagcacttcttagtgttatatattcctgagttcctgtaatgatcacaaacatcctatgtggcaggcgttatagtctccatttaaacaataaggagattctgaaaaataaataaattatccaagattatacacctaataaacggtagagtcaaagtttgattctgatttttaggattctgacttcaaactttatgccctctgccctaaatcactcacctactccatgccccgtatgttccaggcagtacatcaggcactggagatgcacctgtgaccaagataggcatggtccttgccctcatgaaacttacaatctagtagaggagacagataaaaataattgcataaataattaatattttttcaattccctaataaaaattaaaatgcttatgcagttgttagtattttaggtgaaagaggagattcttttatccttttaactttggttttctttcttaacatagagaaggatggctcttgcctgcattgagaatagtgagtaaatacactatccctaaacatactgtgctttgggatatattgaaatctctgaatccttatgaatatgttataattagagtgatctttactactttgcaagtactctgaagccaaataatagctatgattgtaatttttgtttttgtttttattaattggtaagggatatgtaattttactgaactgaattggtatagtgacaaccaggaacaatgaaacttggaattttagtgagcttatgttgcctgacttgggatgaatatcagattaatactaggcttttctaatatttaaaaaatgttattgtacttttctggtattggtcttaggaaaacctgctttcatttgtacaggtacatttcaaaaatatatacaaattttattttctgaaattccttaagcatataagttcccttaaaaacttatcactttaatgaatagattgcagagaatcatgggatcttagtcaagccaagaaccacacagtactcctgtaagaaagcaccaagtgaatatattaataataggcctggtgtcaagcttgttatttacatagaacacatatatacaataaaaagacctgttctgtaatctaaattcggcagaattctagaatattcctgatattaaatttatctttttaaaaaaattcttgtaatgaaatcatcctacaaatgtacagaggaagaatttcatttatttcgttttttttgagggcaatcataaaaaattgaaacgtagcaaaagtaaaacaaaaaaaaccaaaacaagcaagcaagcaaacaaaaaccccttcagtctaatttttgtttcttgtaactttattttttaaggtattttataggagatcagaagagctggcagagaaacccacatcttaatgttatgacctttacttactaaataaaaaaaatgtgaatgttagtgtcaaggcatcagttatgccgtcaatatttgaagtaaagtttcaaattgactaaagcttacacttccatctacaacttttaaagaatctttttaaaaggctatgatattacatattttttcttaaagtattcctaagaatattatgtattacattaattgggtaatattttcatcatggaggagcaatgaatttcctcatgaacttagatgtgtacttgtttaatctcataattttttatcctataagagacaaaagcagttgggtcattacaattttaagaatgacctcttaaaataatacaccaaatataactcttccttatgtttgtatttgtaatgactttcacacaaaattataggcttctcataaaatgaaaatcaatgtaaaaagaagacagtaaaacccatgtacatcaacatttacacatacacatgttggtaaatggttaaacacaatagaggtgtccagccacctggaatgtcgttgttactgagcttggttgtattgagctttcgagtcttttggaagctgaattaaaaagtgaaattctttagtctactgaaagaaataaacacatttgtctaaagatttgtttattttcttattatattgaattcaaaaagacctttatcatgtgaagctttttgtttgcaagcagtagagtatattcgttaagatgagggatcagaaaattttttctctaaagggccggatagtaaacagtttagcttttatgggttatatggtctttgcctccactactcaactttgccatagaagcatgaaaggagccatagacagtatgtaaataattgaacattgttgtgtcccagtaaaacattatttgtggacgtattaatttgaattccattttttctcacataccattaaatgttattttttcttttgatttttgataactatttaaaaacatagaaaccattatatactcagtggctgtacaaataccgatgatgagtccaatttggccttcagagtttgctgacctccacttaagactttttagatctctagtccaattgtcagatttctatcctatttaaaaattacagtatcatcatctcaaaactcttatgtaccttgcctgccttggttttcttcatgaggctcatcaaaatctgaagtatgatacagaagttcacttatatattctttgttaattgtccctctagtacaataaatagtccatgggggcagggagttttgtatcttttgttcactgctgaataattattgcctagattagtgtttggtaagtgggatgtgttcaataaatatttattatatccgtgaatgtaattctggagttcagaaagacacataaatttggagccattaataaggccatgaataggtagttatgatcactcaaaatgacattctagctaggaaaaggaaaagagcttaagatcgagctttgaggtacttgtacacttagatgttaagtagatgagaaaaggccagaaaggatactcaggagtggctggtgatattagatgaaaagctgaattgtttgattttataaaagccacgagagaaaatgaaaaactgccttgcagtcttctaaaagataaataaagtaaaacgtaaaaaagttccatttggattttacaacatggagattactggtggatttgatacaggcagatttgttagagtagtagagacagatgcaacactggagtgaggtaaggagtaatgtaaggtaattaagacagtgggacttggtcaaagggaccatcaaactgacatatgataatggcacaagataatgattctaaaaataacctcatacatacgtggagattttatatatgataaagacaggcaaatttagatctgtggggaaagaaggaaacatttaatgaatgttattaggattaatatttacctgtatgggcaaaaattagtttgatctctcctttacaccacatcaatcaattctgaactttaagaattaactatttaaaaagtggcattttaaaataagagtagaaaaaacgatggaaccccaaaggactccaaataaccaaagcaatcttgagaaagaaaaacaaagctaaaggcattacacttactgatttcaaaatattttacaaactagaataattaaaacagtatggtcctggcatacagacagatgtatggaacagaatagaaagaccataaataaacccatgcacatacggtcaactaatcgttgacaaaagcttcagtagtacatagtggggaaaggatagcctcttaaataaatggtattgggaaagctggatatccatattcaaaataatgaacttaaacccctatattatacataaaaatcaacacaaaatggattaaagacttaaacataagacctgaaactaaaactactagaagaaaacatatgagaaaatcttctttacattggttttgacaatgattcttgaatgtgacactaaaagcaaaatcaacaaaaccaaaactagatagtgaggggaccaaaaaaaacagagaatagtgggactacatcaaactaaaaaacttctgtaggaccaacgaaacaattaacagaatgaaaaagcaacctatataataagaaaaaatatgtataaactataaatcagatatggggttaatacccaaaattgataagaaactctatcaattcaatagcaaaaacccacaaataaccaaatttaaaaatgggcaaaggacttaaataaacatttctcctaagaaaacatacaaatggctgacaggtacatcaagtatatgcaaaggtgcccaacatcactaatcatcagggaaatttaaaccaaaaccacagtgagatattacctgtcaactgccaggatggctattaccaaaaaatgaaaatataacaagtgttggcaaggatatagagaaactggaatgcttatatattgttggtgggaatgtaaaaatgatatagctgctatggaaaacaggacggagtttcttcaaaaaattaaaatatagaaccactatatgatctaacaatcccactcctgggtatttatccaaaagaatcgaactcaaaatatcagatgtttatatttccatgatcattttagtattattcaccgtagccaagatgtggaaacaacttaaatgcccatgaatggataagtggaaaaagaaaatctgctaaatacgaacaacgatatataattcatctatagaaagaaggaaatcttgccatagatgatcaaaaagataaaccttgaggacattatgctaagtgaaataaaccaatcattaaaggacaaataccgcatgataccacttatttgaggtatctaaagtagtcaaacacatagaaacagaggaggaaaatggggagttgctattcaatgcatacaagtttcagttacacaagatgattaagttctagagaactgctgtacaacattatgcttataattattactactgtattatatagctaaaaagtttaatagtagggtaaatttcatgttaaacattcttactgtaatttaaaaaaataatatatagacgatttttatgattatgtgttttaaattgctttaatatgacacaagtgggctaaatggtaaagaaatatcgataaatgtaactattgaagttagtaatttaggccaagtgtggtggctcatgcctgtaatcccaacactttgggaggccaaggtgggaggattgtttgagccaaggagtttaagaccaccctgggtaacatagtgagactttgtctctacaaaaaataagaaaaaaaattagccagacatggtggcacatgcctgtagcctcagctactcaggaggctcaggtgggaggatttcttgagccagggaggttgaggctgcaggaagccatgattatgccactgtacttcaccctggatgacagagtgagattgtatctcaaaaaataaataaataatttatgttcatcaaaacacattacaagaaaagtgaaaaaataatctacaaactgggagaacatattgaaatatacaaaatcagtaaagcattagcaacacaatacataaaggattcttgaaaatcagtaagaaatatatggataacataatagaaacatagacaagagatacagacagttctcaaatgcagaaatataaatggtcgatgaacatgtaaacaagcttaacttcagcagtagtaagggaaatacaactaaaaaacccagtgcttacctctggatttccataggttaattatggtggcctaaatgtgctcagaaatcttttctctaaatttacagattaagagggggaacaaataaagtcactttcatagtgtagctacagttcagatgaaaacagaaaatactgcaaatttgatacattaaactgacccttgggaaatacctatccaaaccaataaagtaggcttccaggctcacaccagagctgagagtcatgaggaaattacacaaaagagaggaagagagatgttttgttacttatggaggagaacaaatagccaccagggttcactagcagaaaaaagaatcctgtcctaaatggaaaatactaagaacaggactgaggccggtggatcaagggacgtgctactgtgcagtcagatggcttagaaaatgcatgggtaagaggaaacagttttgggaaggccacacttctggggataaggaaagccttggaaaagcaatgctttccttggaagcttagcgaggaagggaaggaagtaaggaaatgttttagataaggaacctaatgaacaggatatcagaagtcagatccaaatagcattgtttagtgacgtaagaggatgctcttgaaaaaaaatctggtaatatacagaaaaaatatcttcccttgcatcctcccttgacctaactcttccttttctgccacacagaggatcaccaattgatatggtttggctccatgtccccacccaaatctcatctcgaattttaatactcacatcttagggagggatctgctgggaggtgactggatcctggatcggggggtggtttcctccatgctgttctctcatgatagtgagtgagttctcacaagatccgatggtttaaaagtgtgtggcagttcccctcttgctcgcttactctcctgccaccatgtgaataaggtcgttgcttcaccttcccctttgccatgactgtatgtttcctgaggcctcctcagcatgcagaactgtgagtaaattaaacctttttcttcataaattatccagtcttaggtagctctctataacagtgtgaaaactaatacaggaaactgataccagaagagtgaggtactactataaagataacttgcaactatagaagtggctttggaagtgggtaatgggcagaggttggaatagttggagggctcagaagaagacaggaagatatgggaaagtttagaacttcctagagacttgttaaatggttttgaccaaaatgctaacagtgatatcgacaatgaaatccaggctgaggtggtcttagatgaagatgaggaaattattgggaactggagtaaaggtcacttttgctatgatttagcaaagagactggtggcattttgcccctgccctagagatgtatggaactttgaacttgagagagatgatttagggtacctggcagaagaaatttctaagcagcaaagcattcaagacgtgacctgactttttctgaaagtatacagtaatatccgttcatgaagagataatctgacattgaaacttatgtttaaaagtgaagcagagcataaaagtttagaaaatttgcagcctgaccatgtggtagaaaagaaaaacccattttctggaggaaattcaagccttcaggtgcatacatttgcataagtaaagagaaaccgaatgttaatagccaagacaatggggaaaatgtcttcagggaatttcggagatcttcagggcagatccccccatgacagacccgaaggcctaggagggaaaactggtttagtggtccaggcccagagctctgctgctctgtgcagcctcaggacatggtgccctgcatcccagatactccaactccagccatggctaaaaggggccaaagtgcagcctgagccattgcttcagagggtgcaagccccaagcgttggtgacttctgtgtggtatagggcctgtgggtgcacataagacaagactcaaactttgggagccttcccctagatttcagaggatgtatggaaatgcctggatgtctaggcagaagcctgctgcaggggtggagcccttagggagaacctctgctagggcagtgcagaggtgaaatatggggttggagcccccagagggacttcactggggtacttcctagtgaagctgtgagaagagggccactgtcctcccgaccccagaatggtagatccatggagagcttgcactgtgcccctggaaaggccacaggcactcaacaccagcccatgaaagcagctatgggggctgtatcctgcaaaacgtcaggtgcacagctacccaaggccttgggagcccacacttttcatcagtatgccttggatgttagacatgggatcaaaggagattatttttgagctttaaggtttaatggctgccctactgaacttcagacttcaaaacaaagtcctggaactcctttgttttgacccatttctccctttttggagtgggagcatttacccaatgcctgtatccttattgtatcttggcagtaacttgtttttgattttacaggctcataggcagaaggaacttgccttgtctaagatgagactttggacttgggtttttgggttaatgctggaatgacttaagactttgggggactgttgggaaggtgtgattgtgttttgaaatgtgagaaggacatgaggtttgggaggggccagggatggaatgatatgctttgggtctgtgtccccacccaaatctcatcttaaattgtaatccccacatgttatagagggacctgtaggaggtgatttgatcatgggggaagtttcctccatgctgttctctcatgacagtgagtgagttctcacaagatctgatggtttaaaagtgtttggcagttccctccttgcttgcttacttgcctgccaccatgtgaagaaggtccttccttccccttccctttctgccatgattgcaagtttccttaagccttcccagtcatgtgcaactgtgaatcaattaaacctcatctctacataaattacccagtctcaggtagttctttatagcagtgtgaaaatggattaatacagcaactattgctagttaagaaaaatgtaagcataaatagaaataattcacataatgattctagaaaagaaatcaggtaataaaaatcagacttttcaacctgaaagcctatctcccacaaagagctataatgcaaaacactaatataatacacagattaaattaaatatagaaaaacaaggaatttaaaatattaaaatacttcatgagtcagaaatccaaaaaaatcagtatagaaatagaaatataggggctgatcaaggtcagaagataaatgaacaaaagaagaaaaataatcttataaatgaagactgacttcatttataaggtgcccacattttgtctcatattatgtaagggacataagaacaaatatagaggagtaaatgaagcaattcaaaaaaattaatggaactaaaacataaaaagaggtatgaagggtgcaaacatgtaatagagaagacatgtgtaaagatccaatatgtgtatagttggtgcccatcaaaacatgaaataaaacagaactaacttctaaactataattcaggaaagcatcactgaaacaaacaaacaaaaacccaaagctacatatctggcccattgtatacctgggaaaattgacctgttgtaatcaacttcaaagtatattctacaagaacaatttgattttaaagtatcataaaatcagacaaaaaacctggtcacttacagagtaaaatgacaaagttgacaacagacttcttgatagtaatatatacaacaaaacaacaatagagcaacattttttagatcctcaagaaaaatgtgtgagttaagaattttatatttcagcaagctgtcctttatgaataaagtttacagaaaatagaaaaatattaatgatctcagggaatattgtattcagagacttacttcgatgattctgttatgacagtgctttcaaatgttaatacacatgggaattgcaagcagactttgttaaaaatggagattattagtctagagatgtgagtgaagaatctgtgtttctaacaagcaccaaggcaaggtgatgccaatgctcctggctcacaaaccgtactttgggtagcaaagtaaaagaatgaaacagccaagatattattggggaaacattgctagagactgttggtaagcactgaatatatttgtttgcaaatataaacacctgtctttaaatgcctttacacctgtcttctttattacatttttgttccttttatacaactttttatgttttagttgcattaagttttttgaatcttttcatttactcttctatatttattcttgtgctccttacataatagaagatatagtgtgggcaccttgtaagttagtcttcatttataagattatttttcttttctcctttcatgtatcttttgatcttgatcaccccctatatttctatttctacactgattttttaaaacttctgattcatgaagtcgtttcatgtttaaattccttaaacatgaaaaatttttataaaatacagaaaaaatagtaaagtaaaatacatatgatgaaagtaactataaatgctctgataaaatagatgcaacaaaattaccaaaatagggagagaaaagagataaccacatgaatactagaaggaaaatcaacttgatcttacagatatcattagtaaggaaaaaagattaagggttatatgtaggtaagttttaatacaaaagttttaaatatcaaaagaaatacattacaatatacatcttttaaagtaaaaaacagaacaaaaaactatattataaagatacatatttatatgctaacatagtaaatataagatagagcttagccctaacctaccagttatgcttaactcacctattagaagaaaaatatttttagattggcttacaaaggaaaatccttgaaaatgctgacacacacacacacacacacacacacacacacacacatgcacgcacgcacacacacacacacaaaatctcaacaataataaaagccaaacataaagagatgggtaaaggtataccaggcaaatgaaataaataaggaaatttggcaaaatgcatttggctgcataaagaacatgattcacaatgaagctataggagttaatatatatgtgacaaataacatagctgtaatttcataaaatagaaaatatagatgaaagaagagtttaaatagcacaaaaataatacgacactttaacacagcattttcagtccactttaagtccatataatataatactttaagacatcactttcagtcaggtacacaaaaataagaatggatgtaggtaacttaaacattaaagtcagtaagctacagcttattgatagatacctaaatttgcactctgataatatagaatataaagttcctttcaaataaatatggaaattttaaactgtatatttgatcacaacgagaacctcaaaaatttcaattaggcagaacaaatgaaagcatgttctctcattatagtagaaaaaagggaaacaggaaggcaggagggaggaagtaagggaaggagcaagagaatgaaggataaaagcaagagagacaaagtaagagagaaagaaagaaaggaacaaagagacagaaagaaaaaagaaaggaagaatgaatgaatgaagaaagaaagagaaacctttccatctggaaatatatagactatattttaaaaagcaataatctgacaagttcaatatgttaatcacctatggatgtgtttgtattgcctattttttctcttggtcctgtcttagtttgcctgttaaatttttattagatgctgaatatgaaaaagtgatgtgactcttgatgaagtcacctttctccagagagatttttctttgtcttctggaaggaaattagactaggtgtcggttagtttaatgtagtaagagatttctcaaaagaaggcatacaagtggtcaaaaaaaaatatgaaaaaaatactccacatcccttatcatcagagaaatgcaaatcaaaaccacaatgatataccatttcacatcagtcagaatggctataattaaaaagtcaaaaacaacagatgctggcaaggcttcgtagaacaggaaacacatatatacatatatgcacagtaagatttccatactgttggtgggaacgtaaattagttcaaccactgtagaaaggagtttggagatttctcaaaggacttaaaacagaactaccattccatccagcaatttcaattactaggtatatatgcaaaagaaaacaaatcgttctactgaaaagacacgtacacccatatgttcattgcagtgctgttcacaatagcaaagacatgggatcaacctaagtgcccatcaatggtggattaaagaaaatgtgatacatatacaccatgggaaaccatacagccataaaaaaaacaatgaaatcgtgtcctttgcagtaacatggatgcagctggaggccattatcctaggtgaattaacacagaaaaccagaggtgtttccacttataagtggaaacaaaagattgggtactcatggacgtaaagatggcaacaatagactggggactactagaggagacagggagggagaaggacaatggttgaaaaactaactattggatagtgtgctcagtacctgggtgacaagatcattcgtttactgaacttcagcatcacacaatatacccaagtaataaaacagcatgtgtacccctgaatgtaaaataaaagtagaaaagaataaagtaataatcataaaaaataaatcttcacaattgtggacttttaaattaagcatgttctttttaaggtgaaaaatgtttcaatatataaaacttttattgctaaagtaaaaaaaaagcgttttttgaagtactgaagtattctattttgcatgtaatatttcaggaatcccagctaaaactttgtttactaatgctcctcttaccttgtaggccctgaactccaaactttgtattttcagcacagtaagatttccataaactgcttagttttaccacgttttgacctgtggtgcttaagaatgagtgaacgcctttaggggaaaagtattcagactcttgctcatgtctctgtggtttctttttcttgaaaatcttggaatctcaagcattggttgtcttggtagccctgaactgctgaaatttttgctcagcatctgaaactatgtctgcatcacttataaattagtaaatatagtctatagggaaacaatgaaacagaatttggggctcatcttggtgaatttttttttctctctgggattggttaaatcctggatgtttttctgtatgtttgatgttttcagattttttttaagtttttttctttgctttttgtgttttatcaaggtttatagttgctctgcatagaaagattcgtttgctgcaaggcagatcattaagctgaaagaaagccagcttctattgtttttaaataacaaataagaggaaataatgagtagatttaggggacgattgaagaaaggggaaaacgtatgaaatagtcatattgacaagcagggatgcataaatgtcagagaaatataatagtaattctagataatgatgaatgccaattttaagattatactcatcattttaaagcaaaaccattcagcagaattatgtgatgttatctagccagaaaggagtaaatcagagatgacatgatggagaaagaataatctgaagtgtttataataatgaccaataggaatttctgctggcctttcaaaaagtgaagacaggaggggttaaatggatagtgtggaagtgttgaggatggccagtggtttggggatcataattaagttaatgaactgctgctaacagagactgtgcatgaatttgactgctgggtgtttagaggtattaatttcaccatgactccattactcatacccccaatctctcagtgttctaataaggtgtagcatgacaatctgtacctcatatcagggcaacgtatgagctttctgattcaattactctgaaacagaaaaattttgacttttgaaaagggataatctaagtgcagaaaatgattatacttattatggaagtgagtaggataagatcaatggtcaattcaaggaacagaaataatatcaaaaggttagaaaagttggaacaagggacaggtggacatgttgctataaattgatagaagtgttgtaggatagggtggactccacagaggagtccagggtcacaatttgagggtgtttcaggaaatgtttccaaaagagccaggtggagttgtgagaaccatactggagagcatgctgaattagaccaggattctacagtcaggtacacctccaaccattacaactggacctagaataaatttctgtttattatttcggtatccagaaggaatgctgttatagaaagagaaagaggactttaaattcacccagaccatggatgtgttattaacctttgtgaaatagagataatagtatttgcactgtatggttttttaaaggattaaatttttggtgttcttttttatttcttttaatgtgtgtacctactctatctatgaaaatgatcgataaaattcattttatggattgtacatttggtgtcaaggtttaggactctaactggccctggtcctaaatattttcttctctttttctaaaaagcttttttttttttcattttacgtagtacacttaagtcctgatacatttttgaaaatgtgtatgtaaggtttgagggttaggttgaggttaagcttttttgattgtttgctttttgctagatgatgtctaatttctccagcacagttggttgaaatactatctttcctctgttaaaatgcttttgctccttggtaaaaacttagttgagcatatctgtgttggtatatttctgggttttctatcctgttccatcgatctatgtgtctgtccctctgccaacatcacgctgtcttaattactatagctataaggtatgcctaacattggatagagtgatttctcctccttaatcgtttttcagtggtcttaggtcttctaggtgtagtgccttaatgtatgaattttagaataagcttatcaatatctacaaagaaaattttctgggatttttataagagttgcataaatgtaaaggttaatttagggacaattcacatatttactgttttaggccttccaatttattaacatggtatatctctccacaaattccttgatttctttcatcaatttcatcaaatgtaatttttaggatacagctcttgtccatattttattacatttatacctaagtatttcattttctgtggacacattgaaaatgttattgtgtttttaactttggtttccacatgttcattattatgctttagctttttgaatatttctttggcattaggctgtggtctatggtttttccttaccatcagtacattcacctccaggaacatttttatcaatttgctgtcttcgatctgccatgggcacaaagtagatcatgtttgcaggatttgagacggatagaattattcgaggctttaagagatgcttgagggtctcttttacatatgaaatctgtatactctgtgacagcttttttgctactcatggatatttttacttattctgatattcatggctatttttatggataatgaaaattatgtctgaataaataatattactgacatgtcaaggttttcagctctgaagacattggtgacagacagcaatgtaaataatacataaactaaaattcaagttagggcttattgccctaaagcccctttaaataatgtgagcataatatgctctttcaaaaagatgatagtttgatgtctaacatgtagaatactgatgagctttaaaggcatttcttaaagttaaaaaaatatatttcccctgtgtttacaaaatgggctcatgcaaataagaaaagtttgctaatttttggttcctagcattttaattactatgatagcacatatattactaagtaaacaactagcagtgtttactgttctgttttcaagtcttatcaatagcattgatacaaagttagttaagataatgtaccctatatttaattatagaaatcattatcatgtacctgttatttaagaaaagcttttttttttcccatatgattgttggctgcacatatgtcatcttttgaaaagtgtcttttcatgtcctttgcccgcttttttaagggttttttttttcttgcaaatttaacaagataccatctcacagcagtcagaatggctattattaaaaagtcaaaaagtaatagatgctggtgaggttgtggagagaaaggaactcttatacactgttggtgggagtgtaaattagttcaaccatcatggaagacagtgtggtgattcctcaaagacctaaaaacagaaataccatttgacccagtaatcccattactgcatatatgccccaaagaatataaatttgacccagtaatcctattactgggtatacaccccaaagaatataaatcattctattaggaagacacatgcatgtatatgttcattgtcactattcacaatagcaaagacatggaatcaatgtaaatagccatcaatgatagattgaataaagaaaatgtggtacatatgcaccatgaaatactatgcaaccataaaaaagaatgagatcatgtcgttttcaaggacatagatggagctcaaggccattatcctgagcaaactaaggcagaaacagaaaaccaaatactgcatgttctcacttataagggagagctaaatgatgagcacacatggacacatagaggtgaacaccacacactgaggcctagtggaagatggagggtgggtgaagggagaggatcaggaaaaataactaatgggtattaggcttaatacctggctgatgaaataatctgtacaacaaacccccactgcactccagcctgggtgacagagtgagactccatctcaaaaaaaaaaaaagtatataacaaaataaattacttaatggaatgacaaaaaaataaagaaaagctgaattaaccacatgaagatagaggtttcacaattcataaagttaattaaataattgcataattgattagtttcactttgctttggcctatgtaaaccaactcattgttccccaagcattccttttatatacccccctcagagctgctgcctatattttcccctgaagctggcttcctgttgcaaaatgccaatgatttgtcttgtcttcctagtgagataagcaagtaacctgcatgtggaaactttttggagccatttttaaatgcaacctcctatacatgtcccccatatagtagacactctataccaggcccatgtagttgttaaatgaaacgaagtacttatggctcatgagatgttcttctctacagatagtgcaaattaattttgatcaaatttgcctaaagtcaatatttttagtggttggagaaagtaacagtaataatttttcatgtattttatcatagaaaggtatatacacgtgcacacatgtaaagtgttcaagtcataagtatgcagattaataaatttttgcatatgtatataccatgtaactgctactaggatcaagattttaaaaagtatttttatgtcctctgaagcctcctccatgccttgttcaggcaattacttctcttttccctgaagtagccagtattttaaaaattgagatataattcacatattataaaattcattatttaaaaatgtacaatttagtagtttttagtatttccacaaggttatgcaacaatcaccactatctaattccagaacattttcatcatcccccaaagaattcccattcccataagcagttactttctatttcaacctcccctgcacccctgacaaccactgttctattttctgtgtctatggatttgtttattcttctcatttcatataagtggaatcatataatatgtggtcttttgttactggattccttcacttgacctgtttccaaagttcatccatattgtggcatgaatcagtactttatatttttatatctaaagaatattcttggccaggcacggtggctcacgcctgtaatcccagcactttgggaggctgaggtgggcggatcacgagatcaggagatcgagaccatcctggctaaacaaggtgaaaccctgtctctacgaaaaatacaaaaaattagctgggcgtggtggcgggcacctgtagtcccagctactcgggaggctgaggcaggagaatggcgtgaacccggaaggcggagctttcagtgagctgagattgtgccactgcactccagcctgggtgactgagtgagactccgtctcaaaaaaaataaatagataaaataaataaataaagaatattcttttgtatggatttcctgtatcttatttaccgattcattatttggtaagcatttaggttgtttcctgtaaccattattttgacatggatcttcatataagtggaatcatacggtgtgtatagcatttaatttgtaaatataatggggttatatgttcattatatgactgatagacattagggttgcttctaatttttggctgttattaacaaaaatgttgtgaaattcttgtatatatctttttaataacatatctacacacttctttagtgtatatacctaagacgtggtttgatgggttatagtgttggttgatgtttagttttattgaaaattaccaaagagttttgagtagtggtatgctatttgacatttctactgggatacccgagggttttggatgttctacatgttcttcaagacttgatacattgtcatccttttacatattagccactgtgatgtgtgtattggtattttattatgattttaatttatctttttcatacttaatggttttagaacctttcgaaatttttatgttagaaaattattttttatttttctgctttattgaggtataattgacaaaaattatatgtattcaaagtgtgcaatgtgagaatttgatatatatgtgaatgactaccaaaagcaagctaattaacatatctatcatctcacacagttacctttgttctctgtgtgtgtcgtgacagttattattaattacagtcaacaaggtgcacattaggtctctagaacttattcattttataactgcaagtgtgtatcttttgacaaacatctccccatttcttccaccccccccccgcccccagctcctggtagccaccctttaccctgtttctatgggtttgagttttatagattccacatataggtgagatcaagcagtattagtctttattcatctggcttatttcacttagctcaatgtcctcaaggttcattctacgttttcacaaatggcaagattccatgcttttccagtttgagtaatagccatatatatatatatttatatttatatttatggctattatatgtatatgtatgtatgtgtatatatatgtccattatatatatataatatatataatatattcctagaatatatatagaatatatatatatattcctagaatatataggaatattatatattcctagaatatattattatatagaatatattcctagaatatatattattatatagaatatattcctagaattttccatggcagtaatgcatgcataaataatgtgtaagaaacaacatatgcaccataataaatataatcgacatatagtagatatagcaaatacatatttgacatgtagctgatagcctgctggctattcccatcaagtgaaccatttccataagctctcttcactctttttcattcttttttctcctcaaaccgaatattttcaaatgacccatcttcaagttcacagattctctcttcttcctgagcaaatatgcagttgaattctctattgcatttttcactgtgttcattgtattcttaagctccagaattacctgtttggtaaagaattgtgactttactcactgaccctctaattttgttctcgtattacttttctgatgtctccgagttgtgtgtgtgtgtatatatatatattatatatatatgatatactataatatatgtattatattatatataatatataatatatgatatatgatatataatatatagtatattatatattatatattatgtatatgtgtgtatatatatattatatattataataaatatataaagtcatatataattatatataatatataatatatatatagatacacacacacagaactcagagacatcagaaaagtaatacgtgaacaaaataagaagttcaataaataaagtcacaaaaaagaaccaaacaggaattctggagcttaagaatacaatgaacacagtgaaaaatgcaatagagaattcaactgcatatttggtcaggaagaagagagaatctgtgaacttgaagatgggtcatttgaaaatattcggtttgagaagaaaaaagaatgaaaaagagtgaagagagcttatggaaatggttcacttgatgggaatagccagcatcctatcagctacatgtcaaatatgtatttgctatatctactatatgtcaattatatttattatggtgcatatgttgtttcttatatattatttatgcatgcattactgccatggaaaattctaggaagcatacttgtgcatataaatatttaaataactatacttttttgtctatttcagtggttccagaggactaaattcctgaggcaaactttacttataatgaagagtttaatttaccagaaagctcagtcaaatattgctatcctatttcaactataactaataatgtaacaggctttactaaatgaaaacatatcgatcagggtctgctttgttaagtgtcagcatagtgggagagtgaaaggaagagcttgtactctttgaaagatttctgattttattttacatagtcagtttacacatacatacactgatatatatatattttttcacacatacacgctgatatatgtacatgtatacatatacacactgatatacttatataaatctataacctatgtaagtgttagtgttgtgaaaaaatgtttgaatatgatttcaattgctgaactatattttgttttatcttgtttagcttttcttacacttaataatttcccaatcttttcaagataactttgtagctgttattttatatatacttgatttaaaaaatctatatgcacacagacacatgaatatacacacatatggcatatgagaatatgtatgtatgtatctgaatatatatatattcttttataccatcaactctcaaattctttttggatttagaagtaatataaaaaatataatcaatcaatatattctttacttcatttactactctgtgacctattttgactacctttactttctacagttggtgttttgtgtgtgtgtgtatatgtcttaaattgtataaataatttggaaagacagcttactttactttgctctctctattggaagactggtagatttaaacatcaactttcaaaatcacagtcattccaagaaataatttatttggcatctctaatttctgtttcatgtatttattttttctctttaaatactacctgtttgtttaataggtaactttgtttataatgtaaactttttttcaccattgaggtataatttacaaacaaaaattgcatatatttaaggtatacagtgtgatgttttgtgtatatatatgtaaaatgaaataatcactacagtcaaactaacctgtattacttcatacagttatccattttttgtgtgtgtggtgagaatatttaaatattcctttttaaactaaacttttaaaagtaaatttaaaaaattgagatattacacaatactgataagtgaacaaattatattataaataaatagtttgataaaatttcacaaagtggacacatgtgtagccaggatattaaaaccttattatcagaaccccagaagtctatatcccatgtcttcttcaggaattaaccaactctggccctcaagagtaatgtaaaccttgaccttcagcaccagaaatgagttttgcatttatgaactttatataaatggatatagagtatactcttttgtatcaagctctttttcagtcaacattatgttgttgagatccatggatttatcctatatatagttgttacttctttcattctcattgctgaatagcggttcattatgtgactgtgccacaatgtattaatatttatctatttcaacattaatgaatctttgagtaattttcagtttggagctatacccactgtatatatgctatacccactgtagttcacaagattcgctgcatatatacagacatttctcttgcatatatatctgcaagtgaaattcttgggtctttgaatatatgcatgttcaactgttacaatatagccagatgattttccaaagcacctcactcccacttggtatgaagtgactcattctttttttttttttttttttttttttttttgagatggagtctcgctttgtcgcccaggctggagtgcagtggtgtgaacttggttcactgcaacctccacctcccaggttcaaatgattatcctgcttcagcctcccgggtagctaggactacaggtgcccgccaccacacccggctaatttttgtatttttagtagagatagcgttttgccatgttggccaggctggtctcaagctcctgactggctcattcttttaaggatgggaacatcacttgtcatggggactaaaaagatcatggccagtagaaaacaatattgtttgtatttttctgggcagtaaatacacttaaaagtatatttctaattttagaaaatactttcacaggtatgtaaaagcactgttatttagtcaaatatctgcctgtaagacagtaaagacacgagattaagagcaaagcacagtagaagctctaaatttcatcaaagccctgcctttggaaagccagtggcccaagacatttgctgcctaacaagttaaaaaatggtaacaattgctgtttgttgttactgcaaaactaatattgtgaaaaacctggtagaattggttcacgatgattctgaagcaaaaactttaggtctcatttttatatatgaagtctagtcacaggaactttatctctaaagtgaaaccaatgaggtttaacctataatacttcactggttgcggcagccttttattgctaaatatgaccttttatttttaaataatggaagttaatttggtttggttttattcactacattgttcctgggttatttccttggaggttttgacacccctagagattgtcagagtgacatccagagagcaacttccttttgcttggcatgactgcatgactgcctggttatactttttatttcctttaaatataaaggtgagctttcttttcttcccaagaaatgaatgagaattaaattcctgtaaagagctacttaagctcctcattcccaggaaggattgtaaaaatattttatgtgcaaatgtcacttgcctgactctctccactggctttcactgacttaataataccagctccattagattcatgaagagagattaattaacagtgcataacttaattgtgtcaaaagaaggagagatttggtggtagctccaatgtctatcaaaatgtcattaatgcatttattcctttgtcctaaaaatagagggatcatttaacttattcattattattagaaatagctgatactgaattattcctgaagaaggattttatagataatcaatacaataacttagagcagtaaaagacctcaagaagaagccttgtttagtttactaccttcaggcacttaaagtgaaattatcctcattatccccatttgcacattagaaatttgttatagcttcattaatagtgttcagtctgtgaacactgagctagagggtagtggtagtagaataacttcactaagactaaagatctcccagattctgcctcattacactatacaattctacttttgtttcaggtgaaattgccattcctctttcaaatgcatttggaagattaaagagagatattattaagaacatgcaacatactctcatacacagttggttagagtgtaatttggtttaccttttctaggatgcagtttggcgacagccttaaagatgttttggcattttacctactaatttttcttctaaaaatttgtgcttagacaatctgatataggtacaaggttatttgttgtaacttgatttatgaaagggaatactggaaatcttgatatccaattataatgtaatggttaaattaattgtgccataaatatttgatgggatattgtacaaggattgaaatttggttttaaaatatgtatttcatagcataggaattgattataatgtgataatgagtcattatagcaagaaataaaatagtagagtttgaagttttgtaacgatggtatctacacatagataagtgtaaataatggaagagttttttcctctatgatttttattttccatattttatataataaatattaaaaagcattttaagtatattcaaagaacgagtgagaagataaagccttctttctttgactctctctagtcaaccatttctttagaggattttggtttaatttattgccttctctgttaattatcatatttagactcccttatcttctaaggttttgtgacattattgataccatagtgcatgaaagtgatagagggaagggacccaaggaaagtaacatttatcaaatgctaacctctggctcaggtccttttcatgtatacaataaaacttgtgtttcaaataagatgtcttcctctgggtgagtagtaatgtgatataacaacttaacagtgaatcctatgtctttatcaacatattgaagtatgtgatacatttgttggagctgaaattaaaaagtgcttaaagatggaaataaattggcaatgaaatttaggctgttctatggcagtggcggggcatttatggtttcctaataaataaactatagatttgatcaattggaccttaaataattttcaaaaatcagcattttaatttttttagtacagagaaccagaaaacatgagaaggtaccagatattatatttttttcctggttgagcttcacgaaggagcgtagcttaatagctggaactcaagagtttggggttttgctagtaatttgttgagaggacttgagcaagtcacataacctttatgagacacattcactttatctgtaaaatggcagtgaactaggaacagtgacttttcaaaccatgcctaattggatgcttcaggggagcaggctcaataagagtttttgctgatggatctggagggcctgtatagtaccaggcacataactaacacgtaaccagtgcttaataatcatcagctaaatgaatgactgaatgtgctctaagcaatcctgcctgggagtctgcctttccagcgaagcttctgtcagcataattctgcttatatctaatttatatgttgagcataaaggaaggtgttcattaaaaaaagtaaagaatgattttatggttgaaaccaagtctgaaatatctattgataattctgtgttactatttctggttattatttaaaaacaacaacaacaaattacaacacctcttactctcattttcttctatgtattactaaattctatgagaaagctgtgtctatactgtattcatggtagaaagaaggataatctgtgctttgacagataaatcagtgatgactagacagagaaagggaagatgggacatgccagtaaaaaggaaaagcatgtgtgaaggcaaagagtaatgggagaacatggcaagcttaggtggtgagaaaggtgatgttattggaaggcatggttggaggacggtagtaagattggagcaggattccaccataaagagccctgtatgcttggttaggactttggctgtagttggtggggaagcaagccatcagatattttaagaaaacagagatgacatgataatatatgtgtttcactaagagttctgtagtcaaaatgtggaggttacatctttggagcttgagaatatttgctaagatacctcttgactttgggtttagtgaatatcataaagaatttgaaaaaggttttctttttcagaccatgacattcatttttttttccccagggttgttttgcagaattctgaaaaatggtttcttacatactgtcattgttacaggaccccaacacttacccaaagatagccgttgggtcagggtttctgcactacagtcccttctgtggtcaccagaaatatgttacaggaaagcggtcctgattcagaccccaagagagggttcttggatctcatgcaagaaagaattcagggcgagtccacattacaaactgtgacttattaagcaagtttattaagaaagtaaaggagtgaaagaatggctactccatacacaaagcagccctgagggctgctgattgcccatttttatggttatttcttgatgatattctaaacaaggggtggattattcatgcttcccctttttagaccatatagagtaacttcctgacattgacatcgcatttgtaaactgtcatggcactgatgggagtgtagtagtgaggatgatcagaggtcactcttgtggccatcatggttttggtaggatttagccagtttctttactgcaagctattttatcagaaaggtctttatgacctgtatcttgtgccaacctcttatcttatcctgtggcttagaatggcttaactctctggaagtgtagcccagtacgtctcagcctcattttacccagctcctattcaagatggacttgttctagttcgcatccctctgacatttccccctcccctttataagagaacccttaatcataagggttgcagagggatgaagatccaccttctgtaatgtcttcaggcttaataggggtgatgatattcctgcctaactattagggtctcttgtgttcaggtaaagaggagcttagtcagaaaacatcagtatggcgagggccatttataactcttgagtttcgacaagaggtgatatctggaagattgataagtgtttagtttaaggaatcattcagtaagcttgttctgtattcctacacaaagagtataacagtaatatattccacaagggcaaagcaaaatgaataaagttattccaggtaaactaaattagaagacttttcatgaactaggcaactgttggaactaagctgatatgggcttgttagctgattgtaatatgcccagaattagaatactgatccaggtttttatattacccatccctcttgtttcttctaaacagcagtcagagatcattggttggttcacaggaatgagcagggttagcctaaattgcagaaacaaacttaaaaacaactactgagactagaatttagtaatacgtgtaccatagttcttgaaaaataatatttctctctccagtttctcatttttactaaagacaaattccggtaagactgatttgctttattagacttggcgtgataatttgtataaagttcagcaagaataattatatttcacataagcttcttaattggctttgatagaactctgtttcataaggaatctcatataagacttttttaaagccaagccctgccatgggtttgtaccctcaaatacctatgagttgagtaaattcctctccttttgaggttccacgataacctgtggctcctggacctgtgagaaagtgacattctttacttaccataggtcagaaaccctgtaaagggactgtgtaggcaaggtatgaggctagttccccaaagggcttttattggctctacaagtcaagtttgattccttaaaggaaagcaaaccattccagtcaaagtcttggtaaaataaccaatttctccagttgtgtcctgttacaaaataaaacagattcttattgcacttaagcaaataactatattgccataagttaagaatactcataactagtttccaaattctggagaaatcagttagagagaaacaaatatgttctaaattttgttcacagcagtatactttgctcaattgctacaagctgtaaatagctcaaaagaaaagattctttgactctgaaaaacaaaacaaaggctcagcaacgttttaagcaaagttaaaaagttttctattggttaagttaattcaattaactcctgttctgtttgatattcatgaacgttccagctcttcatgagagttctgaaagttattttctctattctaatgttacaatttccaaaggtattagaaacctgtgtttaagaacacctgctagagttctatagtttattacaaaccaccttctaaagaggattaaaacaaggcaacagttgactgtggttgataaaaagttttaggacagccacaattaaagccacaattgataaggaactttggttacttctgtggcatacacagttttacataacaattataattattaataacatacactaagtcatattagaattacaggagtttcccataactttggaacatataccagtaacatatttatgcaaatacagtccaaagaaagcaaaacaccatttcacatttgataatgcttcctgtatgatttttataccaaataagccaaacttcacctttataataatgtactattaatgttaaactgaatttttcataaaactttatagacatattaactcaattttaatgtttaaccataaggttagattcttataaaccttttataaccctttacatttttttgtgaaagagcagatcagtgctctaagaaaaacctgttgtgcttctattccaatgtttaatttacagaaaaactgaataatacctctttaactttagccaatatgtttacacacagaatcttttacagttaatttttataaaccttccacaacctgtttaaatctttagctttattctatctaacttaaaacaccctttacacacaaaaaaatccacattcccaggccttcttagaatcttttaccaaaagtccattccactttccttacacaccttacatgtaaaactgtatcttcagtagtctcaattacatgttatgttattaacttttagtgacttttacttttggtgaaaaccctggttggtaagcaattttaatcatgtactaggtgtggagcctagcctgagatataccaggcagaagtgcagataagaaccaactctccagcatagctagggggcatgactaactccacacgtccctaggccttaccttacttaagaaggcaagttgtacagtaagagttatagtgtcattttatgaagcatttaggaggcctaacaacctttaaattgtacaacattttttgcataaattccctttaacaaatcctttcgcagcttacacagaccatctgagacattcttggactttctgacttgctctaaacatccctccttttaaacaaccagtcattttactttaggacaagaatttacggtacaagatccttttttatataaaatctctttctttataatctttgtatagctagggggcatggcgaattccacatgtccccaggtcttatctataatctaatggctttaaggtaggtaaatttaacaatttttaaaagttcaagaagcagtttatgaccttaaagcatttagcaaacttaatatctgacctgcataatttagactaaatgtttttattttattaataatttttaaagctgtttttattttgcaaatattactaaagttacatgaactaaaaggcattatagttttttattttgctttcagaatattgaagtgcttatttttgtttcagccaattaattagagctcttttatataaacattacatacaacatatatatagctacacagaaagacagaaggttactagagtagttgtcagatttttcatatgcaagtttctgagttattatttgggttactgtgtttaggttcatgttttttattttttgttttctttgacagagtctaatccaacctctgacttggagtttcaacaagtggtctctgggcaagatggtcaccctgagtaatagaaatgataagaaagggaaaggagagagagaaaagcattgcctgtgcagtgtggggaaggcaaaatgatcagggaggccagagaaagaccttcccattgcagtgacactgaaaagttcaggcagctgcttcttggtagcaaagggatcttttccagcaatcctgtcagctctcaagtttcccctttcagggaggaaaaacctccccatatcccacaatcctgtacatgcctaaccctgtcacccacagccatcagcaaagagagcaaggcagattaatccaaagagaatagcagttaacatcccatagtgccaaacctgttcttagctgagagggactttaccaagaggggcctctaaccccctaaatcttagaagggactctaaccctcctaagttgggcctcgaacccaatgtcagtcaggcatccttgccttttattaagaggtgcctctaacccactctgtcttgggagagactctaactcccctaagttgagcctctaacccaatcccattctttatctgggttgcccaccacttacccaaagttatccagtcagtgctgcggtctgcttcctttgtagggagggtggtttcttcagtatcgtcccttctgtagttcaccagaaatatgttacaggaccccaacacttacccaaaggtagctgttgggtcagggtttctgcactatagtctcttctgtggttgccagaaatatgttacaggaaagaggtcccgatccagaccccaagagagggttcttggatctcacacaggagagaattcaggtcaagtccacagtacaaagtgaaagcaagtttattaagaaagtaaaggaataaatgaatggctactccatagagcagccccaagggctgctagttgcccatttttatggttatttcttgatgatatgctaaacagggggtgggttattcatgcctcccctttttagaccatattggataactttctgacgttgccatgacattcgtaaactgtcatggcgctgatgggagtgtagtagtgaggacaatcagaggtcactccgtggccatcttggttttggtagaccagcttctttactgcaacctgttttatcagcaaggtctttacgaggtgtatcttgtgccaacctcctatctcatcctgtgacttagaatgccttaactgtctggaaatgcagcccagtagctttcagcctcattttacccagcacctattcaagatggagttgttctggttcacatgcctctgacaccatagctcttacaagaaaatttattgctcatcttaacgagtctaatttattaatattctgttgcaaagaggggacaaacaactctgaaaacaaacaaaagtcacttttaacctaagtattttcttctgaaatataattttatttgtttgtaactatgaaatcctcattaggaaacctacctacaataaattggatctgatattcaaggcagaatacatggaaagtgagaccagtgggccaggtcttgaatgataattttactccatcccttaaaaccaagttttgccttggctaagactgtgattaacatttcatttccagagtaaataacaagatacttatattttgatgacaaaaacatcatgtaacacacatgctctgtctaaggttggagaaggaaggtgcttgccagtgggtgtgactttggttgatctttttagcatttagttttaccttgtcactttttgatatctggatataagtagataccatcaatcaaaataataaatcaattagtgtcatatgttaagtgaaacaaaaaaggaaaggtgtactcataatgtaataaaatcctcttttgacatgccaataaacagagaatattgcaaatactggactatttcatttgcaacatgaatcctgaaaaacattattaaaaggaaataacatgactattaccaaaatgaatagaaaacaatgaaagtcctatgtggtaaatggatcaaaatagagcagtctatttttccattaaggtattcagtgtaatgtttgtgtatgtgtgtatgtatttaaattttttcgttcttctagagctaatttcattttcaactgggaaaaaaatattaaccttaatcagtgcttaaaatatcttcaggtttgtgctgaaatattttcttaattctgtctggaaaccagtcaaactgtccagatgaagactgcagacagagtggaaagtgaaaaaagaaaattgcttttgtagagagtttaagcaacaataaactctgtaggaagacagatgttccgtagtgataataagagctagtatttcctctgcccttgctatgtgccaggctaaactaggctcaactcatgccctttcatttaatttctgcaataagcctaagatataagcactatcattatccccatttcacagatgaggtttagaggaattaaataaggtgctccaggttacaaaggttgtgatagttttgaacccagacttacgtcctcttgagcctgaccttttttgctgcctctaagtaaagactcacaggcagcacatgcttttatgtcactctggccatgctcccatcataccacttttttcattgtattgcaattgtccctttacacgcccacctcccacactttctggttagctaacctgaggcaaacacagtgtcttatccttctagttctgaggatttagcacagtgatgtgacccattgtggaagctcagtaagtgcctatagaatgactaatatattgtccaaagtcagtaaaggtttatatattaaataaaacattgccttatagaaaataactgatgtgaaaacagcgtcaattacttttaaagctgtgttaggcattcctttcctcaaagatcagatttttcagaaaggtgggtgagcagattgctgctgcctatagaaatttgagggagtatgaaaaaaacccagagatgattaaataatgtgaaatgtatgtagagcattaagaaaggataagagaagggatactgaaagcataatttaattaatggtttttgcatttatgatgggcttgtcttctctacagggaagcaacccagttttcattgatagtgacccccaaataaaaggaatagtcaggggacattttcaagccttaggaaattttttaaagcttaaaatgcaattagtagaggaaagaaaactattttatatttattaaaatattatgcagtataacttaatggggtaaatcaatttagcttcagctttgagggattgaaatccgatcaaagaaaatcatttctggctataaagaatagtttacaaagggggtttgaggaggattctaaatgagtttgcacttgcatctttaaaatgggtggtattaacttccgcaatcacatcttgctccacgatgttctgattaaatatgatgataatgtccattttaatgtgggtctttaatcaccctgtcagaaagctgtagccaataaaagctctctaccccttgctgtataagcatacttctgccatttgcttcctcttttaaaggatgcctacagcgtgaattctgctactgcctgcagtagtcttcagaagtcagagaccagaatgaacaaggactgccatacaaaataacatacccaccctgccagcactgacatttccaaccacccaagccttacagaaggctggtcaatacccttgtcccttcctggacatgaatttatttgtaaaaggaaaatcttcagagtgaaaaaaatatatcaagagtggagttagtctgccagtgccagtatgtcaagttgccagggtgcttttgttgattttgttttctgaatccacctccaatgtggaattttgatttagttataaaaaaaattctgaaacatctgctagattaaaatgaatgttcatgccctattttacttgactctttgatgaaatgacattaacttttttatgagactcttcttgaccacctcaaaactgttttgtttttgttttgagataaggtcttgctctgtcactcaggctggagtgcagtggcacgaccttggctcactgcaatctctgtctcctgggataaggtgattctcccacttcagcctcccaagtagctagaactacaggcatgcaccaccacggccagctaatttttgttttttttgtctttttagtagagacagggtttcaccatgttgcccaggctggtctcgagctactgagctcaagtgatctacccgccttggcctcccaaagtgctggaattacagaagccaccatgcccagccaaggctgtgttctttctgaggggagatccatactcttctcaaagcatttactacatagttctgcattgtcatggtccatatgctcatcagcccatctcagtggattattacctccttgagagcggagctgtgtcttgttccctttgccttcccagtacccagcaaggtgtgtagcagtgtagcagacatagtcatagtcaataaatatttgttggatgattgtttttctgaagtggccccttcctctttccttttcacttattcatctctcaccttctttaggtcctctccatctgtcccaaggacatgagagctgatatctgtgttcatctaaaccggaaggtttttaatgaacatcctgcttttcgattggccagcgatgggtgtctgcgcgccttggcggtagagttccaaaccattcactgtgctcccggggacctcatttaccatgctggagaaagtgtggatgccctctgctttgtggtgtcaggatccttggaagtcatccaggatgatgaggtggtggctattttaggtactgtgaactttcctaatgtagtagcaaatgcgtagtaacagttttagatattttgcttttcgcatttttaaagagaaatttcctttgtttggtaactttggaaattgggtcactaatgagacgtgaatcttaatgaaaactaataatgctatttcagcagagaacattagtatcagtcacaacctaatgggctgagtttgattaaactttctttggcaacagtaggacagtaccttttagactaaaggtggtcgcagcctaacgtgccttgtagctccatgttagtaagtgtgaaaatggcttgtggaatgattgacgtggtagtgatgaagggtgttagtctcagaagggcaacagaacctgtctagttcaacccttttctttagagaggagccaagtgaggtccagagaagcttagtgactttcccaattagtaaatgaatggaggcttgaaaatagatcattttaccccagaactttctccctcatcacggtcaacctaagtagtgagctgaaagtgtggaggaggttaatgagtctgactctttatagcagagtgatcgcagtataagtaaattaaatttaggtttataaagctggttctgtcctctatattaataggccataaaaattatttggctaataataaattcattttaaaatttagagcattttagaatttagaattcagtagatagttgtactaaccacaaccacaacaataaaagggcagtaacagtatatataagtgataaaataaaaaatgttgcatgtttggggacagtgtaggatatacgcttggcaaaaaaaaaaaaaaaaaaaaaaattgccaaatgaccttttagatcattttctgctcaaatatctgcagcagtttcctgaaatccacagatataaaaggaagtaataatgaggtcagaggagaatcatttcttttttttttttttttaccaggtaaaataagttagaattgcaggatgtcgacttcattttgatcacattgttcatggcttgtgtctcatgaaaaatgagctcaatttttaaactattggattttcagctactgaggtcaacctaccatagcttgaatgccacttattctcaaaagtaaaagattaactgatagattttaaaaactacaaaagcaaaatccaccacaatataatgaaaaattgacttcaaaaagcaccattacttgaaaaatatagaattgagaatggaaaagaaatgacccttcatagggaaacaggttctgtaaaaattgtgagttctagaaaatggttcagggttgcaaatgactgaataccaaggtttgtaagcctttccttaactgcatataaataatattagaattacagttagatttcttctaggaactgtttttttttttcaagaagaaaatacgacattttagagtcaacattctgggtatgtttaatgctcgttagtgcttgttctgctttgtttactggagtataaaggagataaatataacccttcataaaaagttgtacatttcaccagagcaatcctttgtggtaaaatgaagcatatttacactctgtaaaccattcttgtttgcttaaagaagaggatacatacacactaagcaaactattcttgtttgcttaaagaagaggataaaatacaaggccaaaacaaatgtattttattttcctgaatgtccacatcaaacgtgggtaggaaaaaaatatcaaatgtattacatgaaaatgtaatatcatgataaccctcatgataaattacctcagctgtagactcattattatttgctttgtcccgttttcttcattacaacttcatttgggtaactccttttctaaaagaaggttggagaaagtcctgggtacagtgcctctagcctgggtctgctcaaatgagacaatttgctcagtgagacagacaaaatgcattttcctttcattttaaaataaaatggtaacttgttttgcccaatgacacagtaaaaatgaacacaggacccctgggtattgcacccatctcatcatatatctgtcacattttattattttgagtttgtgctttttgttttctctcctcaaaagtcttgggattcagagacttttcacatcttgtgcttaatgagtcaaattatacggacaactctctggtgacctttcttttttttctataggctctgaaaaagactagttcattcaaaagcccatcagatcaggattttttgtttgtttgtttaacatacaaaatgctttaatgatgttttaagaaaggaggaggaaaatagtaacttaccagcacctgttttcctgattctcctcttcttcctcttcttctcctcctcctcctccttttctttctcctcctcttcttcttctcatttttgatagtttaattttgaaataattgcatgcttaatgaaaagttacaaaaattatcagggtgtgaagggattatatatatattaaatattaaatatatataatatattatttaatatttaattatatattaaatattaaatatataatatattaaatatataaaatattaaatatataatcccttcacaccctgatatgtgtgtgtgtgtgtgtgtatatatatatatatatatatatatatatatatataaaggtatatacatagaaaagatatatatgtatatttttaagttctgctttattaagttgactcagtctttataactttatgtatttttttctttttggctttttttttttttttttttgagacggagtttcactcttgttgcccaggctggagtgcaatggtgtgatctcagctcaccgcaacctccgcctcccaggttcaagcaattctcctgcctcagactcccaagtagctgggattacaggcatgcaccaccacgcccggctaattttgtatttttagcagagacagggtttctccatgttgaggctggtctcgaactcctgacctcaggtgatccacccgcctcggcctcccaaagtgctgggattacaggtgtcagccaccgcgcccaactttatgtattttttaaatccttttgatttgccctggtactgagagtggtgggttaacatatcttatcattcatgcgttttatctatgtctccttgcatctcttgtggtttatgctatataacatttactgctgtgttatttggtgtacagattatttatgattgttatgtcttagttgtcaactgtggcctttggcatttaaatatgccaaaagccatcatgtttaatgctctttgcttttaatcttgcaagggtcagagaggaacaaaatccctacatccctcacatctgaggacacctcacaaaaatgggaacttgcctaaattagtctgataggagaaacaagaaggccttgctatctcttacactgatacatttgccagttaaaaggtagagaagggaggttattttaaaattaattagaatctctgaatccaaaaacaggtgcagtttcatgtttttggattcttgccactaaacagtctctcgataggcacgtaattctttagtgtgtcaaaagtgctaaggagtttaatgaataagttctgaagcataactaattaatggaaagataaaaaatttagtcaacaaataacctcctttaacactggaggatggcttcaagatgtttttctaaatagggcatatgaaatataattgcagttcatgtcttttttcaatttgaagttctttcaaagttctttcagttcctacacctccacctttttctgaccttcccactttttataaaacacaaagaattccaaattaagttcgtgatgcatacataatattttatattctttaatgtcttattcctttttagttcctatcctataattacttaatgtgaacagatttgttggtatggctgaaatagccaggttacttctcaatgtcttgacaagtatattgtgcctttctgaggttataaaaatgacatttccctgctaacaatagaccgtgctcctaagacatttgttttgttgtattttcattttgtctttgtgttcattgattattagaatcatagggttagaattattaaactaagacaatctctatctaagtcttttagttgtaacttcaaattctcaagagagctatgtttgtttatgtatggtttggatggaggggttgaaaattgttatggaattgggaaaaagcataaacgaggccaggaataacataattaaatcaacttaatacgaaagagagtctttagcactcgaattaagattctattttaagtagaatcagttatttaaaatccattgtaggctgggcatggtggctcatgcctgtaatcctagcactttgggaggctgaggtgggctaatcacttgaggtcaggacttggagaccagtctggccaacatggtgaaaccccatctctactaaaaatacaaaaattacctgggtttgctggcatatatctgtatttgggaggtatttgggaggctgaggcatgagaattgcttgaacccaggaggctgaggttgcagtgagctgagatcacgccactgtactccagcctgggcgacagagtgagactttgtctcaaaaaaaaaaaaaattataaacgtgtgcattatcaaagaaaatttataacttatactgctcaaaattaaaaatctccttatttttattacaaaaagaaaaaatgagatgtgaatgaataatattttgttattttgagaatctgtgagaatgtgatttttatgctgtagttatatttcttcctgtgcacttgctgttagaagtcaaatgcttcacagtttaaatccttaaaagggtttttcccaagttccagaaaatcattttcttttgcacccatacttctgtgttgtagatgcggaactgtgaaacatgtagatttgttctatagatcatgatgatgaaattacttaattcagatatttttataaagggcaaatcagttgtttgcttttaaaaacatgcatacttgtcttgttttaaacattttaagcagcaattataacattgtttatctatggttcaaaatatacacttttagagttcctcagcctgcaggttttggaataaaataggagttttaacaatcttggtagtttagattaaacttcaaaccctccctccatcatccttcaaaactaatttatcctatccccttgatatcttttaatcctattcttaatatcccttaccacagtcagtgttcttaaaattttggtcctgggtgtgaaaggaaaacatcttgggcccccaagatcactaaggaaaattcatgttggaaactgcttagggcaaatctgcctcccattctattcaaagttactaagatagatgcatatctgatttgcctcctttggaaaggctaatcagaaactcaaaagaatgcaaccatttgtgtatcacctatctgtgacctgaaagctccctctctgcttccagtcttcctgcctttgcttcaagttgtcccacctttccagactggaaccaatgtacttcttacatatattgattgatgtctcatatcaccttaaaatgtataaaaccaagctgtgtcccgatcatgttgggcacatgtcgtcaggacttcctgaggatgtgtcacgggtgcatcctcaaccttggcaaaataaactttctaaattaaccaagacctgtctcagattttccaggttcacatgggccatgactaccatcttagtcattagacttacctgctcataaatctatcatagaatcatagggttagagttattaaactaagacaatctctatctaagtctttcaattgtaacttcaaattctcaagagagctatgcttgtttatgtatggtttggaaggagggattgaaattgttatggggttgggaaaaagagcataaatgaggacaggaataacataattaaatcaacttaatacgaaagagagtctttagcacttgaattaagattctattttaagtagaatcagttatttaaaatccactgtaggcccagcatggtggctcatgcctgtaatcctagcactttgggaggccgaggtgggcaaatcacttgaggtcaggagttaataaatctatcatcagcttcaacctccatttcaatgtttcgctgccaccacaataatcttcctaaggtataattgtgtcaatctcctcattagtatttccagtatcttgaggataaaatgtaactacgagcatggcttatggggccatttgggtctggcttttgctcttctttctggcctgatttgtgtcattgtctatccctaccctattctcaccgtactgaattgcaggaagtttcctgagtttaacaaagttccctcttcctggcaggttgttgcatatactgctcctttatttagaatactttttctctcctttttagtgatttgtctcttgcttccttgttctattttatttttcccttattgccctagtctggattagatgcctctgttctgtgcttccacttggatgcctatacagggttcttagtacctcctatttttatccttcccctgtttatcctcccactgcacagtgaccacttgaaatttcttgttcctttttgtctctctgtcatctatgataggatctcttcaataggttctcagtaaaggctattgtgagtgagacagattagctagtacagctgttacttggtatccacaagggattggtttcagaacaccctcacagagaccctactctgaggatgctgaagtcccttacgtaaaatggtgtagtatttgcatacaacctatgcacatcatcctgtgtatttaaaatcatctctaggttacttataattcccaacacaatgtgaatgctatgtacatagttgttttattggttagggaataatgacaagaaaaaatatctgtacacatttagtacagacgcagccatccattttttaccccaaatattttctatttgtggttcattgaatccattgatgagaaacccacaggtgtggagggccaactctgctatattttgccaacaaactgttttcataattgtttcagttctgggtacccagaaaaatatgttgtgttctgttgactcacttgccaatttcctctatgccctctgttcctcctttgttgatagaggtttatagtaaaatgcatttctcaaaagcccgtaactttagtttagatctgttataggcagaagaaacattttcctactgttaactaggcaatttgaacaaagataattgagggggaaactgtgttaagtatctcagaccacacacggctctctgataagttgctcctttcttgttctccatcacggatccccagtgccaggaaaggaactaacttatacctgcttgttgaccataataagaaaactttaaattacattcattgaaggaaatttagctttaattcctaaagtgacattgcttttgtcatcaactagaatgaatgattcaataaatctgaattaatttcattaatacataaacatttaagaattaaaagggatttaaagaaaggaaaatcatattttccattagcaaatgagcccccacccacttaagtaaaatgtaaagccaacagataccttttgattttaatattccttaacaaacttttaaagtgtatttttgaaaaatacacttgggcgtctttggaagtctgattaaaataccaataattattaatggagtgctcattattttgtatacattattataccaagtcgtttaataaccctgtgaagaaagtaattattgtagtcatcttacagaggaagaaactgaaactctgtaatatcaagtggttctccctgggtcacagctagtaagtaattggtgggtacaggattttaattcagacctgtctgacattatgtgcatgcttttacccatcaaattacaaaaaaaaaaaatgatgctctggttaacaggaattttgaaatagaattttgaaattatagtacaactgtttggtttaatcttaatggaaaataagagtacctatattacctttaccaatttatttatttttattttttaaaaaagatttctctaacaccactgccaagaattaggcaccataacagtatacgttacaaaaacccttcaccaaatattacctaaggtacttagttaagtatgaattggctaaatcagctactaagtatctataaatactgtccttctccaagtgactggtttaccatgaggaaggtgtttaggactgaggagaactgagcccagagtgtgaatgtcatgagttcttagaacacaagatagggatgttacattccactctcctctttcatctgggttatggaagagttcagagtctacttagttggtaaatgttaaagtggaaatgaagctttctttctttgtgaggtctttcctaatttctttaaattaaaaacaatatttttcttctgtgctctgcttatcctgatctgtatacacttacttcattttcttctattttgtaatttttttggtctgtctctcttactcacaaaattaaagacttcttgagagccagatttctatttcctgaatctgcctatcccctcacagcataaagcaaatgtttcaacttttgaacaaaagttcaaaaaacttaaaaaaattttttaagtggtagcattttattttataaataaataatatagcataaggtaaaggaaaaacagaagacaagtaacaataatacaagaaagaaaaaaagaaaacctgtgctttgaatctcactcctttatccttgtgattgctttttgtttctctatacgcttctgtgatcactgcccatactcatacacatttctatcacagcaacacacctttattgaggtataattgatacacaaatatctacacatattgaatgcacacaatgtgatgagtctgtgtatatgcaaacactcttaataccattaccataatcaaggtaatagacacatcctaaaactcccatagctttcttctgtccttttttcatggtaagaacacttaatatgagatctaccctcttaacaaattttgaagttcacagtactgtgttgtgaagtataggctctatgtgtacagcagatatctaaaacttaattcatctagcataactgaaactgtatacccattgaacaaaaactatcccttcccccatcttccaagccctgacagccactattatattctctgcttctatgaatgtaactattatagacacttcatatgagtggaatcatgaaatatttgtacttctgcaactgacttattttgtttggcatagtgctctccaggttcacctatattattgcaaatgacagaattttcttcttttcaaaggctgaataatattccattgtatgcatacgccacgttttctttatcaattcatctgctgataaatactggggttgtttccatgtctacctattttgaataaagctacaatgggcatgagagtacagatatctctttgagattttgatttcaatacttttggatacatactcagaagtcagattattgcatcataggttagagttagggttgagtcaggatgtcagattcgttaattgaatgaggtagaaaagacagccattatttctcacacttcacagttgcaaaagttgtaagacttagttataatatgaacgatatcgtaggcttcaactctaaatgttttcttagaaaaagaaaacaggagagtttcaagatgtaattgatttccaaattagtcttttgcatggatttcttttttataatatgccattctctttcttgatttaggcatatatttggatttttatatgcaatcaatttgttcttaacactaatagtgccaaactcaggataatcagcatgtttattatcatttcttctacctccttaaaggtagcttcttactgatgtcaggataccttctctttacttctgcttaataagagctatttggctcattctttatgtgtgtaaaaaaaatctacgagctaaatcacttatttttttaatagataagaattattatttgcttctctgaaaatgtcttcaagctagtatttatgataatttttaacataatgactttggacatcaatcattgaagactggcagacatcatttctaaatgttttaaaagattttattctaataaaactatgtaatttcttaattttaatactcattttgttctttctgttcttcctttttaaaatattactttatgacccttgcagtttgtacatagttgaagtccatttaaaataatgtaattaaaaatcatatagtcttattcatctataaatgaatatttttgggcctatgtaattataatgaagtttatgagccaattgcaatgataacttatagtgaagggccaactaataaataaaaatgaatacagttcaagtcgagtatttctttattaatttcttgtctggttgatctatccattgttgaaagtgggttattgaagtcctgtgctgttattgcatctctatgcattttttccatcaagtccattaacacttgctttatatattttgatgctccaatgttgggtacatatatatttacagttgttatatacttgataaattgatgcctttaacattaaataatgagcttatttgtctcttgtgacagtttttgacttgaaatctattttatctgatgtaaatatagccactcctgctctcttttggctactgtttgcatggaatatcttccattctttaactttcagcccatgtgtgtccttaaatctaaaatagttcttataggtagaatatagttagatcttgtttcttttttaatatccattcagccaccctgtcttttgattggataatttaatccatttacgtttaagggtattgataggtaaagacttattcttgcccttttgtcattgttgcttggttattttgtaggtccttttttttccttcttgtgacttacttactgtaagttacttactgtagctatggttatttttgaccattttgacttttaaccttcatactagagatttggaagatttacatactgctactatagtaatggaatattctgcttttgactgtgtatttacttccaccagtgagttttatactttcatatattttcattttggtagttattatcctttcatttccagttgaagaactccattaagcatttcctatatgatggtctagtaatgatgacaccatgatcaatggggaacaactaaagacttctccactaagatccagcacaaggcagggatgcctgctgttaccacttctattcaatatagcgctggaattactagcaaaggcaatcagacaagaaaaataaatgaaaggcatttaaaacagaaagaaaaaagtaaaattatctctgtttgtagatgacatgattctatatgtagaaaaagccaaagattctacaaaaacctcattagaactaataaataaatttaataaagttgcaggttgcaaaatcaacatacaaaaattagcagcatttctatatgcaaataatgacttagctgaaaaagaaatcaagaaaaaaatctcacttacaattgttacaaaaaatacatagtaatgaatttaaccaaaaaggtaaaatatctgtacacagaaaactataaagcactgatgaaagaaattggctgactctgggtataccaccaataagttagccctgctccacaaggaacagtgaaaaaaaaaaaaagaaggaaagaattgaagaagacacaaataaatggaaatatgtcctatgttcatgggttataagaattaatattgttaaaatgtacatactagccaaagcaatatacatagtcaaagcaattgctatcaaaattccagtgacatttttaaagaaatagagaacacaatcctcaaatttttatgaagctgtagaaaaaacccaaatagacaaaaagcaatactgagaaagaacaaagttggaggcatcacacttcctgatttaaaattatattacaaatgtctagtaattaaaacggtatggtactggcataaaaaagaaacacggagcagtagaacagaacagagagcccagaaataaatccaaacatatacggtcaactaattttcaacaagggtgccaaaggccacaatgggaaattaatagtttttcaatatatggtgctgagaaaactggatttccacatgcaaaaggataaaattaggaccttattttccacccatacaaaaaaaaaagtcaactcaaaatggataaaatgcctgtgagacctgaaaccataaaacacgttgatgagaacatacaggaaaaaacaccttgatattggccttggcaatgactttttggatataacaccaaaagcttgagccataaaagcaaaaataaataaatagggttacatcacactaaaacgtttctgtacagcaagggaaacaatcaacaaaatgaaaaggcagcctgtagactgggaaatatatttgcaaaccacatatatgtaagaactcttacaactcaatagcagaaaataaataaccctattaaaaagtgagcaagaaacctgagcagaaatttctccaaataaaacataaaaataaccatcaggtgtatgaaaaggtgctcaaatcactaatcatcaggggagtgcaaattaaagtcattatgagatatcacctcacacctgttaggaagactattatcaaaaagactagatataataaatgttgatgagggtgtggagaaaagagaatcctggaataccgttggtgggagtgtagtttggagcagccattatggaaaacaatatggaggtttattaaaaaattaacaatagtactactgtgtgactcaatatccctctactgggtaaatacccaaaggtgatgaatttatcacctcctagagatatctgcacccccatgtttattgcagtattgttcacaataggcaagatatggaaacgacctaagtatccattgatggatgaattgataaagaaaatgtagtatgtatatgcaatggaatattattcaaccttaaaaaagaaagacagcctgccatttgccacagcatggatgaaccttaaagacattatgctaagtgaaataaaccagacacataaataatatattgcatgatctcacttatatgtagaatctttttaaaaagtcaaatatacaaagatagagaataaaacagtggtggggatgtggagtagggtgggaggaaatgagtacatgtaggtcaaaggatagaaaatagcacacatgtaggatgaatatttttagagatctaatgtatagatgaagactatagctaataatattgtactgacatatctcagagattttgttggtttggtaccagaccaccataatagagccaatgttgtaatagagtcaccaattttttggtttcccagggaacataaaagttatgttcacattatacttagtctattatgtgtgcaataacattatgtctagaaaaacaatgcatataccttaatttaaaaatattttattgttaaaatatgctaatgatcatctgagccttcagcaagttgtaatctttttgctggtggacagtcctgccttgatgttgacagatacagactgatcagattggtggttgctgaagggtggaatagagggggcaatttcttaaactaagatgacaatgaaatttactgcatcaattgactcttcctttcataaaatatttctcctatagcatgtgatgctgactgatagcattttagtcacagtagaacttctttcaaaattggagtcagtcctctgaaacccttgccactctgtctgatcaactgagtttatgaactagtataagtactttgttgtcatttcaacaatgttcatggcatcttcactaagagtagattctgtctcaagaaaccactttctttgctcatccgtaagtagcaacttctcacctgttggttttatagtgcgattgcagcaagtcatccacattttcaggctccacttctaattctaattgtcttgccgtttctacatctgcagttacttcctccactgaagtctgtagctctcaaagtcatccatgagggttggaatcaacttcttccaaactcctgttaatagtaatattttggctttctcacatctcacatgaatcacaagtgttctgaatggcatctagaattctgaatgttctccagaagatttcccatttactttctctagatcctttagatggatcagtatctatgacagctatagccttaccagtatatttcttgaataataagacttgaaagtcaaaattgctccttgatccatgggctgcagaatggatgttgtgttagccggcatgaaaacagcattcgtcttgtagatcttcattagagctcttgggtgaccagatgcattgtcaatgagcagtcatattttcaaatgaatctttttttctgagcagttggtctcaacagtaggcttaaaatattcagtaaagcatgctataaacagatgcactgtcatccaggctttgtccttccatttatagagcaaaggcagagtagatttagcataattcttaagattctaggactttgggaataatcaaggagtactggcttcaacttaaagtcaccagctgcattaggccctaacaagttagcctatcctttaaagttttgaagccagtttttgacttctctctatctatgaaagtcccagatggcatcttcttttaatagaaggctgtttcatctgcattaaaaatctgttgtctggtctagtcaccttcatcagttattttagcagatcttctggataacttgctgcagcttctacatcagtacttgtgtttcagcttgcatttttatgttgtggagatggttccttttcctaaactttataaaccaatctctgctagcttcaaacttttcttctgcagcttcctcccctctcttagcctttacagaattggagatagttagggccttgctctggatttggctttggcgtaagggaatgttgtgtctggtttgatcttctatccaggccactaaaactttctccttatcagcagtaggtctgtttcattttcttgtcattcatgtgttcgctggagtagcacttgtaacttcctttaagaacttttactgtgcattcacaacttggctagctgtttggtgcaagaggcctagcttttagcctattttagcttttgacatggcttcctcactaagcttaattatgtctaccttttgacttgaaatgagagatttgtgactcttccttttgcttgaacacttggaagccattttaaggttgctggttggcctaatttcgatattattgtgtctcagaaaacaggaaggccccaggagaggaagagggagttggggaatgatagatcagtggagtagttaaaacacacacaatatttattgattaagtttgccatcttatatgggtgtggtttgtagtggccccaaacaattacaacaataacatgaaagattactgatcacagatttccataacagatataataataatgaaaaaattagaaatactgtgagaattaccaaaatgagacatcaaatgatcacatgctgttagaaatatgacaccgatagacttgttcgacactgagttgccacaaaccttcaatttgtaaaaaacataatacctgccaagcacagtaaggtaaagcacaataaaatgaggattatgcctgtattgtaatacaaatttttgttaaataggtagattttagctgctttcatctcacacacaatcaaaaatatgtgagatgatagacatgttaatttgcttcactatagtgattcactatagtgattttactatctttatgtgttccataatgttacatgttaaatctcaagtatatacaataaaacttactaaaaaaagaagtgaagccatggattaagttcattatatagaaaaatcttcaaatagagccactatcacacccctaaactcacacaaaactacctaagtaaaattcaaaagatattttgtttggaacctgttggatattagttagcagttctcactgatgaatacctgtggtaatttttatttatttatttatttatttttctgagactgagtcttgctctgtcacccaggctggagagcagtggcgtgatctcggctcactgcaacctccgcctcctgggttcaagccattctccttcctcagcctcctgagtagcagggattacaggcgcccgccactgtgcccagctaatttttgtatttttagtagaaatgggatttcaccatgttggccaggctggtctcaaactcctgaccttgtgatctgcccaccttggcctctcaaagtgctgggattacaggcatgagccaccgtgccctgcctaactgtggaaatttttatgcatttattttattcatgtcattaactcaccaaataatgtgtctcacatttgaaaaaataaatctggctataaaatcagcccctttggggaccataatccctaagcataccatagtctgtattactcctttaattatgttgtaactctgtctctgttttgtcttaaatgttccagtttcctactatatgagtctttaacaattatttctgttttacaatcctttttcctgtagtttaacagcgaaatacttcataagacttgatgaaaagaactgagaaaatataaatagaccaaacaacaactttcatgtttagcacaagctttctactaattttagtactttgaggggaggttagttatctctagctctaaaatgtttatagcagagactacttgtacccagcgggagctgacctaaaaaccagcatcaaatgttctgtagtcaagtagatgaaccggagttcccagccctgaaagtgtgcaaaatcttttgtacagtaaagaaaagtgtttcttcattagctattccatgcatattggatgcatgcacgttagatattctatgcctaacaccacattttcacagcctatgatttctgggatgacttactgtaaatgtgcataatatgcttgaagaaagacattaaccaactttactttggctggtaaattaattaatttttttaaaagatgaccatagtcccagaaacacggtaaaagtttgttgtgaattgattgcctcataggtgacatagaaagccaacaaagtaaacacactttgaaatggttgattagcttaatatccagtttacatattgcatatcccaatgaaaattctatataatgaaacaattagtattgcttattacacaaagtgaattctgatgttgggggcagaattatctacttttgttaattttgctatgcttttctaaacttttttgggagaggagcaggaaataaagtttatcatgagttcatactctagtttattgctattcttactatatcatagactttttatttccccatgatacgaaaaacatagtaatttaatgtaataatttaaatttcaaaattttaggtagaaatagtgtaagaatttttaatttcatcagttaagttaaataaaatatgtaacagatatttgaatgcttctgtaattaaaaatggcccatattggtaagaagaaattacctttatattttgagtaccttttacctgttgacaatgcacttaataatcaatgaatatttattcacaatctacaagtctatgtatgtattttatgaattcagttttattaagaagtataatgaaagacatcggtgaaaatggtttgctgttttttaatgtagaaaaatttggaaaacatacagtaggaagaaaaagacccataaacacaccacttaaatccagttgctattattatttaaatgcattttcttttagtcttgtattcctttagacttttagctcaatttatatcaattgataaatttatataacatagtataatgatatggtttggctgtctctccacccaaatctcaccttgaattgtaataatccctacatgtcaagggcagagccaggtggaaataattgaataatgggagcagtttcccccatactgttctcatggtagtgtataaatctcatgagatctgatggctttataaatgggagttcccctgtacaagcgctcttgcctgccaccgtgtaagacgtgactttgctcctcatgtgccttcggccatgattgtgaggcctccccagccatgtagaactgtgagtcaattaaacctcttttctttataaattacccagtcttgggtatgtcttcattctttattagcagtgtgagaatagactaataaattatatataataacatataattataaaatacattatactttggttctatcaagagaattttcttaagaaaagaagataaagtagatttcttaattgacaattcttttagtcttggcacctcagtttcatttttatatattttgttatagttgtaaccatattcatattattcttcatttatttcttaattaacattataagttaggaattttttgcatgttacctcaaaagctgttttaattctttggacattaatattttacacatatttttacaattgccatagctattggacatatagggttttaaaaaaatctagggttatcattaataacactatagtgaatattacatgcagtagttctaatcttttgattctcagaagtgaaaatactgagtcaaaagcattgattattcttaagtgtaccatatatgaaaacaaaatagctgaaaagtaatgagcactcataaatgggtaaaggattataattgacaatttgagaaaatgatacagaaatgaatcatagagaaatgtaaccttttttctatctcttgaaggaaaaatccagtatggaaagaggataaaaaggaaaagaaataagaggtagatcaaagcagccctttaaaagcttggctttttttggtaccatcaagaactgtggtaatataacagttgttgatctcttctgtttacaaagtattacacaaattataagacaaaataaaaaccatacattgttccataacgcagagaggacctaccattttgatgcatttacttctgtgctttgtgtgcatgtatgtgtgtatgtttgggggtggggagatggggtacataaaatgagattatgctgtatgtatagtttgatatcctgcttttactattttatataaccttatataacctccatgtcactttgtaaaatttatgataccttgtggctgcataatatttcattatttattgacatttatttctaatttttggcaattataaatttcacttcagtgagcatttttataaataaatttggcacttaggcaattagaataaatgcctataattgggattactagtttgaagagaataccgtgtacagatttctgaaattcatctgtataaaaggaggtagagtttctatagctaaagtgttcctttggttattttttttatttcattttattttattttattttttgagatggagtctcactctgtcatccaggctggagtgcagtggcacaatctcagctcactgcaagctctgcctcccgggttcacgccattctcctgcctcagcctcccgagtagctaggactacaggcacccaccaccacgcccggctaatttttttgtatttttagtagagacggtgtttcaccgtgttagccaggatggtctcgatcttctgacctcgtgatccgcctgccttggcctccctttggttattatgatgctgtataaccctagaggctttctttggctaccaagtctctgatctcccttccttggccaaataaatggttattaggttgttaatttgctcatcagtgtcatgaactaaaaggaatttttggagggtccagaaacaaatgaattgcttaagattaattaactattcatgattgttgtttcatgctgatcacatgatcatgtggtggttttaatcacctcttcagtcatgtgcatgttttctctttgtaccctgaagtgcctcttaagcttgaaatcaagccctatgtttctctcagagcttcccaactacctaagtgagcaaagaatgtgtaatctcactcactcaacctctctatttctgtcttgtcactgtctttgtctctctctcatttctgtggttacacattttcttttctctctggttgtctgcctggcctgaagggtgatacaaggtctgttgcgggaagtcagggaccccaaacggagggaccggctgaagccatggcagaagaacgtggattgtgaagatttcatggacatttattagttccccaaattaatacttttataatttcttattcctgtctttactgcaatctctaagcataagttgtaaagatttcatggacacttatcacttccccattcaatacccttgtgatttcctatgcctgtctttaatctcttaatcctgtcagctgaggaggatgtatattgccttaggaccctgaaataattgcattaactgcacaaattgtacagcatatgtgtttgagcaatatgaaatgtgggcaccttgaaaaaagaacaggataacagcaattgttcagggaataagaaagataaccttaaactctgacctccggtgagcccggcggaacagagccatagttctcttctttcaaaagcaaatgggagaaatatcactgaattctttttctcagcatggaacatccctgagaaagagaatgcgcacctggcggtaggtctctaaactgccccccaccccccgccgggcgtggccgtctcttacggtcgagactgcagaggtgaaatagactccagtctcccatagcgctcccaggcttattaggaagaggaaattcccgcctagtaaattttggtcagaccggttgatctcaaaacgctgtctcctgataagatgttatcaatgacaatggtgtctgaaacttcattagcaattttaatttcacctcagtcctgtggtcctgtgatctcgccctgcctccacttgccttgtgatattctattaccttgtaaagtacttgatgtctgtgacccacacctattcgcacactccctccccttttgaaaatccctaataaaaacttgctggtttttgtggcttgtgggcatcatggaacctaccaacatgtgatgtctcccctggacgcccagctttaaaatttcttttgtactctgtccctttatttctcaagccagctgatgcttggggaaaatagaaaagaacctatgtgaatatcggggcagattccccgataaaggtcttcttcttttttttttcctgttagttctgattttaatctgcatgatgacagcagatagttgctcacctctgtggtttgagtgcagaaagaataaatcattaacagagtgcctctaggaagatgtttccctcctggatatattccccctgtctttttcactttaaaacttttcctttcacgtggaagttgaacaaagaatgcagttgactacacttcagaaaccaggggcttttatggaactgcctcggcagaatggccttttgggacctttaaccttagactctttctcgttctttttatttgggcaactaagtacttgatttcaaatgataaatggttgagttcaggccaccagtgggtagtgctctgaagtgaataggtgatttttgtgtgatttctagaatttttaaaagacgtctacatttgatgatagtatagcactttttatagaactgttcatgggataatacatttgagtctccatgttttactcaacctgggtccttcagctttgtaattgtggatggggagctcttgggctggactccgagaacctgtataaggttggctaggtagagagggaagggcattcttggggaactaagttgtggcaagttttaattggcttggggcacaatacatagttactgaataatgtgtatttaatatatgttggatcagccctagatttataaaggctgttacagcagatccttctgtattgcattttgttatctttaccagaaggaccagaggcaaggatgaaactaagaagtcacctttgctccttctggtcaaaataggaaaagttaaggtggcagaagataatgaaattatttgttaaaatgaggtgtttggcttctctgttggatccatttattcatgccactccagattttcatcaataactgaattcagggtgatgttactttacatattatatgaaagcattgtgtattgttatgtgtttatagatgtggttataccctcagctctaaattatgctagaaggtcaatactgtatatgaaactgaataacaagagtgattaaataagaacagtgttagatacttgaatatgtatcttatactgttttctagggaagggtgatgtatttggagacatcttctggaaggaaaccacccttgcccatgcatgtgcgaacgtccgggcactgacgtactgtgacctacacatcatcaagcgggaagccttgctcaaagtcctggacttttatacagcttttgcaaactccttctcaaggaatctcactcttacttgcaatctgaggaaacgggtatgttctctgggtctgctttttcttattagtgtccagagtattaattaattcagctctattagctgaagagtagagaagatattttgttttgcagcactaaattcccatcaatgtaaagtggcataattttccttctctttatttatattttgtttactttttaaggaaaaaaaccctatttctatgagtaaagatttgaatctttaccatttaagatacaaaatgaaaaacagacttgaagagaaacaagctgtgaactctattatgatgtagttagttcttggagtttataatactgccataaaatcaactccagtgtcttttacctttttatatggatttttttaaagctggtaaagttaatcaacctgggtgcctgttttacattctcagctctctttaggcacttctcatttcgtaatcaattcacaaagtttactctttcaaagaacgctatctcaaaaattaattagccgcattgacacatcctacaaatatggataagaatcctttattttacactgctgccgcacatttaaccttcactgccattttgtagccgatgagtgtgacacaaatttaatttgcatgaagaaatctcctagttctggtttctaggtcattgggcattgggtaaggcttttttattgccaagaatgaaatacatgtttggataactgcacttaagtgattttatctaaaatgatcgcctgtctgtggtgaagtattttgaaataacagtcattcctttctataacctgcttaaatgaaaccttctctgtagttaacagggagggaagaaattgagcaaagagataaattaatgtctatactgtagcaacatagaaatgaacataattaaatcaatgtaattcctacttagggttccaagaaaggatgagactagcaggagtagtgtttgtactggctgtatcacatttatttgatctatacttgaacatcattttcagttcatacgtttgttatcaaatagatggagcatccagaatctgtgagaaagaatgaatagctgtagagaacacacagacttaagcacagagtacgtatgctcaatagacctatagttagatgtgaatattatgtcaaacacaaatagtggaaagtgaaggcaatgatgaatgtgggaaagggaagctaaatattaactaaatgtggaagtttctcacttatgtgttagggagctcagagtccctttcagtattaagcaggaatgtctcctttggtctgtgctctgccttctgcaatgacaaatttcccttcaacaaggcaacctgtttggtagttgactcttgtagtgtggttggcccttgaataacacaggtttgaaccacgagggtccacttacatgccaattttttttgcccaaatgcagatgaaaaatacagtatttgtgttatttgaaacttgtgtataccaagagcccacttttcctgtatgtgggttccacagggcagacagcaggacttcggtatgtaaggatctgggtgtgtgaggggatcctggaaccagtccccctcgtataccgagggaagactgtagttttaagttcccttcaatctaaaatgtgcattttaaaatcttcccccatactgcaagattactgaaaactcctatccaacatccgtacattcctcaggacttgatgtttataatattcctgtgaaagaaaatgggcagttatttttccttcaaatcacatgagaatactcaggcccagagggattaatatcaaacaaccaagtgacacatttgcaatgcaaggggccaaggagggacaatggaaacagatcaccagtagaacatctgtcaccactttttctcttacacacacacacacacacacaaatacacatacacacatgcattcattggttgtgacagctgagtgcacactggtgtggactcagtcttctgataagaagacaagctagagacagaaaactgttgttggtttttcaacaggacccagaaacgctgtgcctgtctccatgggtgccaatttgctgagtaacaccaagcggctttcttccctcacaacctgtttcctgttataactggtgtcaatttttataattctagcctctctgctcttgatgcattgtctcagtaacttggcaaatagtaggaaaagggtgtcattcagtttcactttattttcagagaaacaatatactcatgaaaaagataagtggtgagaaaatattatctaatgggtagtaatactagctaccatctgagaacatgttgtatatagccaggcacttcaacatagtttacatataatatcttattaaatgtcaacgacccacaaacagagcagtatagtctccatttcacccatgaagacgttaagtttctaagactggaacagctagttccctaataacctaggagtcagggcctgcatttgaattcatctctatgattctaaaacctgtattttttagactaccatgttgttttagcttgtcaaagccactgacattttcttttccataatattccacagaaacactgtcaacaatttatagtttctcattcacttattcactttattccaattgatctattaatgaaaacattttgttcttattgctattattgtaaaaattattgcaatgaacattcattgtgaattctataaccaaaactatgtctttagtatgctattgatatctcatagctatcatagccattggttaagggtgtgttcctactaagtaagggagcaggttttgaatccaagttgtcagccatggcatggtacagttctggccacacatgtgtatccagtggctcagtggagaggtttgaatagtgtgtggctttccatggctgcaataaggaggaaagtgagccttctttagctgcttgccttcatctccattaaggaaaaataagatgcttactgtgcgaatatagctcttcctacccatccttaagcccctctatgtaaaaattctagagctataactagaattccatcaaattctacgaattgacgaataactagaattccatgaaacaactacggcatggaatggaaaatttttctgtcaaggaccagatagtaaacaattttggatttgtgggccaatctcaactactcaacttttccactgtagtatgaaagcagctgtcttagtcagcttggactgccataacaaaatatgatacattgggtgtcttaagcagcaggaatttatttctcacagttctggaggctgggaagtgtatgatcaaattactggccagtttggttccctggtgagggttcttttcctggcttgcaaatatccagcttctcactgtgttcccacataagagagacaagaaggggaggtagagagatgggaggtgggaaggaagccagctagctcattggtgtcttataagggcaccaagtcactcatgagggccccaacttttttttttttgagatggaaccttgctctgtcacccaggctggagtgcagtggtgcgatctcgactcactgcaacctccgcctcctgggttcaagtgattctcctgccttagcctacagagtagcaggaattacaggtgcatgccaccacgcccagctaatttttgtattttcagtagagacagggtttcaccatgttggtcaggctggtctcgaactcgtgacctcgtgatctacccacctcagcctcccaaagtgctgggattacaggtgtgagccaccgcgctggccccaactttattacctcttctaaacctaattacctccaaaggctccatctccaaataccatcacattggggataagagcttcaacagatggattttgagggggtaaaacttagtcaatagcaaagctgtagataatacataaagaaatgaggaagattgtatttcaattactttacttacaatcaggtgactgcccaggggccttaagtgtgttaattgttgaaaaaagaggactggaagaagttaaatggggacaacagtgggcatatgaatagaatcgccccacctttattagaaagcaaatctattctacttgctgcctattcagagggttatgagatggaaaatgccataaatattaataagaagtagctacacaaagcaggcagatagcatgaaagagtaaggcaggatttatagttactgtggaaatggagagttcatttcatctgtgaacgagacagctgttactcactctggtaggacattgccttgtggggatgctgggctagtgttgcttagtcctcatatttttttttctccaagaggccagaagcacatttttatgggaaaacacatttgtttggtaattgatttgatttgtttttaaaattctgtggtcaaacaaaataagtttgcttgctattggttcaacagctcatgatctaaatggaatcagttaatgaactcctggtctcatggtgctagaaacctgagatttttacctggggcctggacattttgatgaaaacaaattttattttatctattttctaactgacatttagcttttcctttaattggaaaggttgctagacaactacagtgttattagaagtaccaaaagcaattatattaatggatattttcatatatcatatgtgccaaagatatcttgaaatgccatttatgctcattactatttaacaattatgatagttattagacttgctgctagacagaagtacatagattactgtaaattatttgaaaatattttgataggatttcaatatatgtttcctttgcaatcctacatattttattttgtgcatttagagcaattcttttaaggagaggtccacaggctctgccagactactggagattaagatcccatgtgtgagagtcagaagctaaactgaattgagcagaaggacctgctggggtttttttttcaataataagaacacaattctgtagtttccaataagtttaaacatattcagaaaagggatgagagagaagcagaggaaagttgactcatttgcttactttatgtatgtatttatttaaccaattcaagatgctatttcctggaatgacaaaatggtattcattaaattgatgaccagctcttaggtatacatcaaagaaagtaagcaacacaccttctttgacacacacataaaaaggtaacacaggtgacacctacattttaaaaacttcttattagacttttaaagttaatattacagttcctcccattttacctatttgttgcacaatgatttttaccatttgtgtaaaaaagagttaacctggcaggtatgactattgtcctttgaaagacttgcttataaagctggctcttgtgaacttgatttcgggggactctcaccactaactgatgagtagctctctgtgccttaattgtctgttctaacaaggtgggttgatgctgaatatcaactttccttcccgaagtgtggaattttggcatatgtcaggaaaagatgcctttgtgaccatctccagtacaaaaccagaagcaccaagtccttcatgaacttccctggttgacagcatttctcgtgtgttgtcatactcttgtttgtgcctggcttcccccagactttgcccatgccccttttccctttgctaaattttctttgtatcttatgctgcaatagtcataaccatgaatatgatgatatgcagaattctgtgaatctgcctagtggattgtctgaccttggtatggacttgagggtaaccagtgctccatatataaaggttggtaggaaatctgtatcctcaaaggtcctcaaatcagcagatatattggtaatttcattgtaacctttttttccataaaagatactgaaacctacagacagtatgttttatgagtaaaagagaatgaaccatttaaaaataagtgttatatttgtccataaggcagtcaagcgaatttcatttccttgaaacttaaaatatatgttacatgaatactgctggctacaataagcatgcctgagattttaaattatttctgaatattttcttcactttcaagatagcaagaacatatttttctccagattgactatttaaataggataagagaggaattttatttgctgtttctatacgtcttctcatgagacactttgttgaagtgtggcacagaaagtattggctggctcaccatatagccatgcatccatccagcccataacacataacatggggttgtggacataaaagaccaggtgcctgctttccaggaggctccagtctagtgagagatcatgagtcagataagtgctacgagagggttattctcagtacacaggcggcataaaggagatgaattcagtttgtccaaggggaggaaacagggaaggattccaggaggtgacaaggacacaggagttaggatttcatttcaaatagagaaataatctagaacaaggatgcgtcttgtatatcaccaatttcattttattttctttagagatgagaaaaattcagacctaagaaattaagtgattgcctaagttcacttagctagttagtggtagagctgagactggaatctagtccttggaagctcatgctggcagtgtttctactatttaacctagaataaaagcatttcgaagaagattgtcagtaaaatccaatacttgattgtgttcatttttaatagggaaggataatatgtggcatcaatttgcatgtgattcatagattgattttagtttttcatactgtggttcaggataaaactaatagtgaagccaaaacaaaacaagcaataagcagtgttcagagtcagtggacaggactctcaatctgggcatgaaccaatacgtctagtgtggccacagcatatctgtcacctgcattgtaaaatatctcattttagtgaaagcatttaactttcatatgagtattgtttaagaagtgttactgaatttagtaatattgtcttgctgataatactgcattctgatatactctctgttaacatgtcaatactgctgtactggttagtataaatacatagaaagataaaaattctcacattaaaaaaactgctacttttttttttttttttttttcagacaaagtctcactctgtgtcccaggctggagtgcagtggcacgatcttggctcactgcaacctccacctcccaggttcaagcaattctcctgcctcagcctcctgagtagctgggattacaggtgcacgacaccacgcctggctaatttttgtatttttagtagagacagggtttcaccatgttggccaggctggtcccaaactcgacctcaggtgatctgcccatctcagcttcttgaagtactgggattacaggcatgagccacagggcccgcctgctactttttcacttttgtatcttaagttatttttaaaaagatattaatacttttatattagaagttacaaaaaatattgacaagcttaccaccaaatgtgtactaaattatgtatactaaaaatattagttaatcaaaaaaaaaggaagggaaggagaaaaagaaaatacaaaattgaatattttcatatagaactggaaaaatctgagacttgtttggtagcaggtagagaatgtgttttttttgttgttgttgttagggctgaaaactaacagaagattactatgcagccaattccaaaaatgcaaaagaagaatgtaaactgaattttgaaaaagaaaaaaataactaagattgaaccatgttaatacaggctaaaattatataatcaagcgggtttcccttttaaataccatgtctatgttatatcggtgggtataaaccctcttgtggttccagattgagtgatcatggccagagaagtgttgtcttttcactccatgactctgcttattttgtcactggtgtaattaaagtttctaagcaaatggctctagagttctaatacctttactattgtcatggagtggggcccattggatgttgataaaaatgatgtcaaactgacatcctttagtagtggtctcaaagaattgcttccattgtggcttcagaggcttatcttcctttagctccatagtttctagtttagagtctttttgtttgtttttgaggcagagtctcgctctgtcacccaggctggagtgcagtggcacgatctcggctcactgcaagctctgcctcccgggttcacgccattctcctgcctcagcctcccgagtagctgggactacaggcgcctgccaccatgcccggctaattttttgttttgtaatagagacggggtttcaccatgttagccaggatagtcttgatctcctgaccttgtgatctgcccgcctcggcctcccaaagtgctgggattacaggtgtgagccaccgcgcctggcctagactcatttttattaaacatctctataccacttagttcaatgcacaggttagtctggtaccccttgccaatatttctttaacccttgtattagtctgcttggcttactatcacaaaataccatagactgagtagtttcaacaacggaaatttattttctcacagttctggaggttagaagtccaaaatcaaggtgcagtagggatgttgtctggggacgtttctctccttgggttgccactggccaccttctcactgtgtgctcacatggcatccctgcagtgcctgtgtgtgagagagtgagagagctctcgagtctcttgttataaagacacaagtcctattggatcagagcctcatcattatgacctcacgtaaccttgattactttctcagaagccttgtctccaaatacagccatactagaggttaaggcttccccatatgaatttgcgggtgggagacataaacattcagtctataacaaccaagttttatattttaagttaaatgtgaagaaatgactttgaaaatatgttaaaatcaaaacttacagctggagtgtaacattactggggatggatgtgcagcagcagcagcagcaacaacattcagtgctgatttttataacttctgggcaatgtataattatcaataccagcaaggttttcttgctgccctacagtgatttaagaaggattgctatgtaaacttagaaaaaagtccccaggcatgatcaatccgaattgtaaaatggaaaaacagaacatagaggtacatgtagattccatttaaccctaaaaagccactgtccttttctacagatggcactgttcttgagtagagatcaactgaagccagctggcaatgttatggagaagcgtagtagcaatcctgtattttgatgttccagtggtaagaaatagtggtttgggttcactctggcattagcacaggctcagaactcaataatgcttttctttccagaaaacgttcatattatggtgaatccagcagcacaaaatgtcatttttttctgtgatcaatgaagcttctcagtagcaatgatcttttgtaaatgaaaaacatactggaattggatatcaaacaggcataaagtatttgcttggtgtacatgtgtcgcagattgcatctatttcagtagcaatacgagcatcttcgaagaaatggtctaggagtgacaatgggtgttccaactacttttttttcttttcttcacccaccctccccacaatggtatattagctaaacaaaatagtagagcccgtttgttccacgaatccatcaattcttgatgctgtggaaaagacattactaaaacattgtccacacttgcaacaaaagataatatagtttccacaaaaccctcaaatagtacgtagtatctatgtttacttctctcataacactgattatggtactttggtttcttatttacatttctatttttcaactaaacaatgagctccatacagtaggtattttctgtaatactttattgtcaatggccagaatagagtctgctatataattaaatgaatgaatgaaacgtgaatctgtcacgctgcccagcagtttttatcatcactgaccagaataatcactgttatctaaaaacacacaatatctttgataactttggcaataagccctatgtaataggattatgaaaattaccattattaattggtgttaaatcacgattagagttaactcccagctgctgtttctaaccatttgtgcctgcaaattctgcacagtcctgcagcaccagcttgtctagtgcattcagagtagtacagcaattttgatatcactgtggagtgaattgagatcacccgatgccagtggctgtgattgtcagagtagtgccttattcccattgtgaaggactttgaagagaaaacgattgctctgaaaaccctgcatgccacatttgaatctgagcagagtgtagatataactctcattacctcaattgatcatcaggactgcaaattcactccaacctactggccctgctggcagtagctctgcttacatgttatggtttgtagaaatttcacttccaaagtgatgctactcatcacttcacagtttacacgccacaggcgtgatggcgtttgagcttgaaatcaacactgtaagacaagtgagttaagggaggtaaggtgcttcgctcatggccatacaggtgataattgttctgagcctgcagcctcagtttttcaactccaagctggctccaattccactgatgggggtagaaagaggcagaccttcaacaattcctgaagtttgtcatgtgcatttagatgaagcagaggcctaattatggagtcttttaagcccttaagctgcttctatttagggctctctgttggtctgcttccagacggaataaaaacttttccacatttagtcaccaggacagaggttcacagataccttgctcctgaatatgcctccaaagcagttattcaaggacagtttcacaagtttcaaagttggggctggattcagtaatttaccaacattttgaaccataggtaatactgtctgttctttgccagctcttctttttaaaaccagagtttatttttattgcaagaaaatacatgttttaatagtaaacaagaagaaaataaataagcctttaatagatagaaaagtatttaaccaacataatgtaaaaagatagacattttacaaattatttttcttgcaaatgtctattcaacaatctatttgagacatttgtttttattttaggtctgagtcctgcctcaccataatgcatctctagaggcatcttagctggacgctagactgtttgtttctaaaatgtctactacttatgaattctcagccattaatatttgatatgattaataaatgatgtgctctatcacatcattttcatttaaaggaaaatactccttttgaattagaaagcaagggtttgtattaatgttaagacttaaatgtgtgtattattttcttccttaatgccttttggcattgatttaaacttaggatacatgcaaattttcttatcctaactacttaggccttgttttactttttctttgtttttaatttttttataatttgtataaatttaaggggttcgagtgcagttttgttatatgagtatatggcttagtggtaaagtctgggtttttagtgtaaccatgacctgagtaatatacattgtgatcgttaagtaatttctcatccctcacccctctcccaccctggcaccctcccaagtctctaatgtctatcatgccacactctaggttcatgtacacacattacttagctacgagttataagtgagaacttgtggtatttgactttctgtttctgcgttgtttcacttaagataatggcctccagttccatctatgttgcagcaaaagacattattttattgtttataatggctgaatggtattccattgtgtgtatacatatcacattttgtttatcttattgacttttattttaggttcgggggtacatgtacaggtttgctacatgggaaaattgcatgcaatggggctttggtatacaggttattttgtcacccaggtaataagcatagtaaatgacagctagttttacaaacctcatcctccaccctccagtaggttctggtgtctattgttcccttcttattgtccgcgtgtactcagtgtttagttcctacttataagtgaaaacatacagtatttgattttctgtttctgcgttaattcacttagggcaatagcctcctgctgtatctgcattactgcaaagaacatgattttgttctttttatggctgtgtagtattccagtgtgtatatataccccattttccttatctagtctaccattgataagcatttaggttgatttcatgtctttactattgtgagtagtgttgcagtgaaaatatgcatgtgtgtgtctttatggtagaatgatttctattcctttggatatatagttagtaatgggattgctgggtcaaatggtagttctgttttaagttttttgacagatctccaagctgctttccacagtaggtgaactaatttaaattcccaccagcaacatctatgtgctcccttttctctgcatcctcaacagaatctgttgttttttgactttttaagaatagccattccaactggtgtgagatggtatctcattgtagttttgatgtgcatttctctaatgactattgatgttgagaatttttccatatgcttgttggctgcatgtatgtcttcttttgaaaagtatctgttcatgtcctttgctcatttaaaaaatatttttatgtttttaattttttgtgggtacatagtagatgtatgtatttatggggtacatgagatgttttgatataggcatgcaatgtgaaataatcatatcatggagaatggggtatccatcccctcaagtattcatcctttgtgttgcaaacaatccagttacactcttttagttattttaaagtggacaattaagttattattgactatagtcaccttgtgctatcaaatactaggtcttatttctttctacttttttgtacccattaaccatccccaagtaccccgacccaggccccaccacccatcccagtttctgttcaccatccttctactccctataattatgagttcaattattttgatttttttagaccccacaaataagtgagaatatgtgaagtttgtctttctgtgcctggcttgcttcatttaacataatgatctccaattccaaccatggttttgcaaatgacaggatctcattctttatcatggatgaatagttctcaggtgtgcatacataccacgttttctttatgcattcatctactgatgaacgcttagggtgcttccaattcttagctattgtaaacagtgctgcaaaaaacataggagtgcaaacatctctttgatatactgatttccttccttttgggtatatacccagcagtgggattgctggatgatatggtagctctgtttttagttttttgaggaacctacaaacttgttatacatagtggttgtactaatttacattctcacccacagtgcacaagatgtcccgtttttccacatccttgtcagcatttgctattgcttgtcttttggatataagccattttaactgaggtgataactcattatagtttttatttgctcaaagtgatgttgagcacattttcatatgcctgatttccattcgtctgtcttattttgaaaaatgtcttttcaaatcttttgcccatttttgattggattattagatatttcctatagagttgtttgagctccttatatattctggttattaattccatgacagatgggtagtttgcaaatattttctcccattctgtgagttatctcttcactttgtcgattgtatcctttgctgtgcagaagctttttgacttgatgtgatcccgtttgttcatttttgcttttgttgtctgtgcttgtggggtattgctcaagaaatttttgcccagaccaatgccctggagattttactcagtattttcttgtagtattttcatagtttgaggtcttaaattttctttgcccactttttaatggggttgtttgttttttgcttgttaatttgtgtaagttccttttagattctggatattagtctttcatcaggttcacaggttttaaaacttttctctcattatgtacgttgtctgtttactctgttgatagtttcttgttgtgctgagactctttagtttaattaggtcccatttgtcaatttttgtttttattgcaattgctttcagagtcttcatcatgaaatctttgccaggacctatgtccagaatggtgtttcctaagttttcatctagggatttatagttttagggtttacatttcattctttaatctgcctgagttgatttttgcacatgataaaaggcgagggtcaagttttagtcttctgcatatggctagcgagttatcttagcactatttatggaatagggagtccttttcctactgcttgtttttgtcagctttctcaaagttcagatggttgtaggtgtgtggatttataactgggttatctaacttgttccattggtctatgtgtccatttttgtaccagtacaatgctgctttgattactgtagccttgtagtatagtttgaagtcaggtagtgcgattcctccagccttgttctttttgcttagaattattttggctatttagcctctttttttggttccatataaattttagaatagttttttctaattctgtgaaaaatatcattggaagtttgatggaaatagcattgaatctataaataccattggacattatagttattttaacaatattgatttttcctatccgtgagtgtagaatgtttttccatttgtttgtatcatttctgatttctttcaacagtgttttgtaatacttgctgttgaggtctttcacctccctggttagctgtgtttttgggtactttatttttgtgtgtgtgcctattgtcagtgggattgcattcttgatttggctgtcaggttggacattgttggtatatagaaatgctactgatttttttatatcgattctgtatcccaaaactttgctgaagtggttgatcagttttaggagactttgggcagatactgtacggtttctaagtataaaatcatataatctaggaagagatagtttgacttcctctccctgtttggatgccttttacttctttctcttgcctgattgccctggctagcacttccagtgctgtggtgaataggagtggtgagagtaggcatccttgtcttgttctggttctcaagccaaatgcttccccattttgcctagtcagtatgactttggctgtgggtttgtcataagtggctcttattattttggggtattttcctttaatgtctagtttgttgagggtttttaacatgaaaatatgtttaattttaccaaaagccttttctgtatctattgagatggtcatgtagtttttatttttagttctgcttatgtaatgaatcacatttattgatttgcatgtgtttaaccagtcttgcatcccaggaatgaaggcttgattgtgatggattagctttttgatgtgctgctggttttggtttgctagtattttgttgaggattattgcatctctgttcatcaggaatgttggcctgcagttttcattatttgtactgtttctgccaggttttggtatcagaatgatgctagcctcatagaatgagttagggaggagttcctccccctcatttttttggaatagtattggtaccagcttttctttatatgtctggtagaatttgggtatgaatctgtcttgtccagtgctggttctggttggtgggctttttattacttattcaattttgaaacttgttattggtctgttcagtgtttcaatttattcctggtttaattttgggaggttgcatgtttctaggaatttatcaatttcttctaaattttctagtttgtatgcatgaaagtgtttgtaatagcctatgagggttttttatattactgtggggtcaatggtaatgtctcctttgttatttctgatgtgtttatttggagcttcccctcacttttttttgttaggatagctagagatctgttagttttatttattctttcaaaggaaaaacttttggtttgttgatctttcatgctttttcacgtttcaattttgttcagttcagctctgattttggttatttcttttcttctgctagatttgcagttggtttgttcttgtttttctagttcctctaggtgtgatattacattgttaatttgagatctttctaccttctgatgtgggcatctagcactatggtcttttcttttaacactgccttaggcgtgagattcgggtatattgtctctttttttttgttactttcaaagaatttcttgatttttgccttaatttcattgtttacccagaagttattcaggagcaggttgtttaatttccatgtaattgtatgatttttagaaagcatcttagtattaatttctatttttattgtgctgtggtctggaagtgtggttgatatgttttcagtttttttgaatttgttgagaattgtttcatggccaagtgtgtggtcagttttagagtatgtgttatgtgcagatgaggagaattgtatattctattgttgttgggtagagtgttctgcagatgccttttaggtccattggatcaagtgttgaatttaggtcctaaatatctgtgttagttttccacctcaattatctgtctaataccatcagtggggtgttgaagtctcccattattatagggtggttatctaagtctctttgcactgctgtaagaacttgttctatgaatttgagtgctttagtgttgggtatgtgtatatttaggatagttatgtcttcttgttgatttgaagcttttataattatgtaatgcccttctttttctttttcattatttttgatttaaagtctgtttttttttttgaaattagaatagccacctctgtgtttgtttgtttgtttgttttccatttgcttgttagatttttctccatccctttactttgagcctgtggatgtcattgcatgtgaaatgggtctcttgaagacagcatactgtgggtggggtgacgatgggaaggtttgtgcatatgcatgccattgatagcatggtggtgaggtttgcacatgcatgcaccaacaaagtggtggggtgacgttgtggtggagtgtacattggcaaagctgtgtggagaggctgctgctgggtgcctgttggtgagggcttgtctgctgaaactctccattggttaagcagggtctactggtgaaggagctctggcagcagttgctgggaaatggcccatctgggcattcaaggctgtgctgcaagtgggcatgggcttgcagggaccacacgggaggctagaagacagggttcactcagatcagactgcccttgttccatgggcaagacagacttgctctgtccaggtgtgacagtcagcaaagaccaaagccaccaagaagagtatggagagccttggggaacgggtgtccccagccattctctgactttcccaagccaaactctctgggctctgctcaggctagtgttctgtccctgccacctctccaagcagcaatctctgtcagctgaatatccatgggttgtgcagtcttctgaagctaggattctggaggtccatggcaagaatggtccactccacacctgtttaactcacctcttccccaggagctgctgggggccaagaatgagtactggtgcttggcagtcccatgcaagatttccagcttgctctcccttcaccccagggtctgcatcctccctccatccattctcaatgccatccttcgaaaggtcccctcacagtgtgccagtcttcttgatgctctagtatgttggtgagagatgcttttcttggctgcatctagtctaccattttggctcttcctataccacattttatggctcgttttttcttctgtcttctagaataaaagtaaataatttttctctgcagttgaatatataatataatgatgtgcgatattaagtttgaattttttatagacttgtattacaatgtatttttagccagagttcttttgagagttcttccctccccaacccccaaggcaacatctaaatttgatcatacagtttgtcattttagggatttcttcccttcactttttgaattgaatctattgtctcagctttttctgttttctgaggtgactgaaaaaatatagaagctcaacagacatgtatttgaaaagcttccatgctgattctgatctgtagctttgtagcacattacaatggaccataatccttttttttttttttttgagagagtgagtctcattctgtcacccaggttgaagtgcagtggcgtgatcttggctcattgcaacctccgcctcccaggttcaagtgattctcctgcctcagcctccagagtagctgggattacaagcgcccgccaccacacccagctaatttttgtatttttagtagagacggggtttctccacattggccaggctggtcttgaactcctgacctcaggtgatctgccggccttggcctcccaaagggctgggattacaggtgtgagccaccctgcccggccgaccgtaatcttttgaggagcatttggttattcaaaggagggatttcaaggtgtttatggtgaattcaggctgtgaaaaaaataaaataaatgttgtaataatacatatgactgtctatatgatagaaaggactttaaagcattatatacattttgcaaatgagaaaatagctactctgtggttagactgaattcttaatacttaactgttctcaccaaaataacatctgccttgctgcaatgtcttttttattccccagctgggaggtgcatttcacagattttgccttccagtcaggtgatctttttctaaaggaatcaaatgaagcaattctactgagtagccagagacactcagatgacccagcaaggctatagtaatttctcttggaaaaagtcattcattttctgtctcttctctctgaatcaggttgtacttgattcatccaacacttttagaagttgacatttgatttcactcgggtatgttctgtgttcacacttttgtcctctagagagtaatgtcatctgtagaagttcagagacacagtcctttaggaaactcgcaatctggaacggaagctgcaagtaaaagctaaaattgctaattctgcacataagaagaggccgatttcccctaatgatagcacacagaggtaatacagagaactggaccctgatcaggaatttgcttccttttttaactggtacctcggtgaccgtgttaggtatgattatggactgtattataacttagagcattacatgggtaatatgtaacacgggtcctttgaaagttagtttcccatgataggaagttatgtactcattctcgtgtgaaaaaagagtgtttcctagtgctcagaattcagaaactaggatgtcaaatgacctagttggccattgtagagtgtgatagtacacagcagagagtctcctgtgccagcaaaggtgagcaggagaaatcagatccagcctcctggatttgcaactccacaaaatgagactgactggcagcttttaaatagcaacatgtttgtacctgagagtcaccaagtggcttgttattgaaatcacactctgggaagactccctgtaggctgttgggagtggggatgcaggtggggagaaaagaaaagtgcctgacatgggcctatccccgccgttcaggtgaagctggcttcttcaaagtgtttgtaaaaaaagtcacaaaatggatgtttgctctggtgaaaaaactatgaaagtagatttggatttggtaattttgcaaagctgaaaaatctctgttgttgggttcctgagtcattctactcagcttgctcccttaaagggctcttttaaattttgaaccagcaattttatggaggttggtaacagtggtgatgatcagataatattgaaagagagagagaaagaaaggactgtaaaaattcaaaaattcaatcaggacaagtttgtcagcagaaaagacttaaacaaatgtaattattaaaaaatataccctacgcctggagggtaaaccagctttatgatatcaaatggaatataaaggatttgaattttcagcttttgagcaaatgttataaaacaaatgtgccaatatccttctgtaagcacaggcacctcagtattttccataatcaaatagccatgccccagaaataaattcataattgatgccacaggatttcaaattatctaagcattctctcattttcttaaaggctcttcagaaaaaatatgcctaatttagaaaactgctactttagtctggatttcagacagtgggactattcaatcctcaggtgtgcttcagcttgtcaaaaacagctgactaattttgatgaaagaagaccagagatagatttaatatcttaccaaaataagtcaaactaatacaagtgaccaggactataataaagacaaaacatagccatccatatagtaacaaaagtcattgttttaaatgaggatcaagagcaaaggtattcctctattgagttataaagacttttgttctcagaactaaaaatttgagatcatgtctttgaaatacaggacaataaaatcaagatttaaacaaatggaagagaacttgggaaaagcatttattataaagaaaaacatctgtgtcccttggattgctagcatataaaataaactgaacatcttatcctatgtctagctccctcctcaagcagtgtcttccaccctacaccctctgttatcctcctcatgtgttccagctccacatgactctcctttttccatactaacctacaaccaattgctgtaacatttggttggtatttactgtatgttgctttgtagggtcatgttgtgctgaacagatgacatatccccatgcactgacagttaccttcttaaagagacatctattaccccatatatccaactgctctttctacgccagcacttcagtgactttttctgattaaatgcataatgatattacagagttcttaatttaaagcaatgtgtgctgcttccctttctggtggtagaaattgatacccatgggaagtaagtactgagagaagagtagcagaaaagagggaaaagaggaatttgatttattttttaaaattctacaaatcaccggggtaattttggatggttctttttttaaaagaattttatttttaacttcagtgggtatatagtaggtatatgtattatggggtttctgggatattttggtacaggcatacaatgtataataatcacatcagggtaagtggggtatctatctcctcaagcatttatcctttatattataagcaatccaatcatacttttagatattttaaaatgtacaattaaattactactgactatagtcaccctgttgtgccatcaaatactaggtcatattaactatttgtaactttttttttttttttttgagatggagtctcgctctgtcaccaagctggagtgcagtggcccaatcttggcttactgcaacctctgtctcccaggttcaagcaattctactgcctcagcctcctgagtagctgggattacaggtgcatgccaccacacccagctaattttgtatttttagtagaaagggggttttgccatgttggccaggctggtctcgaactcctgacctcaggtgatccacccaccgtagccttccgaagtgctgggattacagatgtgagccaccaccctcggctgtaactatttttttgtaaccattaaccatcttcacttttcctcccatccacccactacccattccagcctctggtaacatcattctactctctatctccatgagttcagttgttttaactttcagctcccacaaataagtgagaacatcttgtctttctatgactggcttatttcacgtaacataatgagttcctcttctatccatgttgttgcaaatgtctggatctcattcttttggtttttttttttttggctgaatagtactacattgtgtgtatatgccacattttctttatctatattcagctgttgatggacacttaggttgcttccaaaacttggctattgtgaacagtgctgcaacaaacatgggagtgcagatatctcttcgatatactgatttcttttcttttgggtatatacccagcagtgggggtgctagatcatatggtagttctatttttagttttttgaggagcctccaaactgttctccatagtgctgtactaatttacattccgaccaacagtatacaagggttcccttctctccacaccctcaccagtgtttgttattgcctgtgttttggataaaagccattttaaatggggtgataggatattgcattgtagctttgcattgtagcattgcatttctctggttgatcagcttttaatacacctatttgccatttgtgtgtcttcttttgagaaatgtctactcagatcttttgcccatttttttaaatcaaattattagactttttcctatggggttatttgagctccttatatattctggttattaatcccttgttagatgtgtaatttgcaaatattttctccaattctgtgggttttctcttcactttgtttattgtttcctttgctgtgaagaagctttttaacgtgatctatttgtccagttttgctttggttgcctgtgcttatggagtattactgaagaaatctgcccagtccaaggttctggagaatttccacaatgttttctttcagtacattcataagttaaggacatagatttaagtctttaatccattttgttttaatttttagatatggtgaaagataggggtctagtttcattcttttggatatggatatccagttttcccagcacaatttattgaagagactgtcttttcctcattgtatgttcttggcatctttgtaacaaatgagctcactgtagatgtatggatgtgttactgaattctctattctgttccattggtttctgtgtttgcttttatcccagtaccatgctgttttagttatagtagctctgttgtataatttgaagtcagttaatatgatttctacagttttcttccttttgcttaggacagctgtggcttttctgggtcttttgtggttccatatgaattttaggatttttttttctatttctttgaagaatgttattggtattttgttaggcattgtgttgaatccatagatggctttcagtagtatggacattttaacaatattgattcttccaatctatgaacatggaatatctttccacttttctctgtcctctgtagtttctttcactgatgtattatagtcttcatcatagtgatcttattattctctacttaattcttaggtattttattttatttgtagttatcataaataggattactttcttaatttctttttcagattgtttgccgttggcatataaaaatgctactgatttttacatgttgattttgtatcttagaactttactgaatgtgtttttcagttctaatagttttttggtggagtctaggttttgttttttttttccttagaggaaaggctttcagtttttccccatttggtatagtactagctgtgggtctataatatatggtttttattatgttgacatgtattccttctatgcccaattttttgagggttgttgtcatgaagggatgttgaattttatccaatgcattttcagcatcaattgaaatgatcatgtaattttttttccttcattgtgttggtatgatttatcacactgattgatttgcaaatgttgaaccatcctcagatccctgggataaatcccacttggtcatgatgaatggacttttaaatgtgttgttgaattattcttgctagtattttgttgaaggtttttacatcagtgttcatcagagatactgtcctgtagtttgctcgcttgcttccttccttcctttttcttttttcgatgcatctttgtttggttttggtatcagagtaataatattgtgctcatagaatgagtttggaaggattccttctgcctctatttttaagaatagtttaaataggattggtattagttctttaaatgtttaataaaattcaactgtgaagccattgtgtcccagctgttttttgctgggagactttttagttactgcttctaattacttcttgttggtctatcaagttttggatttctttatggtttaatgtatttgcaggtcgtatgtgtctagacatttatctatttcttctaggttttccaatctattggtatgtagttgttctcagtagcctctaatgattctttgaatttctgctgtattggttatactttatcctttttcatctctgattttatttatttgggtgttctctcttttttatatttgtcaattttgtttatcatcataaatagccaactttttatttcattgatttgttgaattgttttgtttcaattttatttatttctgctgtgatgtttattattcttttcatccactaaattttggttttgttttctcttgcttttctagttcttcagtatgcatcattaggttgtttatgggaagcttgccttcttttttgatgtaggcacttataaaccttctttgtctctttatatagtttttgtcttgaagtctattttgtgtaagtatagctatttctattttattttattttattttattttactttattttatttttagacagagacttgctttgtcacccaggctggagcgcagtggagcaatttcagctcactgcaacctctgtctcctgggttcaagcaattttcccaccttggcctcccaagcagctggtactaaagccacacacccccatgcttgactatttttttttgtatttttagtagagatgggattttgcatgttgactgggctggtcgtgaactcctgaccataagtgatctgcccacctcagcctcccaaagtgctaggattataggcatgagccagcattcctggctctattttttttattttccatttgtatgaaataccattttctatcccttatttttagtctgtgtgtgctttataggtgaaatatgtttcttataggcaacagatcattggatcttgtttttttttttaatcatcccttcagccactctacgtcttctgactgatgagtttattccatgtacatttaatgttgtattgataagtaaggacttacttctgccattttgttatgtgttttctggtttgtcttccttctttacttccttcctgtctttcttttagtataggtgatttttttctgatgttatgttttaatttcttgctttttatttgttttgtatctgctgaatgtttttagatttgaggttaccatgaagcttgcgaataatatattataaccaattattttaagctgatgacaaattaatactgattgcaaacaaacagataagccaaagagaactaataaaaactctatattttaactgcatctctgtgctttttaactttttgttgtttctattttatatattattgtactgtctatgtcttgaaaagttgttgtagctttttagaatgtttcatgctttcatctttctatttaagatatgagtagtttacacagcacaattgcaatgttattatattctatatttttctgtgtacttactattactagtaagttttgtaccttcagatgatttcttattgctcattaatgtcctattctttcagattgaagaactacctttagcatttcttgtaggacagatatggtatttatgaaaaccctcagcttcccttgtctaggaaagtctttatctttcctgtatgtttgaaggatatctttgccagataactattctagggtaaaagggtttttttctttagtactttgaatatattatgccactctctcctggcctgtaagatttacactgaaaagtctgctgccatatgtattggagctccactgtatgttatttgtttcttttctcctcctgcttttaggaacctttctttacccttggcctgtgggagtttgattattaaatgcattgaggtagttttctttgggttaaatctgctttgtgttctataaccttcttgtacttgaatattggtatctttgtctatgtttggaagttctctgttattatccctttaaattttctattcctctgtctctctaccttctctttaagaccagtaactcttagatttgccgttttgaggctattttccagaactttagtcatgttttcttcttttttcttcttttttctcttctgtctattttcaaatagcctgtctttaagctcactagttgtttctcatgcttgatcaattctgctattaagagactgtgatgcattcatcagtatgtcatttgcatttttcaacaccagaatttctgtttgattctttttaattttttaaatttctctgttaaatttatctgatagaattctgaattctttctatgtgttatcttgaatttctttgagtttcctcaaagcagctattttgaattctgcttctgaaaggtgacatatctctgtctctctgggattggtgcctggtttcttgttcagtttgtttggtgaagtcattgtattagtctgttttcacactgctataaagatactatctgagactgggtaatttataaacaaaagaggtttatttgactcatagttctgcatgactgggaaggcctcaggaaacttacaatcatggtggaaggcaaagggaaaacaagcaccttcttcacaaggtggcaggagagagagggagggggaactgccagacacttttaaaccatcagatcttgtgggaagtcactcaccatcatgagaacagcatgggggaaactgcccccataatccaatcacctcccaccaggtccctccattgacacttggggtttacaatttgagataagatttgggtggggacacagagccaaaccatattagtcttgttttcttggatggtcttaatgcttatggaagtactaccagggtacctccaatgttttcttaaggcccaaggtttcttcattcagcttgtggtgaatgctgctaggcccagaactcatccttcaggacaggacagtaggattccctctgggtcaggataggttcagaaatgtcatccaataaccaaagcctgcaatctgggaccccaagagcccacttgatgctcttccccactgcgttcaagctggtacataagctgcaaaataaagtctcactcattcttttctctcctcttctcaagcagaaggggtctttccttggcaggatctgcatgttttgttgtctctgtgttgtacagtggaagagaaacaacacattttggggacagctaggacccatgcagatgaggtattggctcacaacccaaaccataatatacactatcaggcaagaggtattgcagttccagatcaagacccaaagtggaactatcaaaggggcaatcaggacttggggaggagagattatgtggtcacttgttggttggaagggatgaaggaatgtatgcaaaagcctgttaactatgagaaggttaagaaagtttctcagggcaaagatgtgaatccagctttgtttcaagggcgtttagttgaggccatcaggaaatatactaacactgatcctacctcaagagaaggacagacccttttgggagtacattttataacccagtcttcccctgatatccataggaagctataaaaagcagctatgggtccccatacttctatggaacagctcttgtatatggcattttagtttttaataacagggacaaagcagaggaggcagaaagaacaagaaggacttcccacaaggtgcagctcttggctctatccttaagctcatcccccacatggggctgccctcctggctcttggcctgaacaagggaagctgaaaggtgggaaagccaaatctgggtgtctgagtcaccatgccttgggcatgaattataagaaattcatgccttgggcacactgttagaaaactggccatggaagagggattgcccagtgcttagaagggagctactggcatctgaaccaatgatggccgaaatagccaggcaagtccaagagtgatggggcctgagatcttccaccacagctcccattggacaactaggcatatctctagaggagccttgggtaaccaatgacatggcaggtaagaatattaacctccttctggagtgcttattctgttttgacccattataatgggcctctcttaccccaaaactgtatggtcaggggaatagatggaaaagcccatagatgtcattttacctatcctttaagctgctcttcaaggactttggttttctcttgaatggcccaccccttgttaggaagggatttgttagctgcagacagtagtatcttttggaaatctcaacagacagaaattgctccttctctttttctgtgaataaatatcaggctttgttgctagatgctccttatataacacttaaagtatgccaaactttgaatccagctacctatttgcctaaacccacaggcaccctagatcattcttatatacaagttatggagcaagtttactccagccgtctggatttaaaggatgagcctctagataatcctgaggtagaatggtttacagatagaagtagctttgtgcaccagggaaacaggaaagctgggtatgctgttgtcagttaacatgaggtaattgaatctcaggccttaccagcttctacctcagctcaaaaggcagaattaatagctcttattagagccctgcaattaagaaaagatttaagagttaacatttacactgattctaagtatgcctttctggtacttcatgctcttgctgctatctagaaggaacagggactctgagctgctaagggttctcctgtaaaacatcacttagaaattctaaatctattagatgctgttttgctgcccaaggaagtagctgtaatccattgcagaggacgtcaaaaaggagactctaatgtggctaagggagactcctttgcagatacagctgctaaggcagcagcattaaaggagccagttggacttgtcggcaggtttgtaccctcagccacggcaatgacagaccctagatatactgaagaggaacaagaatgggctaaaggtcagggcttaattcaagagctttctggctggcttgtcaatgacagcaaactgttaatatcaggtgctaatcagtggaaaacagttaagtagttgcatgactctactcatttgggaagagcttccctgtttcacttaatgtctttttataggaaaaaagctttttatacgtaaaggcttacttaaaacagtaaagccggtaactagggcctgtgaactatgtgcctggaataacccaaataaccagtcttcacctcctcctctagtaaggcctgttcagcacaggggagcataccctggtgaagattggcaaacagactatacccagatgcccccatgtaaaatatttaaatatttattagtgttcattgacacctttaccagttggggttggatcaaggcttttcctacctggtctgaaaaggcaattgaggtttctaagctactaaaggaaataattcctaaatttgggctgcctaagcgcttacagaacaataatggcccatctttcacagcgacaattacccaaaacatatcttcagccttaggaattcaggaccgccttcccttggcatggaggtcacagtcttggggaaagtggaaagagccaatcaaactctaaagaggactcttgctaaacggtgccaagagacatcagaaacctggctgtctttattacctgtagccttattaagggttcgagtggcccctaagggaaatctgcagctcagcccttttgaaataatggatgaaagtcctttcttaactacagacctcctaatagacatagatactttcaagctacagagttatgtgatcaacttgggacaagtgcaaaacacacttcttgaatatggaaatcaaagactcccttcccctcctaaggaagagaatcttgttacaacacagctgggagactgggtcctattaaaaacttggaaggaaggatccccagcaggtcaactttcctcaaaatggaggtgaccctatcaagttctccttagtaccccaattgccattaaacttctgggaataaacaggtgggtctgcttatctggaattaaactcatttcttatgaagtcccacaggccaatggaacacaagagactgatcttgtttattcctgtgagccaatcagtgaccttcgactcctgttcagaagaaatgaaagggatgggtaacctaaagatatggattggcattctactttggaatataagttggaatcaggcagagagtaacttatttactgagtgggcacagactttagcctctctacataaccaaactgttgggtatgtggacattttaacagcagcttgagggagaacttgtgctttgatcaaagccgagtgctgtgtgtatgttccagactattcaaataatatcacccaagctatgaaagctttagacactcatatttctgccattgatacgctatcggcttggttgaccctatatcggcttggttccaacagctgcccagttcttggaaagcctttctgtttagtttacttgggaatgattttacttattttactttgcttttgtgggatatattgcagttgtactctttgtgcaggaatacaagacaagttcattcaacactttcttaaattggacacttattaatcttccagatattggaagattttttttgtcggaactcgcagttatgaacgaccttcgccataccaacgctctctgactgagctcctctctaccctaaatgcaagacaccatagttaggcaggaatatcatcacccctattcagcctgaagaagttacagaagacggatcttcatccctctgcaacccttaggattaaggtcctcttgtaaaggaagcagggagatatgtcaggggcattcgaaccagagcgactccatcttgaataagggctgggaaaatggggccatgacttgctgggctgcatcttcagaaaggtaggcattccgagcctctagatgttcacagttaagggaacaaattaataatgtttactaaacagaccccgacttgggagtgtccagatatcccgatatctgaagaagaaagacattcctaattttgctttgaagataataatatcgattcttgcaaaatatagtaattaggaaaattaatcctctatcacaaacccttgtagcagactatatctccccatatataccagcattgtacctagggtggatgcgtgcctccttttactttcaggaacgtcctactctgtctatggagtagctgtcctttcaccactttacttcttaataaacttgcttttgcttagcactgtggactcaccctgaattctttctggtgcaagatcaaagaaccctctcttggggtctggatcgggacccctttcctgtaaccagaatcaccctcttataagctaagtataacgtttagtggcaaggaatttcatatacagcaatgcagtgtgcttgaaattgcagaaataaacacttctacacttgcctaagataatactgagtcttcccaaaggaaatgcctttttttctcctattaacacaaaacagtatctaattccaattttctaaaaactccacacagtcagcataacctctgttatgagtagtatcttaactgtgttccctaacatttgttaaattatttggctaatgatacatcttaagtgaacaggtaggggttgtgatgttaagtcagggtcttggcacttttagttcatgaattgcgtttctctaatttaggttaacgaacagacttctgtactgttttgctgcatgtgctgagattagcattagttgatttaacttgacctaaagcttgcactttaactacaggttctaagctcatcctgaattatatctatcatttggctgagaaccctgctatctgctgagatactgtccttataaccatgcctttgtggctatagaaatagagttattatacaaatatgttccagttaatgggagacactcaggggaagcattgggaaaaatggcaaagagctttgccaatctgtgcttagtattaacccagtaattttgtaaattaagagctgagtttgcttttttttttttcttttgagacaaagtttcactcttgttgcccaggctggagtgcaatggcacaatctcagctcactgcaatctctacctaccgaattcaagcgattcttctgccttggcctcctgagtagctgggattacaggtgggcaccaccacgcccagctgattttttgtatttttagtagagatgggtcttcaccatgttggccaggctggtcttgaactcctgacctcaggtgatccacccgcctcgggttcccgaagtgctgggattacaggcatgagccgccgcgtccggcctgagtttgcttttttatttacagcctcaaactaaatttgaattgcacttttagaagtagaaggcaactacattttgatttcataaaattttgatcttaacatgatagcgtgtttgaagtttaatttttctaaaaacactatttgcttcaatttatctgtttgtgaaagaacataataaagagaggccactgataggggaagaaagagaaatattgcttgaacaagctcattccactagtcagacttgtcaaggaaaaggtgaactgatacctttttaaaataatattccgttcaagaaaagttgctcattttattcatgtttgacatttcatagtaaaggtaaaattcatttttaatgaaaaatactccacagggttattaattaaaagaaacacaggaagagagaactgtcattttaaaagagcagctcatgaattagagaaagtcaccagccgaaaacagagctcagtgatattctttccaggatagatggctggcctgctaatggaaacagccctaaagtgccccctgattggcacctgtgccatctgggcacgaggtatttttgcctcaaagcttcagcaaacttagagaagtagtttcttgagcttgttaattaaatgttttattataattcttttttgtgcattgttctttttatttttggtgtgcaacttgagggcaaagcatgtgaataatgtaatcatagcatctagagtagtattttgtactgtaatgttttgaatatatttggcaggttggtgaatcaacatttgcatgccttgtatttgcaagaggaccaaatacagatattacatggatttatattcctctaacataaataatatttctaggaaaaggtgaaagaggctagaattgtttaatttgttgaagagaagtgaatgccatgaaagtgtgtggcagagccaggtcgtgagaaaattgtaaaatttccatttgatgaattcacacttcttttctcccacttcctagaaacttctagtcttgcctctgtcgccacttcccccattttgttctccacacagctttgtggtgctcagaaacccgctcttctgttgactctgcctgacatcctttaggaagctgtagggcttgaagggtccaagatacagaatccttatgtccatgtcacaggaaccaatcgaaatatcaaaatgtgactgttattactgagaaagctgattagtggagatggtttcagggctgtatcaagtggtcctcctgatattttagccctgaattaggcaaacttaccatgcaggcacaggtatggctgaataactcctcattagacagttgcaatggaatgcatcatccctccaggcaggatggcttcaaaaggggagaggaagtggctaggctgtttattcttccaacctcaccaaccagagaggtcactcctttcccaaccccttacagacatgatgtttggagtctctctggccctggcttctgaccaaagtccttattccagggattgtttaaagaaaattgaataaaatatatgtgattggctctgtgaaagtttctgtctatattatacttgttgacagagttgataaatttagtgtttttgaacatttcataccatgttattctgacaaattccagtttttgttgaaagttagactccacttaatactgatttagtttaaggttttcttttctaggatgataacctctcattgttagaggacagtgtgctagtgtatggaattgacatggctgccactatgtttaggataacacaggcctgaccataggggtctaatgactttcagagattttctgcttcatgagcttctgatctacacaagcaaactgagtaaccagccatgaatttatttgctgcacaagataacttttgtgcgttaaaagcctggagagttgaccttcactcttgctggcaatttgtgcagtgtcaggatcctgcaggaaatgaggtggtcaagagcatcctctgctagactccaggtcaaagcaaaatgtagagggcaccgtctgaattgcagtctggatgtaccctttataatctccctggttatttctcccaacttccttctttctcccttcactcctcctcatgccagacagtccttcagattggaaggtattctgaaaactatgatatttaacttgattttttcccaaggattctgatttttcaaacccttagaaagaggcatgtggtgtgtaaaaaaattcctgctgttttagctatttcaagtcagaagaggttttcccagaaccctctgaatgatcggtttggtgaatgaacaatcatggtttctgaccgtagtgtgaaatgtggtgtcaggtgctgagacactccattttcatttagtttatctacttacgaatctataatatgcaaacttatgtggttatacttctcttcgtaattcatgctcaagatatgaacagttctttttgtctttatttagtatcccaaatcataataggtgctcaatgtttttacatttgatttgttgtcagaaagtccattgagcagtattttgagactatgatggtatggaaataactgatatgatggaagtaactcttaatttgagtgcccaccttaatctcttgtgcttcaatttggtcgtttttaaatgagaataattataatatctgacacttctgaagctcttacagtttagaaatctgtttaaaatgcagtatcttacatgtccttcagagaatataacattgtctccattttataaatgaaaaatccaagaacctgaggagttagataatgtgctataatccctcaatattaagtgacaaagtagtagtcctggaactaaagtctttgaaaagtttattaatttttctcttatatataatacatcccgtagagctcaaggaattattgggtgaagtaggtgaggtgatagcaaaggtatttttaaaatatcagtagtcatacaaatctgaagttaataagcaggattgtctttactaataaagcctttcaatactcttacttttctctttagttccctgaagttgtaagagttcaaagctgatagatgataaagcaattaaaatagaggtaaatctttgaatggtagtttcaaaaacttggctgtttatttcttgttcctttatttaaggaaccagctttctcttccttgctaagagagctttctttttcatttccttgctaagagagctttcttgtcattcagcaaatttctgggacttccacagtccctagagaatgaaactgcccagattgggggtggagtcgggtagaacagatccagagatatgacactttgtggatataggcaacacagtgaatatggtggtaaaggaccttgctggcctcagctgtgaggcccagcagggggtttgtatataaaagagagtttatgttttgatgcagatttctgacctttacctacacaaatgaggcaggaaatgctttcccgtattagattttttaaagatcttaatttcttttcagttctgttgttagacttctttaataaaaacaagttaacataattaaattttaataggtaaaaatcctaaataaggcaagaataaaaataattcagttaaactttcataacaaccaaaagcaaaacaaaaccaaaagatttcatagatttattctacgtcgatacccccaggtgattcttgtgcacagctttggaatcactgacctagaacagtggttttcaaccctggctgcacattagaattacccagggaacttagaaaaagagatatctatataccctgtcccaaactaatttaaattagaatctctaggggtgaggcccattatacttttattcacagctccccaggtgagtctaaactagagtcttagcggaaaaccatcgctttatacatgtatctttaatatcacacacatttatttgcacttctaaatattacacaatctccaggggtaaaatgccaggcaaaatgacgggaaaactcacttgtagttgagccattttctctgtctcttctccatggggaatagagagggaccaaaactggtcatcatcttctgtactattttaagggaaggcagttgcttttggggcagtggctttccaactgctgtgtacatgaatcatgcagagtgaatcctaagccccggtaccaggtcactacgattcagtatctctgaagtgaggcccagaaacctgcaacttgaataagctttccaagggattctgatgtaggtagtccatgatcctaacttttctctatagtttgatctaagggccttctgccaaattaatggcgccatggcatctcctccatgttgcctgcagtccttcatgtcataatcactttgcctggaattttatcactggagattgtataatctttagaagtgtaaataaatgtatatgatgttaaagacgtgtttaaagcgatggttttccactaaggctgtagtttagactcacctggggaactttgaataaaatacaatgggcctcagccctagagattctaatttaaattagtttgggacagggtatatagatatctctttttctaagttctctgggtaattctaatgtgcgccaggattgaaaacctctgttctaggtcagtgattccaaagctgtacacaagaatcacctgggggtatcgacatagaatcaatctatgaaatcttttggttttgttttgcttttggttgttatgaaagtttaactgaattatttttattcatgccttatttaggatttttacctattaaaatttaattatgttaatttgtttttattaaagaagtctaataataaaacctaagagaaactaagatctgtaaaaaatctaaaataagtggaaccatatgctgcatagagcactctattcttttttgctacttaggacgttagttatccgaagcttctaaaatatgttgtactctcctcatgccaccagtttccagatgatatttcatttcctccttccaggcctttgaggaagatattactgttcaattttatagccaaaaacctgagattcacagaggctaagtggatcatcaagattgtaaccctgataagcagcagaaacagaatttaaaccacagggttttactttgataccagtaatcttttcttatattacattgtctttagatacagaaaactcatgggcaattttggcagaactaacaatttataatgcttttcatttaaaacactaatgctattctttctttgcagagatttattttaaaacacaaatgtagaggctaccgtaaaataaaagcaggaaacaaaaccattactgtgtattttcaggaaagaatgattacataggtaggaaatttatagaaaataatatcaacttttactagccaaaatttcttcctcactctttctctctctgtggcaataaactttaaaaagttcatcctaagtaagctgcaaatatcactcataagggttgattctcctttccatgctttatgttatcattgggttgggggaggggaccaaacgtcagccactgcaagatcccagtaaagatgcaacaccttttacaatctaaaatctggataatttattgattttgattcacagttggtttggtatattcggtttattaaaagtgtgctactaggtgtgcaggtaggttgcaaccacaggcagtctgtatcacagagttagaagttactctacctgcaatatcacgagatttcccttaacatgacttcttccagtctaaaccagcctattgattaagtagacccttgtattgccaattatccccttatctgaaaatatagtatcgtctttttaatctccttcattagaaacatcaaacaccttgcaaagttcttaaggaatacgtgcaagccgcttaatttatcagtatgcttgtttgtttttctgggaaaactccattatgagtcttctttacatagcagtcattatagtttgaaattgtaatgctgcccttagaaatgtgagagggatatcttttacattaataagcatttttgcttttgtttcatactcagaataaatcaaggcacatgtttgtgacttctacttaaaaataagacatttctgaaaattagcaaagtaagtttagttaactaaataatggaagctggaaatgaaactgttagaagcttccaatgagttctttattttaaattgctgctcgaagctaatcagtttgtattgctctaaagagacagggagaagactttgcatgttagtggttattaattctgttcttactaagtactatccaaaagtgatttcttgacactgaataatcagctgtgcaatgcagagttcactaacctgcatttctacctccatgttaaatatcttttatgtgtagctcatcaaaatatatgaatggaaagataagcttaataaaaataaaggaaaaaatcagaatgaggttgaaatatagggatgttatccttttgggcttatgtctcttaaatatcatgtttttctctgaactagcttcatggctcaggaagtttttcggagtgccgtgaaaagaaagggcaagcttaggtgtaatgttagaaaatcagcaggagagcaaaatggggcaggggctggacagcaggaggagggcaatagtggctaaattatagctagaatgaggccacctctgtctgacaacctaggccagagaagtgattgtcacttgtttagctcctgagattagacaagtgtgcgtgtgcacacacactcaacaaagatggacaccgaaaagatgacatataatgacaagaagagtatctttctataatcaaatataccctcacaaatacccacatacacatcatccgtatattgtgttcacatgattgtttaacaaacattcattgatatcttattccttcctataatgagtctatcacagagggactcctacttgacctttgtttttcttctgttggtttaaccagacctgacctgtttaaatgtgtgaattctgggaaggaaaagcagcttaactatttatatggtctatgtttgtctgtcgagaggaaagattcttaacagtgctgcttcagatgttaaaacatttccctaccctccaaaatcatcatcttactttgctgaaaggtttacatttcattgtgttttatgttgattgcctagctataaaataccattaaaaggcgactgtaaatcaaagataatgttctactggcatccttgagatatgcagcaaactttcccttcagttcttcaagcaccctgcaggtttatatgacaaagagtaacactccaaatccctgccatagctctgggaacataaatttttgcccgcatgtaatgtttgtgtagggctttcttgtacaagtgttttggtctgtacaacagtaccatgattgaagctgggaggcctttgagatttatagtttcgatgggtcactgaactccatatcaaaagtatttgttgatgttctgtagacaacttagatattctccagtatgttgaccaataatctcttgtttttcaaatgactcaaatgttactgtagcattgccctcaaaatttcttctctaaaaatgcctacatactctaacacacaaaaaaagaaaaaaaaatttctcgcataaatagcgtagtcattttgactgtaggttgttagcctacagagccttagccaactgtaggcttcaaataaatctactgaactttttaaataagatctaaatattttcacatattggacaatgggtccttttaagagaggctttgaaagttttatcagattccaaaaaagtgtgtgactctagaagtgatttaacactgattttgatttaattcataagaagtgccaaataccactgtctttgaatatggcatggcagcatgatttgtattggagtgaatgttaactgttgacatttttaatgttcacatatttgggatgatccttaaatattcatattgtaccttaaaatctaattataggtaaagttaccacaaatctaagttcttcttgaaccctttacttctcctgtccaatttattccctctgtctggaatgcccttacatcctctccctttctctgcctgttgaagtcctttaagacccagctaaagtaacaccatctctaaagacttccagatttcctcattcagaattcatcttttgcttctccataatgctctttctatgtgcattccttttattaagggcccttttaaagtctaatttgtattgaggcatatgactgtatatttctaactggattgcgaactgctataaacaagagacatgttttattaatcactgcaccctccattaggcacagtgcctgatggtacttaaggaaatgcttcttgtttaactgtttgatgaatatcgagttgatatcagatgccctaagtatgattgtaggatctgatagcgatataaacacaaactacatattatccatggaatccttacttggcagtttattagcatatgtaaatcataatggtcaaggtaaattaaagaaatcattgtatgacattttaaaatgttttgttattatttatatgagatgatacactttcagccagtaatattgagtctcattcactcataatgagctctttgaggcacccagaaagcttaactgcactgagttctttcgaattcggttgtcctcccttatctgcagtttccctttctgtggtttcagctacccacagtcaactgcaatctgaaaatgttaaatgtaaaattctagaaaaaaaacattttgtatgttttaaattgtgggttgttctgagaagtgatgaaatctgaagcagtccagctccatcccactgaggataggaatcatctcttcatctggcatatacctactgtgtacactgtctgcacattagccatttagtagccgtctcagtcatcagattgactgtcatggtatcacagtgcttgtgttcaaatgatctttattttatttaataatggccccaaagtgcaagagtggtgatgccggagtgttattataattgttttatgttatgattaattgtttttaatctcttactgtgtccaatttatgaattaaactttatcataggtaggcgggtataggaaaaatgtatatggttcagactgtctgcagttttgggcatccactgggggccttggaattgtccccagtggataaggagagactactctattttgttatatataaaagtatttttagtaagtcttagcaagtaatagctgttaataatgaatgttgcatttcatagcttctgtttttagacattttaaagtggtactcgactgggatttcttttactttttcttttttagagcctattttcaggaagcctgacttctcaataattaagaatatcatgttttattacttacctcttaatatacagaatcactttcattctataaaactctgagtagatttatttttaaaatagctcatatttatataacactgtagagattcagatgcacttttatatgcatcatccaaggtgatcctcaggagaatgctgtgaggtaggctggatttcttctcattttaacagacgaataaacagactgagactctacttacctaaggccacttatgccaggtaagtgaggcaatgggtatagaacccaggaattatgactccagtggtagtcagtattcattctgctactattttgtgctccctctaaggtgcaagatataacctattcatgcaatagatatgccttgtgcactttcatgtgccaaatgctatatgttctaggtatttagggtgcatcagtaaacaaagccaacaaaaaatgaagtccttgttgagattaaatttgtgtttgggagaaaaacaaataagtaaaatgtataatctatttgaagataatgagagcaatggaggaaaatgaatcaggaaagaaggttcaagcatttgtggagggttgcaattgtatgtaggataattagacctcattaaaaaactgttgcttgaacaaagacttaaagaagataaggagcaaggcttatggatatccaagggatatgagcagaggaaataatgactataaaggacctgagagaaaaaagttttcttggcatgtttgaaggacagaatggaagccagttagcctgtactgtggtgagaaaggagtaaacagtgggatataaggtcaaaaggtgtagtcttggaattcactgtaagcgtaagagttaaagaaagagaaaagaaacatgaactgtggctcggcagtaaagacaggtttactttagataaaacctgagacggacttctggccaattttggtcaggagtgctttctcttacagactaagagtatatattggttttagggtgagggggcttaacagaagcttggaatgtttctgtgtgaggaagaagttttacggtggggttggaatgtctctgggaggaggcaagtttatctttgggcagacatctttccggcctgcggggcattatctcaaggctggcatcttcctggctggagggaggttatcttggggccggcatgtcttttgtctgggtggagtttggaatgtttctgtctggagatgttatttgtggtttatggtcatgctgaccttagccatcaggctgatgccctttggatttagacagctttttttttttattaaggtgaactttagaatgaggggcttgtctaagatagcaatgctcctcctctgtcagtaaggactttcatttctgctctgaatgtgataggaagccagtggaggattttgaatagaagagtaatatgatctaacttacagtttaagaggtttgctcttgttttcatcttacatgtcaagaatagattacagaggtgggggtggagatgatgcagaagtgtagaataggagaagagaccagtgaaaagtcttgcaacaacccaagcattgggaattgcatgagttagctagggctgccataacaaagcaccaaaacaaacagcaatttatcgactcacaaatctagagccttaaagcctgaaatcaagacttcagcagggccatagtctctctgacagctctagagaagaatccttccttgtctcttttagcttctgttgtttgttggcaatcttttgagttcctgggctggtagagggatcactccagccacctggctatttccccactatgtgtcttcatgtcatcttcccactgttcctatctgtctctttttataaaggacatcagtcatattggattagggtccatcctaataaccatttttttgtaaactcaattaaccctgtaaagaccttacctccaaatgaagtgacattgaagatgctgggtatcaggacttcaacgtatctttgttggaggacacaatttggaggacactgttatggaggattcataacagtggcattggccagagtggtatcggtgagaagtggatggattgtggatgtattttgaaggtggagtaccgcctattataaattccaataagtactagatatgattatttttgttgttaaaattattatcctgatcccagtagtagcagtacttatctgaatgataacaagcccatgtttgcttaggtattgtgtgaagaagacagtaacagtgaaattgaagaatctcaggcatctaatccatatgttcagttcaaggggtttctagggtatctcacatgttcctgaatagccttgccttgctgttccccactgcctgctttgccctataaccagggctactatcactcttgagcccaagtgagtcccttcctgatgacagctacagcttcagcattcttgtcacccccttatatcatcaacattggtttgattatatctactcttccttttgactcttgtgctacaaaatcctcctcccactttcaaactgaatatcattaagctttatttcctgcaagaactctgatagggtgtcaggtataaggattgtacatcagctctaacacatggagacagatatgacatcttcctccattttaaggcatatatatctaggcttgcctgctccaaggacttgtctgcacttgtcttgacttcaaatgagtacatagtgcaagactttactggcactgtcctataatatatcagaatacgaattttttcatggatttttgaaatgtttcaacgtatatatttctaaatgatgacattgaggttaaagcataacaagggtttattattaataataattacttttaattataaaaattgatgttaagttttggctatgattcaagttactgtgctatgcagttgtgaaaaaaggaccaagtcacgttccctgccttagagcacttaaagtttggtgaggaggagagagatgctaataggtaatttcaatataaaattttaaattctttgagagattatatggtgttctaggagcccatttgtggacacttatgagcaggaggctagtggagaaggcataatgctagtgtatgtggggattgggtaaataggggcaagaggaggggcttcctggaaagaaatgatggtgctttccctgaaacacttggccaaagtcaaacagcatggtcaaaggtatcttagggagagatgcagacctcaaaaggcatggaggcataaaatattatgactttaactagaaactgtaagtggtttgttatcaatagcacagaaaccataggcatgagagttccagctgctaaaactgaggatagaggtaagggtcagagcagcagtagagcatcccgtgtgccttgaaacagctcaaactagagccattgaaggggtttaagcagtggatagaataggcagattttcattttggaaatttctctctggtggaatgatgacgggtgattttcgatgaatcatcactggaagcagatatgttggggggtggggaagagagaggcgtataggatagcttagacttcagattgaatatattgagccattggccaagagggaaatggaagtcagagcacacagtatgaggataatcattagttaggataatgattttggcacataattatcttggatatgctgactttgaagtgccagtagaatatatagatggttgtgtctaacagatttggatagtgagatctgcaccatgttgggtatgttaaatgtcctgagagtggagaacctcacttgggaaaagaacgtaatgttaaaagagcattgggtcaaggactgaactatggggagcaccagtgtttgaagggatgatagagagcccatgaatgccaataaaggaagcacaagaagatatcatggttgccaagagatttactggaagagtaaagtggccaatagtgtcaaatgcagcggggtgatctccactaagttatggactgtgggccacagagtgtccactggatttgtctatgtgggaatgaattatagtgaccagagagaaagaaaacagttatatgtgggaatagtggcacaaaagctaagttatgtgggttgctgcccaaacagcatgagtaaaagtagtacctatatgtcttcgtttgggctgctgtactaaattgccatatactgggggttgcttaaacaacaaatacatatttctcacagttctagaggctgagaagtctaagatcaaggtaccagcagaacaggtgtctagtgagagcctgtttcctggtttgtgatgactgtcatctcattgtatccttatatggtagagggcagagagagaaagcaatctctctcgtgtctcttcatgatgggacactaatccatcataagggttctaccctcatggactaattcgtcttcaaataccatcacagtgaggattagggtttcaacatgtgaatttggggggaagaggacatattcagttcatatcactatattatataaactattatttcaagataattgtatcagactgggacccagcaggaaagaagcagcagattctgcttgggtaatctgggcttggctaaaaaacaggcttacttacaaagtatggacagtccttatggttttcctatgtaagtaatagtaaactatgcatgggctaattatagcacaccactatcatttattatcctaaagagatgagaagagagagagaaggagggggacaagaagaaggagagagagagatgagagagaatagaagagaggaggggaggcaacgagaaagagagagagacagaaagagagaaactgtatcaagaccgtatcaagagggttgcctgacaggagctgtgatccttaacaaggaaattgttagcccatggagacatctctaggaggagctgggataataaagaccctggtcttcactttcctttctaccttatattttcttctagtgcttcccattggtcacacgcaactgaaaacaaagcaataagtaagcccatcaaaatagtcatacaggctaagattgcagggcacagggctaggtagggaagggtggggagtagctctggatagggtaaatatattcagcacaaaatcatttcggatagagaagaggatattagttaaagtggctgcaaatttaaaggaaacaattgagttttgacttttgtgagttttttttttttcctttatcaggatgggagagaggagctaaaagccgaggtaagtgataccaataaaaaggaagttaaagctactttatgatataaggatataactgatgcagaaaagtcttgacagattcagacaatcagataaggagccacagtaaaatgattggctttaaacagaaggaagaaaattttatttcctccaagggaaaggaaagagaaaaagaagcacggttgtgttcattctataggtggagaggggaacagatgggagaggcaagaaattgagagagctgattgctttgccccagttttcctgatacagaaggcataaacgtgatatgccttctgctgatagtaagaggtggggatctgtgtggattttgaagagagttttgactaattgatacagtcactgaaggatgcaaaagaaggagttggccaagaacaagaaaattttatgggaagccctatggccaagaacaagaaaattttatgggaagccctattgatggctagagtttctacacgatcacatgtgcccttgtgtgtggctgaggaattttctcattcagtggtgtgtgctcaacagcctgaatgtgtaactcaagaaggccagttgaagggataatttagcatcagagttttgttagattagttcagtggtagggcagaaccaaagggaaggaggccattggtgatcattcctcaaaatccattttaaacagctgagatcattttattttcctcttattcttttgggggctatttttaaaaaatatatttgcaacgcatctaaacctgtggcaatggtggcattcttagaactatttcataaagttcaggtaacaaaattcctacaagtattataattagcattttcattcttagtacaacaaatatcttctgaagattaaagcaaatattgcaaaaggcagatgaattcaggtgaggttcaaattttagtagaaaattgtagtatgtttatatacctatattccaggtgtaaaccatcaacagtttgctatatccatgcagcatagagttaactaattaatgttgtatttcaaaaggaagagaactacactgaacttcagtgacattttcccttcatttcttccccatcaatgtgattagtatttttttaatttttaatttaattttatttatttattttttaatttattattattattattttttagacggagtctccctctgttgcccaggctggagtgcagtggcgcgatcttggctcactgcaacctctgcctcccaggttcaagagattctccagcttcagcctcccaagtagctgggattataggcacccaccaccatgcccagctaatttttgcatttttagtagagatggggtttcaccatattggccaggctggtcttgaactcctgacctcaagtgatcctcctgcctcagcctcccaaagtgcagggattacaggtgtaagccactgcacctggtctgtgattagtattttttaaagtagccaattataattttcaatatcctacaaatgctattttttacaaataaaataaattcagtggaaaatagtcttgttagaaaggagttctacatgctatagctaccaccttccatctatactaagtgtttggaatgtagttaaatacaacccagttgtaaattattcctttgtggttttactctaccagcttttgatatatgtgtctttgcatgggagataaactttgcccaccagtaagatagattttaattctacataatatcatcccattagaaatgaagatttctgtcagtctattatgttatcagatacatttaacaaataaacactcccctgttgttgttcttgatagatgaggaaagaggtttcttgcttctgctaatatcaaacaagataaaagaatctggagagatatctcttttcatatagtgaagagtaacagaaggaaactaaagaagaggaatgtgagtcatgcaaattgattagtatgttattgattgtagtaattgatccatggtgggccttactgctgtaaaattattgattttgttctctttcaaccatttccttcatagctatccaaggaggtaggataataatatctacagaaatctctactttctaaggcaatgcttgaaattaaataaatatgctgtagcagctactttattttggctttagtaaaataaggattagaagataatactttatccacgtttcttgtccttacatataatccattaaatcctaaaactgtattttcatttttaaatataaaaggaagtgcctagagtaactatgtattcttgcacaatctggaagcaaagacctggtttgtatgccaagaagtgtagattattttaattttatttttcacttcaattttataaaaaagtttatatgacaataagactaagtcaaactgaaaattcacagaaaattcatcaggtttgtttttaaaaagaaatgaccactactaaaatcaacctatccccaaatttaagtattgtaacacggtaacattataattcttatttatataacaattcaaagcaagtgtttggtggacagcctttcattgtgtgattcagggacccagggcctctcttctgctgacttctttgtcccctagatgtactggtgcttcacttctagctgacagcaaaagagtgggttttgcagaaaatttgtagtaggctagacctggacatgtcacattatttctgctcatgttcccttagctagagctcagccatgtggcaattcctgtctctaagggaggcaaggaaatgtcatctagcattgtgcaaaggaagaagaggaaatagtttggggatcttagtcatctctgccatagagattgactctatggcttatccttcttacacctagaactcagagtagacaatagcaagtctcatccaggcacagtatctcattcaaagtccaggatctccagacaacatgcagttctgttgctcaggtctggaaactcaatagttgttttgagacatgttaaaattgagatccctactggctatttaagtggagatgttgagtaagtcgctaaatatatgtagtgttcatatgtcctcctttgcccaggacagtgctgatttatgtctgtagtcctggaataattatgaatagcaccttcatctctaaaatgtattaagtttagatgatacattatatggatataagaatctggagtttagagaagagactgtaactatattaaaaagtgttattaatcaagctatagctgttatttaaagtgatgaaacctcaggtactctgacagttagaatcaggaagaggaagaagatccagataaggtgactgaggctggtcactgaccaaggactagcatatgagctaggagagtgtgggggttacatagccttgggaaaaagaaaacatagtgaatgcactcatggaactcactgttttttgggaaaaattgaaattttaaaaagtaaattaaaaattatctttctagattaacttttcatctcttagtctcgagaacacttgacttcaagtacatattatagaacagctcaaggttctttaaatgccccatgctcttagtcttctacacctgtctactaactgtgtctctctgccccgttccttctaggctttatccttttgatgaattcctactatattaataactaatactgacaaagagaatgcatttcatgtatcagttacacttcaaagttcttcagatccagcaaccatcatataaggcccagttagtatccccttttaaaaatgaagaaaatgaggcacaaaaaggttaaataacttctccagaatcacatatctaatgaatatatgaatgacgatttgaatgtcaatcagcatgacagcagagcttatgctcttaccaaagcatttcacgtggcttagtaattataaactaataaaaatattggttagatattatattttagctttaaaccttgaaatgtacatttagttaccaatgttttgagccattaataatctttcttataaaaacaataccagaacatagcctctgaggtttccaattttggtttcttttctttttctcatttttttttttttttctttgagacagaatcttgctctgtctcccaggctggagtgcagtggtgtgatcttggctcactgcaacctctgcctcccgagttcaagcgattctcctgcctcagcctcacaagtagctgggattacagacacctgccaccacgcccagctattttttttttttgtagtttaatagagatagggtttcgccgtgatggccaggctggtcttgaactcctgacctcagatgatctgcccgcctcagcctcctaaggtgtgggattaacaggagtgagccaccacaccccaccagctttggtttctttaaagtggagcaagaaactctgctgatagacatacatataactgactattgataagcatacaattcagctgctggaagtagaggttcacaggctgactgctctggagtatctcgtgtgctatgcatatcagtcagtgcattttgcaaggagaatggaaaatcatggtcaagctagtcatgttgattaagtggaagtcagctaaagagcgtttagtctgtttagtactttttgcattcacctacttctggatttacacagtatgttaaaattacctgcttataagtctcctgctttttttttttttttttaccagactgtaagcagtgtcgttattttattcatcttggtattctcagcacccacagccctgcatgtgattaggggctcctataaatgtttgatgaattataatacactgaattaatatagttacatgcttatgagagggcctgcttccactaaactgagaatatttggggatgggacaaacacttattatttaagtaaacttcttatgaaaatatacctcatatatagaaatgtctacaaatcataagtgtactatttgatgcattttcacaaactgaacacatacatgtactcagcatctagctcaagaaacagaacaggaaacatgtcagaagcttattccctgctctgttgcattcactacacactcctatgcaagctttacctactcaattttttcttttttttttgagacagagtctcactctgttgcccatgctggagtgcagtggcgtgatctcggctcactgtcacccccacgtcccaggttcaagtgattctcctgcctcagcttcccaagtagctgggatggcaggcatgtgccaccatgtccagctaatttttgtatttttagtagagacggggttttaccacgctggccagactggtctcaaactcctgacctcaagtgatccacccacctcagcctcccaaagcactgggattataggcacaagccactctgcctgcccctactcacttttaacactttagatccattttgcctcttttttatatttttagaattatctgaatagaatcatataataggtattcatttgtatctggcacctttcactcaatgttattttgcagccattattcactgttgtctatagttgtggttcaacaattttcattgtagagttttgtaccaactgaatacacttcaatgtatgtatttattctacccttgataaacacttttatttccaattcagggctattataaacagtgttgctgcctacctccttgtacatgcctttttatctacatgtgtacaaccttttctggaaggagtacctaagagtaaaattgctgaatctatagtgtgtctatcttcagctttagtagatactcatcaagcagttttccaaatggttctatgaatttgcattcccccataagattacaagagttccgtttttctatttttttttttcattttagccatcctgatgagtgtgtaggggtaatacattgtggttttaaattgtactcttttgatgcctaattaagatgaacactgtcccatatatttaatggctatttgcatgacttcttgtggtaaaatgctcattttctattggaattatctttgttcttaataatttgtaacaattttttatagattctggatatgagtttttatcgggtatatgcattgcatttatctcctttcactcttccttgccttttgattatcctcttggtgtctgtcaaagaaaaaaatctgaattttaatgtaatctgatttattctttttttccctttatggttaccacttttgtgtgatgtttaagaaatcttatcgtatcccaacgttatgaagattttctcctgttttttctttgaaaagctttatgtttttttacgtatcacattacaatctgcagtctatttagagttgatttagttatacggtgtgaggtaaaggtcaagatacatctattttgacatggatgttccatttatccggtacttatatttaaatgatcattgtttcccctgtgtactgcagtattatcttcatcataattcagtgtccaaatatgtgtgagtcaatttctagacactgtattctgttcatttacttattgtctattcttgtgctaatatcacactatctcaattactgtcattcttagtagtaaaatatggggcagtataaatcttccagttttttcttcttaatgaatattgctttggctattgtaggccttttgcattttcatataaactgtataactaggttgttaatttctgcaaaaagatcctgcaggattttgatttggattataacaaatacatgaacaaattagagaagagcttttatcttaacaatgatcagtcttccaaaccatagacatgacctatccctgcatttgttatttttgtgttccctgtgcatagtatgtgtctggagttcagctgactctcaaaattgtgaactcttctactgtccctccttccactctgatatcatcaattgactgtgaactctcatactttcccattcttacaccatgctgtcctcaactagaaatactcaattgtctcttcagagattatctttccttcagggtcacaactccctggagtttcaactgggccaaaggaaactgtgctttagaaaatggcaaaaactcttctcacactgcccaaagataataggagactacctctaattacagaaatatatggaatttgaggttcttccacccaaaagtaacacaactaaagataagtagaatatgacagtgggagatctattttgactgtataaagacatgttctttctttctttttaaatttcaatcgctttgggagtacaagtggctttgagttacgtggataaattgtatagtggtgaaatttgggcttttaagacatttttgaatagaataaatcacagatacatatgtgttttttaaacgttggatttggtaacaattatataaagatctttaggaagatttcagtgaaattatatattctaatgtgttagaatattatttttcatgcctcaataatgcacagagctcaaatctctttaaccagactttccaatgatgacagctcaaggtgtacttcgtagggcctctgccggctttgctgtgtgtttgcatgctggtgggcaaatgcactggcagatgtcagtcacttaaacaggctcttttttgtttcaaattctaagtttcaattcttggcaattgcaacactacagaaacaggcagtgtggcttctaatacttgtcctttgacttaaataattaaagttcaacactacagcaacaaagttattagctagtacttgactctagacactacaggtcaattactggccagcaatgtttagaagcacaaaccttggtaattagcagcaaatttcatcttctctcagcacagtatgtgagcatgccaccagaataagcagaattaaaacacaaataaaagcagctcatgtatcctagatttataattgctactaaggaccatagaaatttcagcagagttgggtgcaaggaaattttgacacctggaaaatggggcaagtatgttatcttttagcaagaagttaccttaggaataatttaaggagtataaaatagattatatatatctttttcttttgaagcttcaggtactgacctcttgtgttgttgtatattcaaagatagatagagctgaaaagaagcaagttcagccccatcttttaatcactatttaaataaagaatagtgatcacatagctagttagaatcctggctagtactggaacgccaatcatcaaataacctatcattgatctttacattagatactctaaacatcaaatctccggcaaaggaagttatcaaattgggggtggtactaataaccagtgctatttctaatagacttttactaaataaaacataaattagtatacatggcacattactttctgatctgtgaaaggcgaggaaatactgtctcctctggattatctaaatgtattgaacaatcaaattcttgagttggaatggggtggaaatgatccaaataggcagggcaaagccacttgcatgtctgattttcttctatggaaagttagaaaatctagatggcaaataaaaggctaccgtaccagaatttgattattttgcaaccaacaaatacttagagaccccattctcaattttggacctgggtgaacacatgctcattcaattcaaaataagcagttgatatctgttttacatggaatagctacactattctgataaaataaagaatgatttaccttaagtagatttttctgtacacctgatgcttagaaggtcaaagtggcttggccaaatttattcaggtacccaaacacttgcctcttggatctcagggaattctttatttttaaaaactttcaccccacacttttcatccagaaataacataccccatgagggatgtgaagagtggggtcagaaaccagaaaaagtgagttctaggtcaaactgtgaatgaatgtctatacatccaagtggctaatcactttgactctctgagtttctgctatcaaataccacaatattacaaacactaaacccccaaaatatgttattttatgtaaatttgatttagctgtgaaaaattgaaattgtaatgtatcatctattctacatatacatttctaagtctttccagaagataatacttaatagaagataattcttaataatagagaaagattatttacctactcagcctgttttttgtaacagtgaagaatttatgcatgtgtgtgatattaagtgaaaattacattattcttttagaaagcaaatgtaaaaattgacaactatttaaatacacatgctggacttgtctttataaatacaagctgtagaaaatttcttttatggtaaaaaaaaaaatctttaaagatattgtatctaccctaggttggtaattgttccccctgagtcacagccattatcttccaaggcgagagctaaagccccctgtgagatgtgtttctggggacaatggaatagtctcaaatgagatcagtagggtagtgtatttgaaagtgcattacaagctacaaaacaaaattgtacatagcattagcagtgtcgatataaaatagtggaaggaacactggagttggcagtaggaaacgggtttcagtcagagctcggctgtttactagctggtgagcttaggcaagtcatataacttctctgagcctcaactgtcaaatggaaataataataattgccctgactgatgtacagagttgcaaggggaaaatgaggtaacatggaagagctttataaagtgtattacgtttgccaatgtcaaatgatgttatttttcacatacataccgaagagtcccagtatatattaatatgtatgtatttactttctgcatgttaaacttccagcatatggagtcataactttagtgattcatgagtaagtgattcaacctctttaatcatttaatttcctttactccaggccagttacaaaaatttagttcaagtattcttaaatcagagtagcctagtccttaagtccaatgaaccttggttagaaaccctgctttgtcactcttcactgtgtagacttggggaagatttttaaatctccctaagcctcaggttttttttcatctttataatggattattatgaaaattaactgagacagtgatccatttgtagtatttagtataactcccctaatcctgggaattttattttaatgttcccaagatgaaaacatgtgagaacaatctgtattgtaactggaataattatgtttcaaagacaatgtggtctaatggttcatttaatggcctcaggcaagtactgggtgctgtattcttacattcccagcagaacatgagggtgagggtttttctttatcattttgttcaaatgagcttagatgtgctacaaattcaatgctaagaacttagaattaaaatgatgatattcttctgaatatttttccaaattttcaaatgctaatgattaggtggcaattccagtgctactgggcattgacttaaattggttccagtagtgggctttctcgccatttattctaaaatatgtgatattgacttagcaggagtagaaacaggtaaggaaattaatatttgagacttggaaagatgaagacaagtattatttaataacaaaacatttggtatattttctacctgtgattgccttccagtgctatagctctattggaaaagggtggaaaacaatattagtaatgtttgggttgtggctagttatgtttaacatggcactaaatgaaagaggtgatgccagattagtgttggctggcttgtatgtagatatggaaatgaaattagactaggtaggagggaaataaaaataaaattaaaatccattgtattaaaaaaaatctgttaagaatcagtttgggggcaaagatgagattaggaatctgacctttccaccaagcctgaacccttcaatacagttgccaatctatttgccatagaaagagagagagagagagagagacgagtgagtgagagagagagagaaagaaacatgatgtcaagaaagcaaaagattaaatcagaccagagaattatatctaggaaagtacttcttgtgaagttcccagaacatggaattgactgtaaatagatcagaagcttactaaagtttttgagaaaattacattgccaaagaaaccacaagtttgatctttaaaaatcttttttctatgagcccaaaagcaaactttgggtcctcaaatttgcacaggcaggaagtagctgaggaagccctacagtcctaaaataggacaaattctccaatacccatatcagatctcactatagagaaatacggacaaagaaggacctccaagaacatagaatcaggagacacagagaacaatggatgaaagagcttatccctgatagctgactaagagaataataaaggaatttattccactgccagggcagagggaacctcagaatgcctgcctggtagatttcatcactgctatagaccagtccgcagtcatcactcttcgccatttttatgggagtgtttagtcagttatcctatcgcttcttcacttttgcatactgtgcatgtgtgtatataggtatacagtgtgtgtgtgtgcgtgcacgcgcatctgtaatggtgtggataacttgtctttctagtttataggccaccattccaggtaccatcttggaaaatggcactaccatttgtccttcggcttagactaaaaagagtgttgttgttgttgtttttcctctgggattattcatccagcacatccacaaacctgtcagttttactgaccaaataaatctgaagctgcttctcactccctccatttctatctccctaatctaagttaacataatatctcacctgaactactcaaaaagtctctttttttcttttttgagacagagtctcgctgtgtcacccaggatggagtgcagtggcgcgatctcagctcagtgcaggctccgcctcccgggttcacgccattctcctgcctcagcctcccgagtagctgggacttacaggtgtccgccaccatgcctggctaatttttttgttgttgttagtagagacggggtcaaaaagtctcttaattagtatctcttcttctatccttccaacctttcaatgtgtgagtggaagtgagattatgtgagtcctctgctccaaatttcccatgacttcccctcccctcacaggtaaaatctgaagtccctggccacctcttccacgtcctctccagcattctcctcctgtttactaaaggctacccactatatcttccttaatgtgcttgaaacatacaaagcattttcccaccttaagatttcccctctctgagccctctccagggcccacttcttcattcatgaatatctcgctcaaatatcacctccccatagatactcaaccactctgccattccctatgtccttatactttatttttctttgtagcccccttcaccgtcagacatcatataaaatatctcaggatttttgctttgtttacagatatattcctaactccaaaacagagcttggaacatggtagatgtttaacacatatccgtaatgtaaatatcttgtatgtgctgcatctcagcacttaataagaggcacgttaaagtgaactaaatatggcctgagaaggattctgtacttctgtatttgagtccttgtggatgaactgtaacgtagcttaataggtagacaagattgaaaacctgatttaggagtatgtgcctgtaacaatagctaagtcttggccaatcccagcgccgtacttcaaccgttcatatgctgctgagtcttcaaactgttcaagtaagggaaacactgagctgtaaccaatctagccattctgtacctcacttccaaattctgtacatcttttcctttttttgtctacaaatcttctttcgccgtgtggctgcgctggagtggttgtgaatccgctgtgattctgggggctgcccaattcacgaatcgttcattgctcaattaaactcctttcaatttaattcggctgaagtttttcttttatcaggcataaagtaagtgctattggggtatagcataggatggaccaactctgactgacaggctagtgaaagcttcctagctggcttcatgggtgtgcaacctgtgcagatatgcagggccatgcacttggaaagatcctgcttttggtgtaatgttctgtttttgccatcttgaaattcttcataattttgaacaaggagacctgtattttttattgaagtatagttcccattccatacaattcacaatattttaagtatacaatttagcattttttagtgtattcacaaagttgggcaaccatccccattatctaattctagaacattttcatcatccccagaagaaacccacaaacatttgtggtcattccactttctcactttcccttatgcctagcagccatttatatactctctgattctaagtttgccatttcaagacattgcatgtaagtgaaatcatttaagatgtggcccctttagtcaggttcctctcacttagcatgatgttttccaggtttctctacattgcattatgtgtctatactgtatttctttttgcggctgaatagtatttcattgtatggatacactacatttttgtcaattcatcaattaatgaatatgtgggttgtttctactttttggctatcataaatgatgctgctgtgagcattcatgtacaagtttttgtgtgactatatgttttcaattctcttggctatataggagtagaattgctgggtcatatggctactctatgatttactttttgagacactgccaagctgttttccacagaagctatgccattttacattccttccagcaatgtgtgagggttccagtttctccacatccttccgacacttgttattttctgtgttttttactacagccatcctagaggatgtgaaatgatagcttattgtagttttaatttgcatttctccaatgactaatgatgagtatcttttcatatgcctattggccatttatagatcttctttcaataaatgtctattcaaattttttgatgattttaaaattatttttcttttgtgtttttatttctgagttataatagctctttatatattctggatactaaacctatatcagatatattattattattatattttaaattcgggggtagatatgcaggtttgttgcatggatatgtcgtgtgatgctgaggttggggcttctattgaacccatcacccaaatagtgaacagagtacccaatattgggtagtgaaaaaccacacaataattaattttttaacccttgcccccttgcctcccttctctcttttagagtccccagtgtctgttgttcctgtctttacatctgtgtgtacccaatgtttagctcctacttgtaagtgagaccatgcagcatttgattttctgtttctgtgttaatttaggataatggcttctagctgcctccatattgctgcacaggacatgactgcattcatttttgtggctgcatagtattccgtggtgtataccacctttactttatgcaaccagatatattatttgcaaacattttctctaattctgtgagttgccttttcactttgatagtgtcctttgaagtacaagcatttttaattttgatgaagtccaatgaatttatttgttctttgctgccttgagatttacgtacctatctacgaaaccattgtctaattcagggtcactaaaatttacacctttgctttcttctaagaactttaaagttttagctcttgcagttaggtcttttatccattataagtttaattttgtatatagtgttaggcagatatccacattcatttcttgtttgtgtatatgcagttgtttcagtatcattttttcaaaagattattcttctttaagacatcattgaattgctttgacaaccttgtcaaaaaccggttgaccatagatgcataggtttatttcaggactctcagttgtattccactgatatttatgtctattcttatgccagtaccaaatcctttaattactgtagttttgttataaattttaaaagtgttaagtgtaagtcctccaactttgttctctttttccaatattgtttcaactattctgggtcccttgcattttcatctaaaatttagagtcagtttatcaatttctgaaaaatgggctgttgaaattttgatgaaaattgtatcaaaactatagattaacttgggtagtattgccatgttagcaatattgttttctaatatgtaaacatgagatctttccatttatttaggttttctttaatatatgtctatgttttgtagtttttctatgtgcaactcctacacttcttcttttgataaatttattccttttattctccttgaagctattgtcaataacattattttcttaatttcattttcagatggttcatggctagtgcatagaaatacaacagatttttatattgaatgtgtatactgcatccttgctgaactcctttatccattctagcaggtttttcatgtatttcttaagattttctatatgcatgatcatgtcatctctaaatagaggagttttaattcttcctttctattctggatatcttttattttattttcttgacaatttccttggctagaaccccccaatacaatgttaagtagaagtgatgggatcatacctgcgcctctctttgctgatattagggggaaagcttctagtattttactataaagtatgatgttagaggccctgactttttaatcttgcatcgggctctgaaaattatgtagctagaactaccttataaagaaggacacagttgagctgagtatcacaggacaagtaggagttctccagtgggtgaggaggaagaaggggaacagtatatgcaaatatcatgaatacatgctcgaactcaaagtgactcagtgtggcaggtgtgtggaggccaagtgaggagtgaaggaagcagaggttagagaagtaggtagggctggaccactgctggattgctgacttcttactaaggagtttggattttattctgtaatttttagactagtatactattatattttatattcaacatcaaagagtagaatgaagaaaaacgagactaaaaattgaggcaaggagagcaattcatgggctactgcaatgtttgatacagtgaatcaaaaccttgtcagattaaccttggaatagctgtattcttgctcttgaagactttgctttccttctatatttttttaaatgaaaaatttgtacaaataaaaacataggtattgagcaccatatttcaaagttaggctagcattgataaagtttacaatgttttgttcattgtgaaaaacatattttcatgtttatgatagcctgaagaattgagataaatgatcttttacacggtaaagaaaatgacgcttagaacatttcattagttatttcagtaactgtattagtaatcctagaatcttttgcatttgcatcatactaatccttcttacattaggcatcacctgccacattagcaaaaccaaaagatattccttccctatccctcctttcctccctccctcagtccctccctcccttcctccctttctgccttcctctctttttcctctctacccattttccttccttcctttttctttacatttacttaattaattaattcttcaaaaattttaggacctaagagactggactagatctataacacattttgtgccctcggagagcttacagattgatgagtggctgaagtaaacaaggctgccacatctcaaaacagagtatcatgcatcattgttaccctaagcacatctaaatttgtagaatggtcatttgcgacagccccatcactgtggccttcactgagagtttacagcctctgatatatacatggtagcattgaataaataatgctttgttgtattagttcacgttgtcatggattggagggctagagttagaattcgtgactaagatgatggaagcagtaagaagaaccaaagaatcaaaccaactaaatcccaggagagtcagatgaaccagagctactcactgcttgatcacatatagctataaattcctagtcgattcacagatctagaaagtgatgagccatttgagagaaaacacctctctcttttcctcaaattatgtaacactgaatccatgacattaaacaaatgattctaaccttttttttcttgcctttattggatttcaaagttcagtacacattcaaattattcaattttgatatcacttttatgatcaaatgtcctacttttgaaatggaaagctcagttggccatgttccctgttaagtttaagaagcttttatcacttaaataaattaaaccttccagcatggattctgcagaacataatgaagcacagaggaaaaaaagcttaaatgaaataaacctctttgctgatagaaacagtacaggttattgtgcattctaccaataaatgtgtagctggaaccgtagcctgatttctggtttttaaattttgtccttaatttttatagtgttcagcagcaatctgatttgccattggacaaaagatggacacaatgtacatgaagtaaaaagggtctaggtttttaatactgagaataaaaccaaatactaggtttttaaaagctgatttcttttaatactacattgataagtaaggatatatatttttcacaccatttaattcatacaagttgaactcttatgaactcaaatcctttaacactttctataataatttcttcatggtttaaaaaaatgcttgttttctagagaaaaatgatcatctatataataattgggtaaaattaagctatataaattacatattgaattagcaggagacattttactttttgagttacaatttgccagttgcccatgaaagattcaattggattatgaaaaatcttactgtttatagattctttcaatggccaaagtgttgggtgcaatttttaaaatgtaaataaaaacacaccattttaaagagtttaactaaataaaattcatcaatgtttccactatgttaagttgaaccattttactatatgcatgttaaaaataaagctaaaggtaaaaagcccttctttttaaaatttttatttattattatttttgagacccaggctgacatgcaatggcatgatcttagcttactggaacctcagattcctgagctcaggtgatcctcctgcctcagcctcccaagtagctaggaccacgggcatgcaccaccatgcatatctatttttttttttaaattttattgtagagatagggtctccctgtgttacccagggtggtctcaaacttctgggctcaagtgatcctcccactttggcctcccaaagggctgggattacaggcatgaaccaccatgcccagccaaaaggcccttcttaaaaggaaacattcagtagaattaatttgagaatactcataatggtaatgtataataattaccatggaaatatagctttcttggtaataaatattcagtgtcactcaaaattggagcttaggtcataaagctgtctctaaaactgtaaggacttgtagagagggcctaattacatttagtgtttttgaaatacagtgagttacttatattaggcatccctgatgttttatctttttatttgttatatttgtacattcttttaaacttaaaataaaacaaagaactatcatactttgcgtacaagatatggatcagctggtggtagcaccttgtgaattagtgtttaaagtccataagcatgattaaatcaccttttcattttcatttgtttttaatgaagctttccatttcaaaatcagtgcctatactctcttaccttgcagtaggaaagaaaattttgttttctcataagctagaaaatgagcttctagtggatattattgcatccttgcaatgaaatcaaagcaggttctgattcaagacctttcaatgactgatttgtgggtcaaagatttgaacctgagtctacccagtatgcatttgctcagtagttgggtaggttctaggaatgccagaaggcaaatgatatagctcctgcttccaaatgaggagtagacattaatgatcaataataataataataatatacagatagcactgattctttgtttagacagtggaacatagtgaaggaactataaagtgccctgcttatttgtaacattttccattcctagacgcaccacgtcatacatttgctgaatgtatgaaaaggttattgaactaatgcataacatttgtttattacaaatgttacaaatgttacagacactagagatatagcagttagcaaagcagacagaaatccctattctcgtaaacaaatgatttaggtgtaagtggaatcaaggttgatgtcagagtccagggaaagtcacattctttgaccctccctgctccctgccttccataaaggtagtgtatttaatatatgtagaagaaagttaaaaacaaaacaaaacaaaaacacaaggtgtccttgaaggggaccagaagctgcaaaatggtagcatgtgtttaagcctactggctctgctttggagagtaaggagagtctagagactgcctcgcacaaagctctttcaaggtctaggctaccgctttcccagcaagtatacagcttcaattgtgttcaattcactgctttcagggatggttctccatggcaaacgctctgtgaagggtgacctgctgggtgtgaaactgctgcacgacttcctacttcacccattcatctatccgagttttcacggagtccaggagaaagtataaaagttaccttgaggagcaggagagtggaatggttaagactgtttggaatctgaccccttggatttgcatcctggacacacagttgtgtgacctaagggaaaccacttaaactctttatgcctcaatttgcttctctgtgataaaagaataatatgacctgtgtcctacagtagagaataataggtcctagctcgtaaaatgttctcattccatgacacttaaatgagaaaatacgtgtgtggaagtgaccactttgctatatacagatattttattatcattttacaatgccattattttgttccatagtcaaaagtataataaaacaaatgtcaatttgtcttattctaatcctataaagtcaattcaaactagtattttttttaaaaaaaactacctcttaaaaacctggatataataagtagttgaccaaatccaagtgttactgtttgcggttaggtgtcagttccaattgtatagattgggtgataaatcgcctcatgaccccctctttctaaccttcctcctgcacctgcttctcctctcactgggctgcagattgtcagcaggccctgctgctaaggagaaagggggatctacttcaggacctagggcttgtgtctgagatctggagggcctgtagccactcctcagagtgttggcttttgagctagtcatgtccaactgctggctctctttatgtgtggcataattgatggcctgaaagtccctggtggcagatcacctacagggtgcaataacctttcccacctcacacagtgcttttgccttgcctggcttctagcagactgaattcacaaatgagtacgttcagtggcttcctgagctctaggggatcctagccagtacccctctgagctataaaggaagtgaagggcaaggagcaaagaggggaactttggctctctaaagagcatgtttttccgctgtgcattgctggctcctgagattggatgtgtaggtcctgctgttctgcaaacttgatgacaattcaggaccagtcttgttggtcataagtaccctcaaacctcaagggagctatgtttaaaattacttaacttcctatctcccgggcgtaaaaagggggaaaggaacaatgtgcaatactcagaattctgtcatctaatgtagcagagctcgattctttctctttcccagttacttttacatttctcgacagcaaaatacagatccagctctgtctcatttgtcccctagtataggtgagaaatcaagccctgtgccaagaccccctttgctctatgtattttggtatttggagtctttgtttctagctaaatagtagcaattcaaacacttttgtttgttcttggttgggggtgggtggggggcagctggtggtcaaggaagctgggaaagatttattttattgatattttacatggacatgttacagtcttacaacacaaaacaccctgaacttggtaagcacacaataattgcaagcaattattagccattatattcaaagatctaaacaaataaggctcttgcctaaggtgcccacaaattctcagatgtcagtaataccaaatctttcattatagtctctgcatggcaggacatgtagacattacaaaataggaatgtccttgtctattatataccaatagggttgccaaatttagcaaacaaaaatacaggactcccaggtaaaattaaaattcgaataaacaaagaatatttgttaaagaatacatatgtccaattcagatttataatgtctgatgtttttagtatgtcccaaatattgcacaggggacctgcattttacctgaccttcctgtgttcctaccacttgtcacactccactgactttgaaacggttccattttcccaaatgtgaaggctgctctcagttaccacatcgagccaacactatgtctatcctaggctaaacaaccaccttaaaaaaataaaaagggtaagtggtgagtgggaagggggatgtggaaaatcattcatattaggcctctcatgtccacccatagaatcaaagtgagtactttttcaaaaaggggctgaaataggaaaatagtatctgcgttcctgtgtctgggtctgtctggttctaaagaatgttcatatcttgaagacttagtacaacctatgtttacttgggaagcataagaattgtgtcaaccctttgaaagacttctaattaaactgctggagctttgatgtcagaatttgagattattattacatattttaaaaagacccaatttcatgtgccactaacaagaaaaaatatgttggcctttacagacagttactgaatttatttcaaaatacaaattagtaccactcgataaactgaatttagtgcatcaatctcattttagaaaatgtactcttacctggaaggggaattcctatctttctggcttttctgttaacggtgaccatcagtagtattggtttttggtgtaaaatcaatgattatatgttactccaggcagctgctgaatattcaaaagatagtaaatggtttcagataggagtattttatgagagttcaaggagagagaaccaacatatgttgagtgtctgttatgggttagagaacacgtgcttcacatgtgtttctactctaaccaacaacctacagagggtgatcaaggtaagttattttccttgagtgataaaattgtctgattctgaaagtgccttatctaatataactcttttttgattttccttacagccttcacctgcagttactttgcttttcaggactctgagcaaaaatctcacacttattaactttacttccaactctgataatatatgtggcaatttcttatatagccaacattttttatttcttctgatggggttatcataagttcttcccattattatcttcaaaatacattttaaataaaatgatgctcatttatttgtggatatctaacccctcacctgtactatgtatttaattttatgtttaaaatgtaaagaatctgggaaattaaagagttcaacctccaacccagtgaacatgtcatatggaaaacatacttctatcttaaccttttagtggtagaacgatcatgagttttcgaggcagtttattcaatagagagcagtttgcaatgaagtctgtgtactaagctggtgttacctcccggaaacttttcctcacaaattctagttctgccttctagggtcgcataaatcaatttaaattctcccctcacccaacccagatgccatttgctaaactgtgtaagttttcagtacatttatagcctggaattcttactatctgatacccaaacagaggataatttttttttttttttttttttttttttgagaaggagtctcgttctgtcgcccaggcgggagtgctgtggcgcgatctccgctcactgcaagctccgccttccgggttcacgccattctcctgcctcagcctcccgagtagctgggactacaggcgcccgccactgcgcccggctaattttttgtatttttagtagagacggggtttcaccgtggtctcgatctcctgacctcgtggtccgcccgcctcggcctcccaaagtgctgggattacaggcgtgagccgccgcgcccggccaacagaggataatattaaaaatggttttgaaacttatttctacacaataaggaaaatcatacaaaagtggcaattcattacagagaaatttaagggataaatatgtatttccttatatatgtatacacatatatacatatacaaatatgtatgtgtgtatgtatgtgtgtatttcctactaacggcaatataaggggaacataaactagaagcaaagtacctctctattcagttgtctcttgagtaattctccctctgatatgtaggggactagaactaagtaagtaagtagccaacatttctatgttgggtttaagccatattgcatccataaatttcataaatgcaattccataaatggtatttaaatttttttttcttgagaaataatcttatcaaatattcaagggttttctttgtaacacaaagcacatacagcatagtattatacaactgttaatccatctgcttttataatcaggctgtgactatctctcccgttccacagatcatctttcgtaagatcagtgatgtgaagaaagaggaggaggagcgcctccggcagaagaatgaggtgaccctcagcattcccgtggaccacccagtcagaaagctcttccagaagttcaagcagcagaaggagctgcggaatcagggctcaacacagggtgaccctgagaggaaccaactccaggtagagagccgctccttacagaatggagcctccatcaccggaaccagcgtggtgactgtgtcacagattactcccattcagacgtctctggcctatgtgaaaaccagtgaatcccttaagcagaacaaccgtgatgccatggaactcaagcccaacggcggtgctgaccaaaaatgtctcaaagtcaacagcccaataagaatgaagaatggaaatggaaaagggtggctgcgactcaagaataatatgggagcccatgaggagaaaaaggaagactggaataatgtcactaaagctgagtcaatggggctattgtctgaggaccccaagagcagtgattcagagaacagtgtgaccaaaaacccactaaggaaaacagattcttgtgacagtggaattacaaaaagtgaccttcgtttggataaggctggggaggcccgaagtccgctagagcacagtcccatccaggctgatgccaagcaccccttttatcccatccccgagcaggccttacagaccacactgcaggaagtcaaacacgaactcaaagaggacatccagctgctcagctgcagaatgactgccctagaaaagcaggtggcagaaattttaaaaatactgtcggaaaaaagcgtaccccaggcctcatctcccaaatcccaaatgccactccaagtacccccccagataccatgtcaggatatttttagtgtctcaaggcctgaatcacctgaatctgacaaagatgaaatccacttttaatatatatacatatatatttgttaatatattaaaacagtatatacatatgtgtgtatatacagtatatacatatatatattttcacttgctttcaagatgatgaccacacatggattttgatatgtaaatattgcatgtccagctggattctggcctgccaaagaagatgatgattaaaaacatagatattgcttgtatattatgcagttgactgcatgcacactttacatttatttataatctctattctataataaaagagtatgatttttgttacccaaggcaatgtaatatttgaagaatcagggtccaacctgccaatgttgccatgacaaatttgatctcaggctgagtatgtatatcgagctatcattttctcactgttctgttaagttaaaagtatagattaatgccaaggaagagttcagtcttttaaactattagtaccatgttatgatctctttccataggatatttttctgtaacttagtgttaggttcttttcccctacaggcagtgtttgctccatttaaatgactgtttagttgcctaagtcagataagagtgtgggatattgaaaacttattgctatgggttttgtgcatgaattacatttttgatcaactatacctctcgttttttaacattatacttagatagtaatcattagctcttatgtaaggaaatccctactccctccttcttggagaacagctgccatcttgtaagctgacattatcaacatcataaatactaaactattaatatagagtatgttattatagaaacactgcaccacagggtataagggccttttgacaattcatgtaagagatgctgaatttccaaagctgataaatgctctaaatttgtatttccaaaacatgttcaagagtgacattgaaaggcttgttagcaaagaaacatacaaaaaaaaaagcatttaagtaatcatatcaaaatgctaactattatggtataaaataaaaaagaatgtaaacagatagataaatttttgtggcatgtatataacttagaaagaatgaaacactggtacggattgttgacacatgaatcctagtgtttgtagtgataacacatgaaatgtggtaaaacaaacaaaccaaccaaccaagaagtagacattaagttgctcgactcagataactgcttttctatcattttattgtggttatagttttttaaagctttttgcacacacttctactgctggacttctgctgagttgattcaataagctattgtggctcaggcaggtccatttgtgaaagggggatactaaagactgaattttagtcttttgaattcaaatcctctttgtagaaagtgcctattatcaagtttttaaaaaaagtcacaaagagttgtcctgtatatagctagtcccttaaatgataaggattgagaataaaatacacattcacttgtaagaacccaggagaacttatttcttttgactaaactgtattttaggaagtcgttcagggaagcatacttttcagtcagtgcatgcacagcatttaatatggggagcaggggagttagtgtttgcatgaagttgaaaaaaatgtgtgagtaatttatatattacgggaccatctgtacatatatgttaacaatatgcaaaagatgatggcaaaatcgaaggagatatcttgatctattatacccatttgtatgagcttttctatctcccagtattcccaaccaaagccactagaactgaaagacatgttatcacattcagacttgagaagtgcaaaacagtgatttataaaaacagttgctattttagaatttctattgaacttcacatgcccacaagatgtgcctctttaatctaggagtctcaaaacatatgagccatgggctccattttcctttctttatgcgtataacttccattaaccataatggaagttttcaggggaacacgtctccatgtaatgctacaatatctacctaccacaaacacaagaaaatgaaataattatggagtaaagaatcagccttgaaattggaattttgttgctttcatggtgaggatgatatctttttcgtgacctctgacatttattgaatttcagggtatttttctatttgtttaagtcaagtttggcttaagcttttaaaggtgaatgtgtggttaaaataagaatctgattatagaagttgttagtttaactttagccagtgcttcaaaactaactattggtgtaaagctataaaagaatgactgtgaacaacatgatgatttgaagttctaattcatggctttgcatattagtggtgcaaatatttactgtgttctgacattgacgtagagtttcacctaatcgacctacaatgttattgttcatatatgtgagaaacataatggttttgaattactccagattgttaggaaggagggaaagtatcaattgtttaattatggtgcagttatcatagtgtcttttcagccatctctgttctctgtgtgcatgatatgaagaggtgctgaatgcaccctgctgttttcagcaggaatgcatgttttcagcaaacattgtatatagagtagtcttttaggttcccagattccacaaatcttagcagttgaatttactcagatttgaatgaagggagaatatttgctttaatacatgcaataatgataaaatcatgttctatgttgcctcaactagcacatagacagtagatgctcttttgaggaccagataactgcatgttttattcctacactgtatagatgctcttggtgcatccagaataaaaattttaatattatatttctaaataatatattaataggagtaaatggatatgtattagaaatccaaacattttccaaagcaatttacacaccttcaatatttttctatgatgttattaataggtaagatcagatgctgtatcctcgacaggtggttgtaacaaaatagcaaaagtcaaattagaatggaaatgtgagtgatgtatcataatggcaggttttatcagtctgtatcaggatattgttgcactaaatgtgatctagcagatggaagagattatgataaaaagcaaataggcacacaaaagccagatgacaataccaaagctatatgaatggtactgaaaatggttcaggcacagtggttgaattgaatgacgtggttgaatacaggcccatgcttcattgttaaaatggaaaatttttatgacactagttgcatcttgcattaagtataggactaaaaatgtcctaagtattttttacaaacaactttatgtatatcagagaaaaaaatggaaaatctggggtttgaaattgctctagaaaaaatgtgtacttctgttgtactcaacactttaataggaaaattagttgtgaccgctaactaaagtaccattatcaaaattaaccttattggagcccaaatgaaaatcacattttcccttctgtttaaggagattttgttcaccctgtgatatctggtccatttgatatcttattttaaatagctaaagtcatttggaattttttttaatattagccttcagagcagtgactgttttgaagtgtgcagtggcagatatttgtgaaattattcatcatatttctaatgaattccactatcttgtataatttttatcttttaagcaattttctatgagtttgttttccaaaattccatgtaggtaatgagaacatttatctagaatgtgcatatcatacatggataactttcaaatatgaatattttataatcatgtgaatgttgtgctataattttttctattaggtgtaaaagtatttctcttctcatcttaatggaaagggggaaaagacaaaaacagtcttttggaaaacaccttaagtcttagtatctgagctttgtcttgtgttctgaatttagctttaccacaaactagaagtgtaattatgggcaagttaacctttcctagtgtaccaaatggtaccatttccccgccaataaataagaaaacaaagataacagctgttgcttccttatatcaacatgctattggtcaatgaaaaaattatctttcttgcaggtgaaaatcacattatgacaagtgatcactttttcattctttcatagaagagtatccacgatgtactctctatcaaaatattcttctagattttagaagagatttcagggattgacggtgatgtgatttttatctaaatattcttttaggttttagaagagatttatctggtcagaggttaatggagagaggcatagtttgctagtggcaggtaagcataaaacttcatacttatgtgggaatttagaactacaaatcaaataaacgtggaaagaatgaagctcctttgacagaagagagagagaagagaaagataggtaaattttgtgatttttcttatttctacttaatcatactgcttggcagaaattctcaattttgtgaaaaaattggtaagtggccaaggtatagagtagttcaccaatgtatctatgtaacaaaactgaatgtgtaccccttaaatttatacaaataaaaactagagtagttcatccttcaactttttatattaaaataatcatgacctgttcaagatatatgattccacatgggcagacactcttataacaaaattcttaactatgtgctatgtgttgtaagttttggcctatattctgacttgagattttctatcacttcatttgtaggataagacccctgtgtttgcattctttatgagggtcaggaccactgaggatttggactgggaactagaaagatgatgaaggcaagggttgagaaaagactgattagaatctatctgcttctttactcttaggcttagaagttaaataagttaactaagcttatatttaccaaggtctcactatgataagcattttatttaggttatcaaatttaattcttgcagcaaccccatgaaggtataggttaaggaacttgtccaggatggcatacttgttacatggtaaagttgagtttctaacacaggcagtcagaccttagggagaaacctttattttgtagaatactgacattacaagaactatctagttcaaccatctagtctaggtttttccagacacatacttttaaagatttcttaaaataattcttaaaaattgcactcgataatgtgaatgtaaatgtttggtttttcttgataggtcagagtcaatgacagagtttgaaatcatactgtcttaagcaaaaggtgccctgtcccaacagtggaattttcctttacttctcctaacagttgaaagacatcggccaaagtaaactgtcaaatgtggtatgtttgatatatggtcactggtatcaacattttcttttccagttgaattttaacctaaagaggtaatgcctaatggttaaggaaagcaagagtcattcaggattttttttctataatttctttttctttttaatagtgggatttggatgagactccagaatttatttttaaaatttattttttgactcattgggttttaagtagattattcagatatttttattgattgcactgatgttggcttcttggccaaaccactattaaatacattatccaaatgaactatttctgtttagaatggcaacttgtatccttatttccaaaattaatgagctcatagtatgtatatttacttcagagagtttcaataattttctctaatgaaaaaatgttaattttctgaatgtgatttatttgttctaccctttgagatttctaaagcaagtgtcttgagataaggagaaaaaaacaagatattacaacactacatgctggaatcttcagcccaaaccatcttgttttcacttggctaataactgagccagaggtaatcatagaaaggaagaatcctacttttaaaataatgactgtgaaggaccccactgacaccatccaaagctttttatagtcagctcacttccatcctggcttttacattaccactgcatgattatttaaatgaggtcatgtcttgtactacttgtaaaggcacttggtcaaagaagagtaaaccaaaaagtgcagcttatgaccagagttataactgaggaaaaaggagtgtggagaagggacagcagttgcttccttttaatgagttttctgtatgtggtgccttttaaatagcttttgtttatttgtttttaagatgacacattgtcattaaggttttaacaaaaacctttggaagcagtttgaaagcttgtcaaatgctggggccttctttagaaataagtgttctcccaccaaccaatgagtttagaacctctggttctgacctacaaacccaatcccctaagcacttggctggttgggctgcattttgatgggaggaaacaaaaagatctgatcactctctctcattcatgcggaatcactgactgttgaatgaccaaagcagtcaaagccaaaatattcaccttgaagcttcaataaaccagattgagtatccataataactaatttaagtaattttatccccattctctgctaaatcatatttcataatataaaatgtaaccacttccctctatccaaagcttttggtcagactctccattgagttagagaaattggactttggcaaaaagcaacataaagattattgttgttcctagaaccattgttgccatggacccctcatttgctcctcaactttttcaaccaaattatagcgggaaagattcctgatgaagccaagactgcaaacaggaagaatacctagctagtaaactatgcaaaatcacaacaaagattcatttataattccatgttacagtgtttgatagtcctaagtatttaatattggtatattatgtcacagccatgaactgtcaacttacacaaaatccaaacgcactttcatttaaaatcaagattagcctatttcattttcaggaaaaaacagttgtcagaattgcttttttgacctctgcagggatgttttcacattgctattcttatgaccctttatcagagagggaataagtgtagtgttcactttcatctccttagggttgactgcaccagcatcttccatcaagcagtcgccttccaccttagaacctgttcacagttaataaagcaagggggaatatgcatttcatattaggaacagatttcttaagtgattgttatgaaaagtggaaaccagtttagaaccatttttttaccctaaaacatccattgtagtttgttgaaagagcaatgacttttagaagtgcttggtactcaaacaacacaaaatgtgcagattcacgatatattgaaaattatagagttctttttagtctatgttctagtgactttgtttacactagttgtggcattttgtatactacaatgtaaattctactataacactaatgttactatgggaattaattttgcaacttcttaaatgtttttgtcactgcaaccatattggtgagatattgggggtattaaaaatgcctctgcctttaagggttaattcaccagaaataattgattcatgcattgacaaaggaaacaatgcaaaaatttcatgtgggatgtttttaataccattatgctaagcagtacttgttggcttttttcaaaatctgattcatgctaagcagatccttttttctacttaaacaaagatactgcaatgtataatatagaaattttgtatgtactgttgacctatcacctgactgctgacaggatgtgtgaaaatattttaactttgtgactttagggtcaattatgaaacaattgtgatcaaaattcagttgcttctgggaagtttgtggtgattatcactttatttaacgtttgttctcaaaaaatggtcattttgaaaagtgaattggcaggtggaagcttttagcccaaaagaaatctgggtttcagcacaataaactgtatttcatcagggaggactaactttgctttttttcacactttatttaaatgtggatattttttcatgatacagaataaaatgtgcattttatggaattaatttgaattgggtctttgttggaaattgctattttgaatttagttaaataagtgaaaagctccccaatattaaaacacaacgcaataggtttagaggaaacagtcttttgatatattagaattccaatgttttcttaaactttcataatatttttcctctgataaattgtatcattatggtataaatgataaagtagtattatatcagaaattaaaagtttaagctccaggagtaaatttggttgaattagaatatttctctgtaccttgaaagatagagataatgagcatatctgaataggaatttggagaaatccttattttaaaatgggattaaaaaatatttctctatcaatatttctaaaattctattaatatcataacattattaatttattccaagcagtgaaatttagaggcttaaagggcagaatgtacatggaataaaagtatactttttctcatgttttgaaaaaaattataaatggctttgccaaattcctattgaaaaacaagagctgaatatgtaacataggatgtctgccacacgagaactgcagatttttcttctaactaaaaaacaagtttgaggaacacttttttggcacatcactgaaaaattattcatacctatggctacgtaaaattacatgttgattacagaaccaccaaataaagcttcgtctttgctatggctgtattagaatataagttagagcattctagagttagctttcaattatataggaatcaaggacatgatgatcacagataacaaaatgaattgtcaaaatgaagtgaaactttctacacaaatgaacagtaattaatgctttctccattttttgttgattttcctcctcttttttttcttctttccttactcacacatgcacatgcacacacagtcaacaataaattgcaacctttccttctaagttccatggtaataattaagaaagataccaatttttggctgggtgaggtggctcacgcccgtaatcccaacactttggaaggccaaggcgggtggatcacccaaggtcaggagtttgagaccagcctggccaacatggtgaaaccctccctctactaaaaatacaaaaattagttgggggtggtggtgggtgcctgtaatcccagctactagggaggctgaggcaggagaatcgcttgaacccaggagttagaaggtgcagtgagccaagatcatgtcattgcactctagcctgggcaacaaagagaaaactccatctcaaaaaaaaaaaaaaattcaaaacatgataatacatattgtagatgtgtgaggaaatactcaagtgccaaataccattacaagcagaatgagaagtttttgtcccataggatgttttcttcagggaatgtgatgaaaaatagaacatgctttaaccttccaaccttcaaacttgtggttagctccttctattcccacccagttaggaggcttttgcttcctgtaagattgttgaaaacactaagttttcctatatcaagttgggtacattctgtttaatctaggaaaatcagtgtaacatgctcttaatttgattaaataaagatgtgcccaaggcgagcgatgcagggctgaccttatatagccagaaggggcattggggatgaattagcaccatgcctactttgagaaatgaagaaaccaagaattggaaagggtaggcaattctccaaagttgtatgtatagtgacaactttggaaattaaagttgggagttgggaggagttgggattaaaattcagttgtcttgactccaagtccaatgtttcttacgctatatcacatgccatctggtttttcacagtgcaaaacacacacacacacacacaaacacacacactctttagctaatgctactgaaagtgttgctagtctcctctctgaatattgcagaaaggatagttatgtgttcaactctg

SEQ ID NO: 35 - DNA, 2967 bp, Homo sapiens
atgccggggggcaagagagggctggtggcaccgcagaacacatttttggagaacatcgtcaggcgctccagtgaatcaagtttcttactgggaaatgcccagattgtggattggcctgtagtttatagtaatgacggtttttgtaaactctctggatatcatcgagctgacgtcatgcagaaaagcagcacttgcagttttatgtatggggaattgactgacaagaagaccattgagaaagtcaggcaaacttttgacaactacgaatcaaactgctttgaagttcttctgtacaagaaaaacagaacccctgtttggttttatatgcaaattgcaccaataagaaatgaacatgaaaaggtggtcttgttcctgtgtactttcaaggatattacgttgttcaaacagccaatagaggatgattcaacaaaaggttggacgaaatttgcccgattgacacgggctttgacaaatagccgaagtgttttgcagcagctcacgccaatgaataaaacagaggtggtccataaacattcaagactagctgaagttcttcagctgggatcagatatccttcctcagtataaacaagaagcgccaaagacgccaccacacattattttacattattgtgcttttaaaactacttgggattgggtgattttaattcttaccttctacaccgccattatggttccttataatgtttccttcaaaacaaagcagaacaacatagcctggctggtactggatagtgtggtggacgttatttttctggttgacatcgttttaaattttcacacgactttcgtggggcccggtggagaggtcatttctgaccctaagctcataaggatgaactatctgaaaacttggtttgtgatcgatctgctgtcttgtttaccttatgacatcatcaatgcctttgaaaatgtggatgagggaatcagcagtctcttcagttctttaaaagtggtgcgtctcttacgactgggccgtgtggctaggaaactggaccattacctagaatatggagcagcagtcctcgtgctcctggtgtgtgtgtttggactggtggcccactggctggcctgcatatggtatagcatcggagactacgaggtcattgatgaagtcactaacaccatccaaatagacagttggctctaccagctggctttgagcattgggactccatatcgctacaataccagtgctgggatatgggaaggaggacccagcaaggattcattgtacgtgtcctctctctactttaccatgacaagccttacaaccataggatttggaaacatagctcctaccacagatgtggagaagatgttttcggtggctatgatgatggttggctctcttctttatgcaactatttttggaaatgttacaacaattttccagcaaatgtatgccaacaccaaccgataccatgagatgctgaataatgtacgggacttcctaaaactctatcaggtcccaaaaggccttagtgagcgagtcatggattatattgtctcaacatggtccatgtcaaaaggcattgatacagaaaaggtcctctccatctgtcccaaggacatgagagctgatatctgtgttcatctaaaccggaaggtttttaatgaacatcctgcttttcgattggccagcgatgggtgtctgcgcgccttggcggtagagttccaaaccattcactgtgctcccggggacctcatttaccatgctggagaaagtgtggatgccctctgctttgtggtgtcaggatccttggaagtcatccaggatgatgaggtggtggctattttagggaagggtgatgtatttggagacatcttctggaaggaaaccacccttgcccatgcatgtgcgaacgtccgggcactgacgtactgtgacctacacatcatcaagcgggaagccttgctcaaagtcctggacttttatacagcttttgcaaactccttctcaaggaatctcactcttacttgcaatctgaggaaacggatcatctttcgtaagatcagtgatgtgaagaaagaggaggaggagcgcctccggcagaagaatgaggtgaccctcagcattcccgtggaccacccagtcagaaagctcttccagaagttcaagcagcagaaggagctgcggaatcagggctcaacacagggtgaccctgagaggaaccaactccaggtagagagccgctccttacagaatggagcctccatcaccggaaccagcgtggtgactgtgtcacagattactcccattcagacgtctctggcctatgtgaaaaccagtgaatcccttaagcagaacaaccgtgatgccatggaactcaagcccaacggcggtgctgaccaaaaatgtctcaaagtcaacagcccaataagaatgaagaatggaaatggaaaagggtggctgcgactcaagaataatatgggagcccatgaggagaaaaaggaagactggaataatgtcactaaagctgagtcaatggggctattgtctgaggaccccaagagcagtgattcagagaacagtgtgaccaaaaacccactaaggaaaacagattcttgtgacagtggaattacaaaaagtgaccttcgtttggataaggctggggaggcccgaagtccgctagagcacagtcccatccaggctgatgccaagcaccccttttatcccatccccgagcaggccttacagaccacactgcaggaagtcaaacacgaactcaaagaggacatccagctgctcagctgcagaatgactgccctagaaaagcaggtggcagaaattttaaaaatactgtcggaaaaaagcgtaccccaggcctcatctcccaaatcccaaatgccactccaagtacccccccagataccatgtcaggatatttttagtgtctcaaggcctgaatcacctgaatctgacaaagatgaaatccacttttaa

SEQ ID NO: 36 - protein, 988 aa, Homo sapiens
MPGGKRGLVAPQNTFLENIVRRSSESSFLLGNAQIVDWPVVYSNDGFCKLSGYHRADVMQKSSTCSFMYGELTDKKTIEKVRQTFDNYESNCFEVLLYKKNRTPVWFYMQIAPIRNEHEKVVLFLCTFKDITLFKQPIEDDSTKGWTKFARLTRALTNSRSVLQQLTPMNKTEVVHKHSRLAEVLQLGSDILPQYKQEAPKTPPHIILHYCAFKTTWDWVILILTFYTAIMVPYNVSFKTKQNNIAWLVLDSVVDVIFLVDIVLNFHTTFVGPGGEVISDPKLIRMNYLKTWFVIDLLSCLPYDIINAFENVDEGISSLFSSLKVVRLLRLGRVARKLDHYLEYGAAVLVLLVCVFGLVAHWLACIWYSIGDYEVIDEVTNTIQIDSWLYQLALSIGTPYRYNTSAGIWEGGPSKDSLYVSSLYFTMTSLTTIGFGNIAPTTDVEKMFSVAMMMVGSLLYATIFGNVTTIFQQMYANTNRYHEMLNNVRDFLKLYQVPKGLSERVMDYIVSTWSMSKGIDTEKVLSICPKDMRADICVHLNRKVFNEHPAFRLASDGCLRALAVEFQTIHCAPGDLIYHAGESVDALCFVVSGSLEVIQDDEVVAILGKGDVFGDIFWKETTLAHACANVRALTYCDLHIIKREALLKVLDFYTAFANSFSRNLTLTCNLRKRIIFRKISDVKKEEEERLRQKNEVTLSIPVDHPVRKLFQKFKQQKELRNQGSTQGDPERNQLQVESRSLQNGASITGTSVVTVSQITPIQTSLAYVKTSESLKQNNRDAMELKPNGGADQKCLKVNSPIRMKNGNGKGWLRLKNNMGAHEEKKEDWNNVTKAESMGLLSEDPKSSDSENSVTKNPLRKTDSCDSGITKSDLRLDKAGEARSPLEHSPIQADAKHPFYPIPEQALQTTLQEVKHELKEDIQLLSCRMTALEKQVAEILKILSEKSVPQASSPKSQMPLQVPPQIPCQDIFSVSRPESPESDKDEIHF

SEQ ID NO: 37 - DNA, 73038 bp, Mus musculus
gaatctgttccacacagctgctatgtctaggaggtagcttagattgatcttcatggccggcccctgtctcatggtcttcatttctgaactttctcaggaccaggcctgtgcttttatggttctggttctggagatgtcttgattctgcagttatcttcaaggaaacatttgccaagtggtcatgtagggtgtaggcatcccagtcccttggactgacccttcctttttttttttcgagacagggattctctctatagccctggctgtcctggaactcactttgtagaccaggctggcctcgaactcagaaatctgcctgcctctgcctcctgtgctgggattaaaggcgtgcaccaccacgccagcccctgttctttttaaaattaagttcatgagctggagagatgactcagtagctaagagcactgactgctgttccagaggtcctgagttcaattcctagcaaccacatggtggcttacaaccaactgtaatggaatctgatgccctcttctggtgtgtttgaagagagcgacagtgtactcacatacataaaataagtatataaatctttaaaacaaacacaaacaaaacaaaaagcacctgttgttcttgcagaggacttgggtttagtacccagcatccacatggtagttcactaccatctataactccaattccatgagatctaaagcgctcttctgacctctgaggatactaggtacatacacacacacacacacacatacacacacacacacatacacacacacacacacacacacacacacacacacggtgcacaaacatgcatgcaaagacaaaaacaaaaaacagaaaccacaacagaacaacgataacaacaacaaaaaattaatttcacttacttgataacctagaacacaaacttagagagggagagagggagaaagacagaaacagagaaaaagggggtaggagagatattgttttttaagtcagggtgacatatctatctcctcaaacatacaccacacctatggtaaaacattcataatcataacacagggtacagtagaactacatgtacccgttagctgaaccaaccgctacttggtgatctctctccccctcccttcccctcccctcccctcccctctaagtattgaactcacagcctcatgcatctatatatgcaagtgctctgaatacatcagccctgaccctgcttctctctatatacacacacacacacacacacacacacacacacacacacacatatacacacatatatataatacgtatttgtctctggactcagccatatcctggtattgtacatctatggactgtgcaatttgtcttgtagaaaggatcgagcttgccttggggtggggggaggctgacctggtatactgagtttagagttgtgagggccatgtgatgttgcagtccttcaatagcaatcaaagctcaccctcaaaatgtatttttaactcatgccccgaggaactagaaattaatgacttgcattatttacacaaagacgttcactcttgatggcagcaattttttaacattatgtttgtctaactctgtcatgagacataagtcaaatatttaaggtttgaacagggtgattaagccaagagagttatctaagtcagcaactgctaggcaaacatatttctccttctctcttcttgtaatgaaatagaagagaactggttggggggggggaggtagattttaatctggtctttaaagcaaaattcaaactttaaaatgtgagaagatgaaaaactgagtcagtttggtaagaatttaccacccttagcaatgtacacgcaggtcctctggcacacagagaaatgctcagaggttgtgttcctcagcctattggaaagggtccacctaccatgcctcagtctccatccgccctgtggtcttattgaacggctgtccctaagggtgtaaaacgtggctggaaggttttactcaattatctggaagtccttctgggatccaacagtgaaccctctggatttttgaggcgctggcattattttccagcagggctgcactgcagatatccggccccaggcttcaagggccttgcattggtattcaggcccctccagtgggctgagggtcctgcagtagtttctgctctgcttgctgaggtgtctttcggtgggtgcagcaacaacatcccccagggtctgtaagactgccatctccacctgcctgcaaccaaagaatgacctttggcacagacctttgtcaccttgctgaagctggtttaataataggacagagatcatggtgggaggtagcgtgcttatctctgggcagtgagtggcatctagttactaaaggactgtgctgtattctgtctggccagtgctgcacacgttacagaaaatgcttggtttaggcagggcaggaagtcatcccttagccccagcagacagaccccaccatgctgtgtctcccttttcccagataggttgtatgtgaatgtgtgcttctctctatgaaagcagtggtgacccttaaccacttttattctgcttcgacatatactccaggaactgtgctgttcgttccatatagggaaaacttaagaaaaattattcacagtagtgaagaggtgggaagaactcgagtgcccatcaggtaagcgagacgtggtccatcccatggtgcaatgttactggctctgaaaaggaaggacactctgatataagctgcatcatggatgggcctccaggacattgtgccagctttacgaaaggacagaagtgcatcttcagtcacgtggtgtttctagagtcactgttatcatagaccaggaagaatggtggggtcaggggttggggagctgctgtttcttggggacagagctgtagtttgagaagagaaggtgctggtattggtgatgctgtaaagctgtgggaagcatttcaggccaaagtatgatgttaacatttattctattggtatttttttctttgcaattaaacagaataaattattttaaaaagaaaaaaaatggtggtgcatgcctgtaatcccagcacttgggagtcagaagcaggaagctgaagtaatttcagaagtctgcatggtctacatattgagtgccaggccaatgatgctattcattgagatcctgtctcaaaataagcaagcaagcaagcaaacaaacaaacaaccccccccatgaaaaccccctcaaactaggaaatagcagctaaatgaccaggttaatttttttccttttttattcattaacatatttgagtagtgtgggggcagggatattccatggcatgcatgtagaggtcagagggcaactttgtggactttattctctcctacctttgctcgggttggaggatcaaactctggcttgagtagcaagtgcctttaccaaccaactaagcaatcctgccaactctaattagaagttcttaacaatcacccacgaggtgccagcaacctgtggacagtgacctgtggccaactgttgttagtgtgacatgtgacaactcaatggccacagttactctgcaaggagggattttcaacttggatagatatcagtcctgattctgacactgaatgggttcatgaatcttacctccaaagtctccttgaccttgaccagcccacagagggaggggactggcttggtcaaagggtcagcttggcctgatgttcagtcaaactggaaggagaatgggttagtctatgaagcttgaatgtaagaaacactgagtctagagcatgcaggaatgggcactatgtgggaagagctggctctatctctgtagactgagacagaactcctactgtgtgcacagccacagctgtgatgccatctgggagctgtgacttaggagtggactgttgggctgaggaggttggtatgggactcaccctgatattcataagccacatttatcttctaggcattccaccacctacacaaatcactggatgccagcatgagcatctattctgaggccaggatgtgcacataaccacctcttcccatcagaatcttctcagttcctaagggcagctcaggcatgtgtcccattgggcctgggcagggcactggtgggcagaggcttcctggcccttccatccattccaggctcctagaacttgtttccttgtcctgaccctgccctccttcttgagcaagtgacttggccaccgtggaactcaaaaaaaggcattatgttattattgtatctatagatgttgtcttcttttccagggttatttgaggctatgaacaaaaagggcttagggtgtgtattagtcagggttctcaagaggagcagaacaaatatatgtatatattacaggcacacataccacacaccccagtgtaattaaagagcttcaagtgttcctgggataaattcagtgctgggctgctgtcctgctgagagagaaagcactgaccttgaatttaggcctcctccctacccagtgtggttgtagacattgttagctctatagccacattggggttgatagggaagataaggctgggactcttcctggccttggtgcaggctggccaccttggagccggatcattatctaggaattcagcttctagaaattcatcccttggggccaggcacctttgtaatggactgggggccagataagtttttcttttcttttcttttcttttcttttcttttcttttcttttctttttctttttctttttctttttctttttctttctttctttttttaattctttgtcagctttgttatttaacaaacatttgctggcttgcctctttcttttgatatgtcagaaataaccctgttatctccttgtcaagtaagtctggaacttgcagactagcaagcagtcgctttttgtgcttgggcatggtgcagggccctggattaggtggttctgaaatctgttagaacaaaaagcacagacttgggcgttgaggttagaaactggaagaatagttcttttcttatttatttattttatgtgtatgagtacactgtagctgtacagatggttgtgagcctttatctggctgttgggaattgaatttaggacctctgctcgctccagccaaccccacttgctctggcccaaagatttatttattattatgaataagtacactatagctgtcttcagacactccagaagagggcatcagatctcattatgggtggttatgagccaccaagtggtttctgggtctgagttcaaactcaggaccttcggaagagcagtcagtgctcttacccgctgagccatctcacccgcccagttctatactttttaaaggctgactcgacttccattttcttcctgagggcagctcaagcagagcgaggcccacttctacagtctgaattctgtacatacaacccctgttcccgccagatcaggtcaaattacatgaccatctcctgcactggatgtgtcttccatatagtcctcaggtctggggtttccatttcaaacctcaggtggacaaaattgcaagcacctcctttaaccttcagcaaggtcacaagggcagcacctattaacctgtgtggcaatggctccaattttcaagactgtggatgtgctggggaactctaacatttccatgatctgagcactcagtcctctggtctctgttgagctggtgtttctggtccctgctgtacagtgtgtagaggtggctgcaggttatgcatgcccccgacagcctgggaactgggtttgctacaacagggtggaactatggcttggagcagtctcttgcatgtgcctataggtgcctgcccatgcgtgatgtccctggtggagcagctgtttagtctttcccgcttttctattgctctttgtagcatgcacccgtgtacagtggctgtcatgtgcactgggctcccttcttcacccatgctacgggggaacagaaatgtgcagattttcatggagaatactttttttcccccagtttatcctgggagatgattacatttggaggtcacaaagggatgctgaaggccaatttgcacttggcagctgctgctgctgacaaacactgcaagctaggtttctttatcagcctctggaggccacataagggatctcctgcccagctgggctcccatagcttgagaacatctgaacagcgaattagacatgccagtccctacagctgagccgatggccctgagctgatagcagtgatgagcagtgcaatctgagatggtgaccagacagtggcattgaatggccattttgggtgacactctgtgcataccattggtctaagtggaccatattttgcatgaagaaagaatagcattgtggagctggttgcctggaggcagatggaccttaccagagcccaaggttacccctcacagaacagtactaggtggtcccttcctgaccattgctggaataatgtgcattggggaagtctatatgaagcaggctatggccttggtctatcttgatggtggcctcccatcaagaagcattcagcttaggctaaccctcagatgccagggcctatggttgtgggtgacaaagcctagaggcaacaggaagttcctttgtgcctacgactatgtgcatcaaagccctggacctttaaaagacaagcagtcacagctaggagtaggcgttgctggtgtgtcttggttccttgaagctaacagcttgaggtggataataccatataggagagacacatctctacctgtactgtaccgatggtctcagctgtagctgaatatcagtgcttcattaggcctagatggtgcctgtgagcaagggtagacctctgaggctggggaagaaggtgacaagagagccaggcctttgcatcttatttcttgagtggcttaaaagcacttcagagggctggagagatggctcagcagttaagagcacgggctgttcctccagaggtcctgagttcaattcccagcaatcacatggtggctcacaaccatttgtaatgggctgtctgaagacagcgactgtgtacccacatacattaaataaaaaatttttttttaaagaaagctcttcgggggctggagagatggctcagcggttaagagcgccgactgctcttctgaaggtcgtgagttcaaatcccatcaaccacatgatggctcataaccatccgtaatgagatctgatgccctcttctggggtgtctgaagacagctacagtgtacttacgtataataaataaataatattaaaaaaaaaaaaaagaaagctcttcagaggtactggggagagggcctggttgcaagtgttttactgaatcctgtaactcatgtagcatttgtaatcctagcactactgggagatggtgggtagagacaggtgacttcttggaagcttggtggcagttagactaggctctgtgccaagagtgccaaactatcttgaacaaaaggaagaaggtgcacagcacaagccagcacacacacacacacacacacacacacacacacacacacacatgctcacacatcacacttggagagggaggtagggagggggcacaatggaccaagtgatgcacatctcattgcagcttgagaaattttacagtctagtgctcattgaataacatgttctcagagtttcccagtctctaacctctgcatgcgtggtctcatgtcaagaaaaatgtagtttcataggttgagtatttatgcatcagattttggggtcctgtctggagcaggtataaagtacagtttcattccgtttttggtaatccttggagtcagcagaacatcacatccttcacatgtgtagggaggtgtggtagctgatgtactgcctgtccactggttctgtgcgcgctgcttactttctttcaagttaaaatacctggtgcgacattggtcctgaggctctccatactgcgctgatggaaaccttgcatctcaactttgtggggattaaaacattcccataggctactctgccctgttccatgggctcttccttctctaagtcaccaagctcacagggcaccccctccccactcaagctcccagtggacctgagtgtattgacaataatcttccttagcttcaccgggtacagcgttcagtgttgtctgagttcccagcctgtggatatcatgccacagtaatagaccttgctggtgtgcagtcagccagaagaaatggggctgagagacaggcacatttgtaaaaaggactatagctgggcatgtctgtacatgtatgtaatcccagtacttgggaggtagaggcaggaggatcaagaattcagtcatctttggctctatatcaaaatttgaggccaacctgggctatgagaccctgtctttaaaaacaatagagggggagggcagggaaagtgactgggggctatggctttttgtaagatgtgttgggtatgataccagggtctctgaaatggtaggaaccctctcctactgagcctaagtttcaagtgtttgccagtctggagggtgttctgaggaggagaaggtggtcactatttccacctaaggtccagctgagcaggggaaacaggtgatagcccttccctatttgctatggatagctcctggagggaggtggggtgacagtatgatctgagcaagttgtgccctatcccccataggagctggaaactgtataagaggccattcctgagtggcccatgtttcccccaagctccttcctggcagagggcagaaagccggccatactgggtacagttgggctttcccagaaatggcttttctgagttagtttcaaaatgttttattctcatcggtaggatatgcaaatccctttaactcccgtatctcagcctatcccagcggtgtcactggtccggcagctgccttccagtccgtgtccctgattgaactgggccaggccacctggctggccctgttccacaggttgtgagcagctctaggcatatcacctgtgtttctctttgaccatctaaaacagttttgggtgacttgttgcacctgggggctatggctttttgtaggatgtgttgggtatgataccctaacattttagttccattctctcttgaagaatatttgtttccagtttttcaccagtctttcattgaaaatgcacaaggtcctgaaattccggaagatctgtgacttccaccatgtggtgttctggaactctttgctcggatcttcctgtcactactaccttcggaatttacctgcccttggagccaaagggaggaactgccaccctccaagtttgggctgcaagggttccccaggttggatcgtggaacactcctgccagcaggtacaaagagtctcgggcttggctggctaggcctgtcccagagcccagtgaccttcttgggtgggattacttaaccccagggtgcacagcgtcccctgattggccattactccctggcctaggttagcagcctgacctggtcagggcctgggcccagatcaccagcgttggtggagatgaggagctgcaaactgagagaaaggagccatgacctgtggggtggtgggagaagagccccacgggagtttggaatgagaatggaagaactgaagctgtggaagtggtgaatgacaggctcttggagggcgggagggctctgagcctgtgttgtgagtaggaatgggaggaggacgcggtcctgcggggaggaactggtgtctcttatgctgagggaggtctgcatctgtgggcagttcattcagcggtggcctctaggggttgggtttgtgcgtaccgagtccttgagggtacagggctctggcggggcaaccctgagactgtggctacaggggcggagttttaaggggtggagcgtctggtgggcgtggtcgttccggaagcctcccgaccccgccccgggcaaacttttcccgagccgtgggggcgggcaggtgaggtcacgtggcgggcaagggcgggccgggcggaccccgcccctacgccggagtccggcggctgctctggagcagcgtgtggctgcgagggacagcagagtctaacggagccatgcccacgaactttacggtggtgccggtggaggcgcgcgccgacggcgccggggacgaagctgctgagcgcacggaagaacccgagtctcccgagagcgtggatcaaacctcccctacgccgggtgagcttggccgcacctgcaacgggacaaaggcagaggctgggcccttctgctgccgctgggccgctctgactcgttggttggcggcggcccgcgcggcgcgtagcggggcgatgggaaggggtcagaagggccaactggtatctgcctggctcggaggagtgacccgagaccgggagaggattcttgggctggtggtttgttggccctgttcgttcagtttcttgaattcagtgctctgctccttgcttgaggcgcccgctgcatatctccctgttggcctgactcagtcagccctgggggcgcggttcccacctctctgcatggcctgactggagcatcgaggctggagcaccggaaactacttggtttggcaactctgacgggactagggaggagttgcagagctactggaggtacctatggaacgggaaggcccaggtgtctaggtggtacctgggagagctggaggtacagacccctggatgggtgatctcactgacggacagcttcctctgggcaagctttcttttgctccaggatggcccagtgtggtcaaccgataaatccgactgggatcccagatctgcctccactgaccttggaccagccaaacttcccttgggatcttagaggaaggacagaggcccgtgtaagcctggggagggggctgcgcactctgagcgcgggcttctctttgctgctctttgttccttggatccggagctctctggcactttcactttccacggggtggtgatgggcctgggaatctctctccatcctacttctcagcaccctctctgctgatggcaagtcaccttgaactgactgcttcctccctgttccaactctcttctagacctagatcctaataggccctaataggtgagaggacccagcacagacctacagctgcagctggccttgcacctaccccaagttttacattggaggtttgggctccaggttctgggtctggaaggaaaagagggtgcaatcctcaagagatggacggatcttttatatatggcatcagagcttttgctgctcagaatacaggcagtagaaactgcgcttcctctagtccatacttttaggagcctgcattcatagactaggagtgctggcccggaagtggcctagcccaggtccgcagcctgcctgtctcactctgtgaccctctccatgagatgctggactgtccagctttctctgcacagacaaagcattctatgtctcagggctgctgcctggctaaacacataaaatcagttgtaaggtggaggcagaatctagaagtccaaactcagtgtccatcagccagggaagtgtgaagagggtcagcagcatcacagagacccccagagtagagcccccaaagcccttcctggtgcccagtggcctgagacagacaattctacaattctgcagatgtcctatatgattagtgtctcaggcagaggtaattttccttttgattcatttcttgttccctacagtatcaggactctcaagtggtgcctgacgccagtcagggctgaggattcagcttctaggaagggaagtgactgtctggcttcctgaaatttgcactgttaacaagaggacaagcatgcacttttaattccttagttgtcttgagacgaggtcttatgcggccttgaattcaatctgtagctgaagatgaccttgaactcctgactggagcctctagcaactgcttgtattacagtagtgtgttgccacacccacttttgttatgttttgttttgttttttaaatgaattgctggtcaggattgaacctgggcttggtactttgctaggcaaatgctctaccaactgagccacatcctgagtatgtgtgttttaatgatcctttcacgctccaagctgaacttgagtaacttggctgggcttatatagaacttgcattttggtgctctgtatacttaatatttctataatgataattttggaaacttcagccgctgtaccatgacagggatgactttgttgtagtcacagtctgctggggtttgtcctgaactctttgcttttttaaaaatttttagttattatttatttttgtttgttttcaatttttattattttacttatttacattccagtcattggtctcccactccacctctcagtaccccctcccacagttccttatcccacttctctaacctcttgcctctgagagggtactcccctccactccccaggccattccctttcttggggcctcaagtctcttgaagattaagggagagctctgctatatttgtgccaggggcctctgactggcctgtgtatgatcctggttggtggctcagtctctggggggtaagttgagattgctggtcttcctatggggttactctctccttcagcgttttcaatctttcccccaattcaaccataagggtctccgacttcagttcaatgcttgggtttaagtatctgcttctgtctcagtcagctgctggtagggcctcttgggggacagccatgccaggctcccgtctgtaagcacatcataacatcaggaatagtgtcaggccttaatgcccccttatgagatggatcccaagttgggctgctcattggaccatcttgtcctcatttctaacaggagcgccagataccagccaggagtagggaagggatctcatacttagttttttggtgggaaagtcctgtagaggcaggatgaaggcttttcaaaggttgcctgtgtggatctacaccatgtgtgtgggcatcatttgtgtggtcatgtatgtgggtatatgtgtgggctacaggccagagccaacttgcctggtcacaggagtcatctttgaacactgcagccctgccctgtcttgccccctattcagatcccttggtagttcttggaagtaccattttctagagatgtctcctgcgtgttgcttgtgatggagtgagtttggagacctcattaggtctacacagatccaggctgcagttgaactggaccctcataggctatccagcttacacacagccagtgtctttggaaccagaatgtgggtctagcatcggacccacattctatctagtctgcctagggatttcaagctgtgaacacatggctatagggaacccacagccctcttgtgcctggtacagattctattttaccagggatacaggtagtgtgagggcaggaagtgaacctttctttgggccataaccaggctgcatcttaaccttgacctctcctggggctgagacccaggcagggcctgggctggcagttgagtggcagaaatgcagttggttctatattgtagatagtgtatgtctacttataaagtccttggccctgtgtgaggagctagcctcccaacacatatactaaaaatcgattgggcaaggagagagcaggcgtggtgagtgtgacatccacattttgcttcctcagatttttttttagcttccgtttccccttctctcagggcccttcccttaagcacgtgttctagaaggacttgggattgtgcgtctggacaggggacatgtccctcagcctcttctgcaggacagatgttggacctagattttatttattgtgagattcctctagaagtggaaaggatgtgtgaattcttggtgttcggttggaattgttttttatcggtggagaggacactgcttgcggccagggtccttcttatcagagttgggcatcattagatcttaagacctatagggaacctgtcaggaaacgtgcagggtgaggtgccccaggcctgggaaaagaaattccacaatggagtctttctgggtttactgcaaggtaatccctacctgggggccttccactccaggtcagatctgacttctgtgcaggctcccttctagtctgcttgcaggtcccccttcggattccatccacgtggtattatgctctgtagctgacttcatgttggtcacctgggaacttctcttgttagaggtgaccctgtctcctgatacactagcggagacagtcctgagttacctttgtcctgtctggaggttgagtggaggctgggcagtggatagtgttctgtgccctcagggctgctgttgacaggggtcacagttaggacataacgattcagagaggtgcacagttaggaagaggactgagcaggagacctgaggccctgctctgctaggctaggacgagaactaaaagcctcacctggccttttcagaaaagggtgtgtcacactggtgctggagatccacacgggggctggtgggccttctcgctgtcttgcctggagtccttgaaggtggcgctgaatgctgaatgtgtgagcacggaccctaagacctttgggagttcttcatggtggggttgagggtcatttacagggatagcagcacctgatgtgtgtggaatccaagtaagagggaaacatgcacagtttcccttttcaaaccaaagaaagtgctgggttatttattgctcagtggtagggtgcttgccttggggccatggctttgattaccagtgttcatattgtaggacaaagctgcacagaatagctggaggaaacaaaggatcccacagatcaggtgactgctggcaacccaggtggctgtgggctgcgccccacctcttctcaactgtatccgtgcaacaggcccttcccttaggaatcagaggtacaggtgtcagcaccagtcatcttgctaggcccatgctcttgtgggtgagcatgcatatatgcattgtgtgaacacgggagggttaggggagctgcttcctccccaatggaaggtcacatggtattaggcattgccatttcctatggccagactgcctagcaagtggcttggtatcactggcacggccttcaggactgatggggcatttgaatgttctctttacccagtcattgccttttttttttttttaaattaatctgagggtcgtcgcccagccttcctgaccactgtgctgggtggatgtcttaactgctgcaaagggttgaagagacagctcctgtgatgaaaggccctacctaatgccatgcgcttaaggccaagcagacttgggctgtctgggcactgggcatcgtagtcacattgatctagaaagatcacctggtaaggcggtgtctctcttgggcctggtgtatctgtgacctggcacaataggaacctaatatgatatatagggcaatatgtgatgaagagtgagttctgtggggctgagtgtcaaagggacataggtaggatgttgatctgttgcctgctggagcagtgggagagtgggcatgtgttccttgggacatgggagcaaagaagaatcccagtagggtgttcagggatggtacgggccactcaccagtggtggcagagacaaactgatggcttccagaaagtcagccttgtagtctttaggagatttgtgaagggcctaggctgaggattaacttagcttttgatggtggtgactcagggtagccatggggtactgaggtggccttggggaattccttaggaaagacggccttgagcctggcaggtggagtattatgtgcaagtgtgtgcatgccacagtggctgaggcaactctatcagagcagggctaccatggattctagtatgaagaggtttcccttaggaagcagctagcaacgagtagcattgtgtgagctgctgggctgtgtgttcttagcatgcattatacatatatatataaaatcttgtttgtttgtgtgggtgtggtactgtgaagttgcctgctgttcctagtacaccacaggtgttataggcatagcctaagagctgctttgggtgttggactctggctgaggagaagcagacgtaggcagcactgattggatttttgctgtgcaccccagaaaacatctcagacctaagcattcaccttcaaaaccatttgggagctgtctcactctgctgcctgcccggcaatgaattggggagagaaaggtcaaggagtaaagatgtatggccgccaccttagcagacaaggtctgacctgggagtgtcatggcaggcccatgctccagtgttgaggggcagagacattgggccaggcctgctgccttctggtgcttgagacaatggctccctcttgctagctgtacagttgggtacagcgtggggtcagacacccagcagtatagcggagagtgcagctggctagacagcctgtagttcctgttgctcttcagacattaagccctgcctttgcaagcctagagggcaaagtttggtgtacagtgttaagtattaaccactgttcccaagctcccggccctggccaagtggctgggtggagttttctgtcatttggagtgatagctacacaggaggcagccactggagtgtatgaatcctgctggactggacttcagagggaagactcctctatgtagaggcaaggaagccctgtgtagacagaagtggatgacactcaggagtagttagtcagtcttgactgtggtggcttgaggtgccaggtccaaatgggtgctgactttgagtccccactacggatcagtcataaagtttattaccttcctattatgcaaaggagagaaactgccctttagggtaggatctgggctgtgcagataagccttccatttctgttcaatggcaggcccatcttggtgatgagactttcagctgtctgttcatgtgtatgtccatggtagccaggccacaagcaagtataggtttggggcttctgagtgtgtaattgtgttgtccctggatctgagttgcttagtaagcatgtcagatgtcccctttggctgcaggcgtctatagaatcaagtctctcttaagtaagggcctgcgctgctggtgctggtgtcttagggtctaggatacctataggtgagaggcaagactggcgccaccagccagttgctggggtacctaggctgtttcctccttgggtaggcttgttttaagaaaaccattgggttaggtgtagaggtgggctggtgtattgggatatgagctggcagtgccacttcttgatctgatattctcagatccactcatgtgttttatcacagccccatgagggaaggatctgaggaattctagggaagaaaagggtagcagtccagatctgtgttttcatagttagacatgttttcacttccttgctagttcaatgcaggggcttgggtgtcatcatctctggccttctggtggcctgagctcctgtctttgatgtttgcttacgttagagtgacccatttctgaagatggcaaatgacttttgagcatttctcagtgcctcagtttttctcaccagggcctcatctcttacaaaggcagccgtgacctttcatctttaggcccatccttctgtgggtctctggcgccagcaggctgggcctggctttctcagaggctcaggaaacatctgatggccactggggaggactgagtgctctggaggccagaggagggagtgccagtggctcttgggtttcccttttcatttaatggagggacttgaccacagcccagacaagtatgtaactgaagctgcccctgggaggatctgattggtgtcctgtggggctgatgtagggggtgcacaggctctatcctcctgctttttttttttttgagacagggcttctctgtatagccctggctgtcttggaactcacgctgtagaccaggctggcctcgaactcagaaattcacctgcctctgcctcccaagtgctgggatcaaaggtgtgtgccaccatgcctggccttcctctgctttgttgtggacctctatcatctgggcgtttggggaacagcatgccctttctcagctccgatgatgctctgctctctggagaagagagacaggatcatggctagcaccagcgtgtgacatgggatgggagactgaggtcactgagactgtcttcctgaagggtatacctttttagattaaaagtcccagactgcttaggtagcttctacggctgtcatcccatagatgactaatgtcctgaggtttgccccccacaatggaacagtctggagctctaatttcttttggccttgtgcggggagtatgttgccatgtagatgaacagtgggcatgtttctatgtacacgtgtgcatggtatgcacacataggtgcagtgtacatataattatggtatatactaatgaatgggtgaaaacatgtatatgtgtgagtgtgcatgagtaaacatgtgtaagcatatgccatatgtatgcatgtagaataatgttgtgtgtactgtgtccgaaatcgtgtaattgtagtgtgtcagcttgtctgaattagctgcttctttgcatagaatctcttggatgtcaggtggtaaggctccactctgcttctctgggttttagctggtttgaacatagatttaaaagcctattggaggagatgcctacccagactgctttgtaagaggacataaggaataccagtgacctttatggtcacgtcttggggacagtcctactaatcctagggtaggaggtagaacaggcttgccacatcgtttgggaagccttgctttactactctctgggccccccagacctttttactactgttcctctgagaatctttgcctttcaagctatgtgagacatggtgctactgagttaggctagggagagcaggagagtggacaactagttgtgcatttaggtactaaccaaggtttgcagggtttcctgccctcctaggcattaactttgctcacacacctggcttgacagtttctgcttaaacccagacctgttcccatggagccttgtggagagaagtggggctgcctgccactctggtgcagatattctcctgcctgtgcattagagccccacctgcagcccagcagcagtgcagccttgaagcaaagtgtattgctttgcaggaagaaggtggggttgggcctgagtgcagaggaaacactctaagccactaacttcaaaagttcccacactgaatcagagtgacagagaggccaagtcgggcctgaaagtcttgagcaggacttggaacaggtgggaaaggactgggcctgttccctgaaggacagagtggctctcgactggacctctctgtcctggaaacctgagatgggaggcaggggttagaggaatgtgcatggaaaatgctataagaagtaagtggccctcttacttctgtgggtggttcttggttctcaatatttcctttgttttctcttcagaacgcgttgttcattcagccagcagtttgctgttgaaagtggaaagctgtcagcctggggtcttgtcagtcagcctgtggctctctctcattaaccatgctctatcgtctgtccccctggcctggattttccaggttgctggattttcaggatgcgtgaaagttctaagaatctggagggcagtcaagagccggtgggcattcttttgagttttcagggccctgaactctgaaactcattctagcacaaaaccatttcacaatgcagccaccagggtagttttatggtggtggtcttgtctcggtgcaggccgtcctcaggaagccaaagagcaccttaatgttaccaggtgggacttcattttgttgtgggtgcttagtagccaggcctatgagctaaacaggttgcctacctcctcccccaggcctctgtacacaaactcagctcctctgtgacccatgccccatctccagtgttgctaagctgggtagactttccgcctacacttgatggcaggaaagggaggaggctgctggcctttgcagccagctctattggccagcctcctcaacctatcagggaatatggctctgagtccccggggttgctttctatccctcccttgagccatcgagggattagtagtaatgtcctggagtggagccctgcctgcctcaggaagaacaagggtgggagaaggctatgcctgggtcatgctgttaaggcctggctgcctgtgaatgggtctgggggcctgccaggttgtgcctggtttctccctactaagacaccactctgcagggagcaggctgggagtggggaatcaacttgctgccctggagcagatcctgggctgagggccagcggtggttctggcactgcttggctatgcctatgaagcttggctggatttcacaaatacctgatgcttatctagtggagaggttgtctcctcccatgcccaggaccctggccacctctgacctatgtgcacacctctcttacatagtcagaatctctgaagggactgggttcctaaagcttgaagcctttagttcctccttcagtgggactggagagactgcagctacaggaggaaactgcattttgtaacatgcttgctgaaaaggaataccgcatttgcatgctttagaggaatccattaagacatatttgaggggattggagagatggctcagcaggtaagaacactgactgttctttcagaggtcctgagttcaattcccaataaccacatatgtgaggggtctctaagtagaaggtgggtaggtgctggttggtctttgttaaaagtcagcaaatttgcatttccacaggtgagttgcatccaaacacaaccttgtttgtcacatgcaggtcacaaccaaccacagcattgtgactttctgggacattatgcttactattatctgtggttatccatacactttaaaatgcatcaggcttcagttggacatctatgaagcagggagagcctatatctagtgggcatctgtgaacaactgtccccaggctaacctagggctgtccccatgtaagatgacaaagtgaaaagccaaggtgtttctccaggttgaaacgcatcctgtagccttcatgacagaggtcagggttggcccaggtcccttgcagcttataacatgccttcccaagcatctgatgcacttgtaaggaaactccatggatctctgtgggcccagggccctggtgagttttcataggaggccttgcagtgggcttttcccctgtgaagaactgcagcctatgaggaaacacgggcttgtgggcagtgtttacagaactgccagcccttgtatggtggtaacagtggctaatcccctttacgtcatagacaggatgcccagacaacaccctgaccatctaggtcggtaacagggtgttacagcagatgggtcttaagtgggggttccaagggtggtaggttgttggggtggctgatcaggatctgggcctccctggtgccaggtaggaatgatacagtccgcctgaccttatggcagtattgtggagctgtgctgcggctagtccgcactaaagagttatgatgcttactctctctgcgactactgccatattccccggagggtctctgtccactgatgcctaggttctgaggggtttccttgtttgccctgcatgttctacttacatgtatgtctatgtaccatgagtgtcttgtgccaaaaagaagccacctagaactggtgttgcagttggttgtgactcaccttgtgggttttgggaattgaatactggtcctttgaaagagcagtcttagtgtctttgtcctgtcccaggagtcctcaggatatctagttgtccttgtaagagtttcttacacttactcatttctggtaacctgacatcatgggagtaaggttaggtcctggagagttctgtggggatcatttcacttcccgcctgggtctgggtctgggtctgggaggaagggtttaggggatgagtgcctgccctttatttagtataacattgggtctttcactgtcccaggattcagccctgttaacctgatcactggggacagttgtctgaggcccctctactcaatctcctctctaggtctctcccttatcgagttggctgctctatctccttcactgaattgtccacagtcagaccctttagcctttgggtctgacatttagccctttaatttctctttcgacaaatgacacaaggcgtggtcagctgatataccaccctctctggtttctgttcaggctggctgcccttggaacaatcctttgctgctgaggtatcagctggcagctagtaggtataacacagggagtaggccctggctgccaaatggggcagtgaaggattacggagtcactggctgctagagatgcctgagacctttatatatgcatctcaaaggcagatgtcagaagatagctgcatgtggcacaagataggcatggtaccttcagttgtatctttctaggagtctgtatggcttcccttggatttgaggttctttgatgtttctgtagttgattgttttatagttttatacatgatgttaccaatgcaggcaccagctctgctggaaggtttgctagaagtgcttgccttcatgaggaatctccatggtttgtggccccctctaatctaaaggagaattccctcagtactttagctcctctcttctgtatcccaagacctgtgggtctgtgggctcagaggctctggggtttgtagcagatacatgacagctcagccaagcagtctttgtctttctgttgtttccatgagtgaggcttgcagggaggagagggtacattcataagtcatttgttctattctagattttatggctgaagatccttacctgtcatttgttattgttgttttatttttgtgtttctgagacagggtttctctatatagttctagctgtcctgggactcaacacgtagaccaggccggcttcaatctcacaaaaatcaacctgctcctgagtgctgtgatggattaaaggcgtgggtcccagccatcagactctgccacatttcttaatgacaaaatcagccaggaaagatacactgtgaagcagaaaagatacactgtgaggcaggaaagataaacactgtgaggcaggaaagatacactgtgaggcaggaaagataaacactgtgaggcagggaagatactttgtgaggcagggaagatacactgtgaggcagggaagatacactgtgaggcagggaagatacactgtgaggcagggaagatacactgcgaggcagggaagatacactgtgaggcagggaagatacactgcgaggcagggaagatacactgcgaggcagggaagatatactgtgaggcagggaagatacactgtgaggcaggaaagatacactgtgaggcaggaaagatacactgtgaggcaggagagtggggagagctgaatgacttagtcacatctctagtccatcaccaactcttacagaacccaggtgtctccaagtagtgttctctgtttccccatcctgcatttatagggagcacttggctttgcatatttctaaatcttgctacatctcagctatggagggttctgggctctgcctgccccgtgacttctgagtgaaccctttctggttgttctgtcaccgagtaaatggcaggccattgctttttttttgtttgtttgttttttttttttttgtttttcgagacagggtttctctgtatagccctggctgtcctggaactcactttgtagaccaggctggcctcgaactcagaaatccgcctgcctctgcctcccgagtgctgggattaaaggcgtgcgccaccacgcccggctcttatggcaggccattgctaaccgagtgtgaaatagacaggtttttagaagtacttctgtaatgagaaaaatggatcgcttctggtccacaagtgtggaggcttatcagaaaagtttgtcttccttcctagggtggagaggttgccttgtggtctcgtgacctggccacctgatcttacccacaggtggagagagtcagtctgcctggcacctacctgcagagcactggtgcctagatttcctcccagctggtggagaggccatgtttaagtgcttggctggcagtgggtacttgaccttgtacccactcctcctcatgctatccatccctctgcctgcttggcagctgtgtactcagctgatctctgcccaagatgcttctagttgttgtgaatgtgtagtctgacacagagagacgccacctctggtgagcagctttgccttggagcttaacggctttcagctgcagtgactcctgagctctggctgtgagggtttggttgttgtgtgtgcttaaatcaaagttccctttgtgcagactgtaagtgtcaaatatcctctcaaaaatatgattcagaccttatttagatactgaagtaattagcagagatgtgaaaatcaacagtcatctagatgacaaaatggatcctggtgtgttcttttcatgaaagcatttctttctttctttctgtctgtctgtctgtctgtctgtctgtctatctatccatctataaactattaatctatctattctctaccttatatcacctatctatctatctatctctatcatccatctctctctaatgtgtatgagtatactgtcgatctcttcagacacaccagaagagggcatcagatcccattacagatggttgtgagccaccatgtggtttctgggaattgaactcaggacctctggaaaagcaatcagtgctcttaagtgctgagccatctctccagctcctgttttattcttaattatctctgtgactctgatggcattagaaaggaaggacctttagatgctttcgctttctcaatgccccgaggatgagtaccataaatacttcccatgtgtttggtttaggtgtgatcccatctgtgatgtaatttctttggatctgcccagccagagcttggactttgatgatgggtgtatctgttaaagaattagtgtaactgggctggggggggactagagagagtggttgattgtagacttacactgtctttagcacagcccccaactggaggaatgtactgaaattctgacgatttgttttactgtctttaaggtttgcatttgtgtgtgtgcaaatgtatgagtgtgtgtatatgtgtgtgtgcatgcagtgtatgtatgtgagtgcatgcatgtgtgtgtgcacgtgcatgtctgtatttctgtgttgtgcactcatacattactttgataagcgatgaaataaatgaaaagtcagatttgtacaagttgccacagtggatgacttactgtgagccaggttgaggctgtgtgtcatgtctaccccagtctccccagcatctgtttgtatccttacatttctttttaggtctggcagcccttgggcatcctgtacagtcgtcccactgaagagttgtttaaatgtcatctggtagacagcttcacaagtgtcttgccacctctccctgggagtgttggtcgggctatggagtgctgtttccttagatgagtggtcatcactatacctgtgcatctgggcaaagggtgaggaaaagtttgttgaccacactagctgtgactgctcagaacagcattgtggctgccctttgtgaaagacccaggcaggtgactcctaaactcaggctatgggtggaggctggaggtacggtttctgaagagcttttgcccttctgtgtctttccatgtagtcctcctccctggagactagtaacttgagctgagctggaggtgagcagcagagactttgttcaaggtcatgagcttgagttggctccatttgagcatctgagggagaatctgaaaccctgtctcctgaccctctggagggttgttgggctatgagtcacaccctggtcctctgtgtcctcagagctggtgacaccagagtgtgttgcatttgcatatgtttctttgtttgttgttgttgttttcaaaacagattctcactgtgcagctatggctggcctaaaacttgccatgtagaccaggctggctggcaactctcagaacttttatctgcctctacctcataattgctgggattaaaggtttgtgctatcacacctgacttctttaaacctgatattaacttatttcctgacatcagaaaatcataagaatacaaagaagtctctcctatgcttggcttcagctctctctgcttgggacattttttcccatgatgaaatattctttctctttcccttctcctgcatctgtctcttctcacacacatgtaaaggctgtgaggctcttttgggacctaccctctccaaaaaccacattttctttcagactctctatagcatttactaggtgagaggactactgttcacacagcaaagatcttatttgagtttcaccaggtcatatagcgtgtgacgtcaccataaaaagcctgctatcttggcttcattctggaattttcctgtgtgcctctgccttctgggaaggaggaactgcaggcttgtgcctgtgggccctacagcctggatagtggcatgatgggagcaccccactgagacgtagggtcaagaatgtttgctggccagctacctttttctatgatatgatagctgtgacccctcagtaattcagctgggcctaccccactaggctgtgtatcccccattgtctctcggctacaattcccaaggcagtttcttctagcctgtccactggtctgtacaccaaagtattgtagcaggtctccatggcttgggtgggcctcaggtgcctgtgtgtgtctgtgctccagtcagttgatgcttagatggatggtctcagaagtggtcatgggggactctccagatggtgccacttggcttttgacgtcactgacatttcctggttacatttagtcttagcatccatccccctgccttagctctgtagtcagtggttctcctgagataacctaagtagaaaatgagcttagcaagtcagttgtaggtgctgagaatacatttagttactagtgtgcccttcttcttcttcttttttttgtttttgtttttgttttttcgagacagggtttctctgtgtagccctgtagtcctggaactcactttgtagatcaagctggcctcaaactcagaaatccgcctgcctctgcctcccaaatgccaccaccacccgtctgtgtgccctgctttttgacctgttagctgacagaggtaggaagctacacacgcgtatgtatgtgggtaacatgtacacacaccctgaaaagcccagagtttcccatcattcttcaggtgtgtcagggctcatctggccatccctttcctggaggggtagaaattggcctccactgtccacagtatagttgggtgtttgttaaatttgtatcttttactagaagacctgggatgctgttctagaatgttttacccatactctggagaaggaactgaacaatgaggattctgtgtttggttatagtgttctgggtggttagcataatatttatataggttaaaggttatgaaaggaaaagtattggcccaggattcccaagaccccttctcagcatgaaggagatttatctgccccacagggacaaatggtagggagtaagaaacaaaggtaggagataaaggatgatgggagaggagcaagggagaggggagggtagagggttatttgtccttgaggacaaaggactgtcttgtaatagagaggagacagacatggccaattggtgacttctaaacgtaaaataggaagtcttgtgttaggatgaggtgtttaattttaattgggcatggtgaaccaaagggggcttttaatcaccgaacttcagtactttggtacctggacttttggtagtcaggctcaggaggaaggattgggaatagaccttgggggctagctctaggaatgtaatctcatgatttttagcaaggcagaaggactcagggagaagggcaaggccctccagagccatgctagagctggccagcgtcccttcagctcacacttctttccttggaaggtttgaaccgcactgttcggctctctcttggccagggctcttatatctgttaagtttctgtcttgctgtggtccacctctcctgtttctttccgtgtgacttcatctgtcctttgactgtcttatatctgccacatgtaagtaagatttgaagttggtgagatgaggagatctcacattagggacagttgatagtacagggtcttgcctccagatggaaggaagttctacaggatgctggcctggtgtctctgtgtaggggcaggtatgggtttgatgggtacccagggaggttgtgccttggcctgtaagccttcacttgtatgaaaggctctgcctgatttcccaagggtgagcatatatgcataggcagatcagcagacatactctgtttccagcttcctcaccatccagtaaaggaccagccagccatattttcagcatcagtccatggtgtggcttacaatcttgtcccctcctacttgctccaaggtcctgatgtatgagctctgggtgggattgagccttgctgtgtatattccactgtccttagagttcctgtcttatcaaaggcacaccgctgggaagcatagtgtggctatgttttcagcagtctgtgctgctccatgaattctctgcagaagactaccatcagttctgttcctaccttactgtagttccttggtgatctggggaaagctaagagccttgaattaggaggactgggacatgggtggagagggtatggggggagggggtggtttacagcatctgagtgcatactggtgagggaatttcttattagaccaaagccacttctgggctgtgggccctaacaaaggtttctccctctgctttggtttagcgtaagtaatcggatgccacattttaggggcctacttaaattcagggcagggcactttgtgttcttttgttccctgacccttgatgaccttgattattggagtttgttactaggacctgggtcgggtgtatcctgagacagaaaggatctagtgagcttcaggaacctgcgtcagcagctcctgtttgggtaccaatccaggattgatggtaaaccaccgtctgaactagctagtagggtaggaggtgtgtgtgggccttccccggaaggccagcataatcccaatgggatttaaggaatttgaaattcaaagctactgtcaaaacaaaacaaaacaaaacaaaaccaaccctggtgtgtgtgcctcctccctcaaagagggctttagtctttaatggggccaatctgtttgtgaggtacttggcttttaggatagtcatgtcagatgtatcacatgtctggttagtaggacttgaaaggggaataatgtaacttgctgtcacccaactggaggctgtttagaatctttacctggtttctccttccaagtagctaccttgaaaaagtccaagaatcattgccctgctcctaccctatgttccgacccatgatatgctcagcgatcaagaccgtggttccagacaccagcacaggggactcaagctgtcacatcaggactctgttcttggtcctcctgaagccctttgtttctgtcatctgaggttgtgagccttggtcttacttccagaaggtgacctgggctcggggagaggtctcgtatcagaagtctccttcgggttctttccttcttcaaggatgctccctttttgcagacctctgacggcagtacctcaggagccctacttaagcctcaacggatgtcaaactgtaaccttatatttttttgtgactgaacaaatgtctgcatcctggggcagctggaacatgaggtatcaagaccatgtgccccatgccttggtactccatgctcaggaatccaaacccccaaggtgtggtctcctgttatccagggcatcataaggttgcaatggttactggacctgcctgtcaagggccttgagtgtccaaaactccctgttgactgtggacatggagaggaagcagaggtgaggatcctacttgtagggtactagtgtagaacacactgaggatctaacctgtctccccttgctccatttgccaagactgttcttgatttttttttgaggtggggtggggtgggtgttcctttttactgccccttgttcctgagaggagtagggtcactccccctgcctcgggcctgcctttctctgcacacatagccctgtgtacccacccactcatgcctcaccagaggaggtcatatagctgtttcggagttaagcttcctttccccttataaggccgtgtccagcagcacctgaagtttctccccatgcaaatgagacatccccaggacctcagtcccaaccaaccctcaattgcctgcactcaccccctaaaaggtttaaatagcctttgttctccccgccaataaactgagccagttctccgaagctgttcctgggtgtgtgtgtattcttacttgagtactcaccagtccagtgtggtgtgcagtgagcctggctaccccgaggggagaagaagacatagaacagtaccatctcatatgtggaaactgaggcagagaggactgttctgggaacctggctgtatgagacctgtcctgggtaccaagggatacggagtccctcagaggcacatctctgccaagaccctgccggggaaggaattagaatacagggtcccggacctactgatttggccactccctggctcagagcctgcatggcctacgatcctgagactaacctgactgactatcttccacaggagatggaaaccccagggaaaacagccctttcatcaataatgtggaggtggaaagagagagctacttcgaggggaagaacatggcactttttgaggtaattttgtttcagtttctacacgaagaaggtacattagtgaagaacttgtgggaagaaggtaaaggagtggccatctcccgtgccccaggcaagggcagcctgggctgatgaggaaggagcaaggtgcttctcagcctgagatccactgagtttatctgtttctgataagtgagctgcaacctgggctggtgcattccttacagttcctaaaagccttgaggactctcagtgcccctgacttctgattccagacctgttggatagatgttctgggcacacagatgggggttgggggggtccattcacttgactgtgggctcttgagctctacacagccctgggacagatggatctcctgggccagggaccgctgccttgggatgttgacggacctggttcctacctatgtgatgctttgcacccacaggaagagatggacagcaaccccatggtgtcatcactgctgaacaagctggccaactataccaacctgagccagggtgtggtagagcatgaggaagatgaggacagccggaggcgagaggtcaaggtacacgcgctcccctcaggcagatagcagtcttggaggtttctagacagagaacacccttgccaggttttcagatcacgtgtgcctttcccttcatgaggcttgaccattttcatctatacggtaccgtgtctcagtggacaccaccagcttctgggaagggacaaggtcctagaagtcatgtgcaggctgccctggatactcttgagtgggcatccttgggatccatatagctccaaggagaaggagtggcactaaaccctgcctgaggcctgactttgtgtttcattttattatttggttgcagtgtttatttatttgtttttgagatagtctcaatctggccagaagcccactatgtcacccaaagttggctttgaactcacagtagttctcctgcttctgctttcagttactaggatggcaggtgtgtgtgtgccatcatgtctggcttaaagccttccctaaagcttttgagttttattcccctcagttctagctccctgaggtctctgctttctctggagggaagagttcaatgctggtgagcaaagatgaaggtgatttgtcacatctgtttgtcacatctatctgcttccaaggtgcttctcatgagccagtacccagcctgactgtggctctatgaaagtcaggccacagagtggcattggctgtcttctttcctcctgctgtaaagacagcagggtcaagtctacacagtgttcagcacttcccagacgattcagatctggggccatgtggtctctggggacagggctaaggttaacagaggcatgggctgtcttcttggcagtagagcagtggctcttagaaacactgtctcggccatgccttttcctgccctctcccagatactctgggcatccttagctgaccctgttgagatggcagagtcacagctgcccagatctgctgaatgatgggctgctataaaggagaatttaggggctgtaggtttgtcactcaaatgtgttggtggggtatgcttgtgctcccagcgctgccccatggcccaacaggttcttgggcctcagaagccccaggccttccctgtccccagcacacatgtccatttgtccatctgtctatctcttttgtctgctggaatatgtgtccaaggaaaacttggcttgtgccagggaacagacactagactgaatgcatcttggaactgaccctcagctgcaactctgcttagtcaaggccctgctcaggatgatcccgtagtttagtccttatttccttagagtggagcccagcagacttcgctgcctacaagggcagtgtggaaggaacccgtccttgtaagcagggcatccaggtttggggatattatacttagtacagccatagtatattttaccctaacacaaagtatgtcaattctctggctagtgtttccctgggtaacatgtttctggactggattttagttgattaacagctcacagcagagctgcttattgtggttgaaaatgtcctacttagggatccattgggttggcaggacagaagtagagcccgcctctggtgtctcctctgatggcacagaagcttgtccccagagacaggaatcactttcttttgagctgcttctgggttgtaaacaggtctggatcatctggacaaagctaagagttcagaggtggccatcccccttttgaaggcactgggaaccccaggcagtaggatattgggcagacagctcctgagcccgtgtctcagtgggatctgaagctaagctatgtggcctggcagcttcttgtgtatctcaggctaccacccatcaatggcctgcctagacaagttttttgtctgccatgtttctattagagctattggctgcctctaacgtccatctcacactgtgttcttgtacaccgaaaaattaacaagacaggttggagagatggctcaacaagtgagagtgattgctactcttccagaagatccatgctggacagctcacaaccacctaggactgcatttcaaagggagccaatgccctcctttgtcctctattggtatttacattcatgtgcactataccaacacatgtatatgtacatataacataataaagatgaaaataattctcactcatgtgcatataccaacacacatgtatgtatacacaacagaataaagataaaaataattctcaaaaagtcccaaaggcttttcttcatctgccagcttgtagaatccaaacccataaagactttatcttctgaccccagaatgcagtgtgcaggcctcgaagatagggagggcatgaggttaaggcttaggtctccctcttgatatatgtgtgtgtgtgtatatacacatacatacacacacatatatatacatacacacacatatacatatatatatatatagagagggatatatatgtttactgtgatgctcactggccttgggctcagggctaaggtctccaggctttcaaacccagagcttcctcccaccccctcttttcttttcctgtgaaatctttgatgtcgggttggtggaagttaagctgccctgccctggatggctcacagtggcaggggtcctatacaggcctgagctgccatcctgtcttctcaggtttaggtggtcagtttgttgttcttgcactctgccctctggccggctgcaaccatccagtaccgatccttagctgctgggctctccctgtgtggtctcaggttggatgacatcctcagccaggcttctgtgtgagcatcgctctgtaccagccttgtggtcatcatccacaggggatgtgctcatgctggtcctccatgctcattctgtgttctcctaaactgagatgagcctccttcgttggggtctgctggctcctcagctcttgtttccctaggtctctagtctgtttcctgtcatattacaatgagacttttaaactttataggtagccttactggtatctagcccttctctggcctcctttctttcatgtctcaagcttcctggcaccaaggtccgggcccttagctgtctcacatatataacaagggctccatcttactgtcccagaattcccactctgattcttctccccggtaggaaagcagagccaggtggatttcccccatgtctgcctagtatggttttctttccctccagcacaatgccctagatgcccggggttctgctctagaaccacagaacctcgtcttatttggaacataaatgtttgtcagtcatctttgctatccttgtagcttcattgtagatggccaccatgttcctcccagttcctatttcccctgacctccaaaccaaagcatggggtagggttccagactgagttactgggtacaggctttgagcctccctggacatatgatactctgttctaggccccacgcatgggcaccttcatcggagtctacctgccgtgcctgcagaacatcttgggtgttatccttttcctgcgtctgacctggattgtgggggcagctggtgttatggagtccttcctcattgtggccatgtgctgcacctgtgtgagtgtttacagctagtcctggggcaatttctcaggaactgatgctggggcccagagagactactgttgggaaatccaggtctgcttttaggtccctctctagggaccagctcctatcaaagacttgggaaagacgggccggcccatgcagcctggcaaaggccaggtttcctactagtctgaagaccttacctagctgtatctatgttgagggtggcatttctgcatctggggacttgaggaggctgagtcaggggcaggtaccttttactgggctatgatgagactccacctagtttggaaggatcatgattattttcagggtttctcttatagagaaagggatacagatctgtaacttgttcaagtccaggcctccagcatgtcttcttatttctagtgacattttgttatgctggtttatcttatactcacagcccatttgtttaccagccaactttcaaccataatatggtagaatgagagtctccttgactcctactgcaggctacctgaccacttgttccctgataagctcacacctgtgtgtctatcccaggctacccactgtcctttgactggtcattccttctggctacctgctcgcctgtcccatgagtggtcagtctatgttgtcattccaagcctctaacccatgcttcccgactggtcacttcatgtgtctgccccaccatgaccaccctggggcattcgcctctatttccagactggctattccatacggtcaccccaggctgtcttctgtttactttgtgtgggcacttgaggctacctacttcatttatcacccaaatgtcattctttgtggtattagcattcctggcacccacaaataaacttttcctgagcagagggtgcttgctggaggcaaggtggatacaaggtgaggtgccgtattccctgttggatgcacatctcgatgaagcgtccctcttgtgcatcgtgggttggtagaggcgtaattgggtcaggcacctagatgaggttcagcttacagggctatggcaagcagggtctgaagcccctgttttctgtgaccttcgggaatggatttgtgggttgggtagaaaagggttgacaggcaggaggcctgtctttcctggtcatttagtacctcctttgaggtcaaaagcctacaacctcaggctgggcatgttggagcatcttagggcacacgtttcctgaaagagctgcctctctttgcagacaatgctgacagccatctccatgagcgccatcgctaccaacggcgtggtcccaggtgagggtgccagcacctgtggcccttgaattagtttattgatcttgttcaggacaagagctgcgtgcgtatgggtgccattcctgccccaagctcatgcggtgacggtaacattttaacttgttttcaccggggtggcactggagtactgtgctgcccatggagtgaagagaggctctcttccccagagactctggtgtggacacaccctcactgcttgcctgtctgttattatgatgacgggaaccacatccttgagttggacacaaacctgagtagaatgcaggtccttctgaagtgatgagctagcagagatacactgccaagcactactgcctgtcctctgcataaaagagttggcaggcctgtgccagtgtctctcctttaaccatctgagggcatagcaggctttctgaagacagatgaggtactgtacctgcctgtatcaggcagttctcatcacgcttgagctagcctgtaccagtaggcaggctagacctgaattcatagcccaaggctttctggtggttctgttttgagggcatgctaaagctgcttgtcccttagtggggacagatctttctttgtgagtgctcagtgttcatagtgaatggcattccctgacccatattttatcttgggttatctttacagcgggaggctcgtactacatgatctcccgttcgctggggcctgagtttggaggtgctgttggcctctgcttctacttgggcacgacatttgcaggcgccatgtacatcctgggtaccatcgagatcttcctggtgagtccatctgtggaagtcttccttacccaggcactttgcccatgggctgattcgtatgttacctctgactgtcctctatcctgctgctctgcatgtcttggctctcaaagctcctgtctaggctgagggtctgggtccctgatgggtgagacctcatagtctgtgctatctcaggaggcatgtgtaactccttgagcaggattctagccttcaaaggcaaagcagttctgctcatcactgtttttttgtttttttaatttatgtatttattttattagatattttctttatttacatttcaaatgttatcccctttcttggttcccctccccccaacccccctatcccatcccccttcccctgacatcactggttcttatagtatgcaactcctattttattttattttattttattttattttattttattttattttttggctttttgagccagggtttctccgtgtatccctggctgtcctggaactcactctgtagaccaggctgcacaactcctactgtagaagggcttccctgcaacttgatgttgggcttgggctcaatgtttggtgggctctgtagcataagtttctgtttatcatgggtactgtttgtcataaccaggaaatcatggggacaggagcttgaagcagtatgtagtgtcagctgtcaggaagaagacagatgagtcatggtgctaggctttttcccccctctttatacagttcaaaaatcccaacccagggaaatggtgccacctaccctaaaagtggtgggtctttccatctttttttttttttttttttaaataatttctttattattgtacactgtagctgtcttcagacgcaccagaagagggcgtcagatctcattccaggtggttgtgagccaccatgtggttgctgggatttgaactcaggacctttggtagagcaatcagtgctcttacccactgagccatctcgccagcctgggcctttccttctttaatgaactcaaaataatccctcactcctgtgagctaatcccagaggaatctaatatgacacagatcttcccagaggttttctcctgagtgaatctagatcctgtcaattgataataaatattaaccatcactataaccatctcgatggagctggctttttttctctgctacccaagcatcccagagccagcagagaagccttcccatgctttctaagaaaggtttcacggggacaaatgcatattctaatttggggagtctaggctgggacctaggattccttgtcccactatgggtcccagacctgcagactctagattgtcatgctcatttctagggtctgttcggtctctgaggaagtcccattcctacagtagagcagcttggaggacacactagctacttggtagctctctggagattgcgctcagcagtcagctggtattagtaaagacggaggaaatgtgctggactctgctaaggctttggcaggagtccttggcccctcaccacaagggttctccctgcctgttagtaacctgaccaaggttacaatctggctttggcagctggagggaactggacaggaatgactgcaggccggatgccctgggtccatcttggatggcacacaagattctgtctcaatgtacccagtggcctcaagcctgacaggcctcctttgccagtatcaggaagggaggcagtgtgaggtcaaggctgggtgagttcctggacaggaccttctttgctgacctgacttattcttacagacctacatctctccaagtgcggccatcttccaggcagagacggcggatggcgaggcggccgcactgttgaacaacatgcgtgtgtatggcagctgtgccctggcactcatggcggtggtggtctttgttggtgtcaaatatgtcaacaagctggcactggtcttcttagcctgtgttgtgctttctatcctggccatctatgctggtgtcatcaagacagcctttgccccacctgacatcccgtgagtcccaggccatcctggtggtggtgtgggtgtgtgggtgtggcttggatctaatgctgggtcaccttgctgtgttgttccaggggctgggcctggcctcctggttctctcttctcctagcttctctggggaagaacatggaggtatccttgataatcattcttgggttccagtgtggttttaaggaactttggagtatggggtgggcacagtgcccatgcagtggattctgtgtgcatctgtgatgtcaggaggctggtgaaggttgtccttatttcagtgtggactgttggattaattacttttttgttgctgtgataaagcaccgtgattagaaacaggctatggaggaaaacgtttattttggcccgtggttctagaggggtgagagtctatcatggcagggagaaatagcagcagaaagcaggcatgttagcaggagtaggaagctgggggttgggggtggggtggggtgagaggggaagcgagtctggcaaagtccgtccccagaacataacttcctgaaacaaggccatatgtcctgaacctccccccaaagcaccatcagcaaggtatcaagtgttaaatgtctgagcctacggaaaactcaaaccaccacagtcagatggccaagcttgttagaccattcttatctcatgagacatggcttcctcatctttatagaaacccttcaaatgagctgcctcttgtccttctgtgggattgaggaggttaaccaaggtggccggtgtcgcagcaagttgagtgagcatggaccaaggtgcagtctggacatgttgggactgccaaagcccttggtagggaatgtgggagccaggaagggacgaaaccacagagctgtatgtagtttcaccatttttgtggagggtttggccaccttccagagtaagttgccctgggcaggaggaagacagccctcacccatggagggcttgtatgtgagatcagtcttcaagctgctggactgtgaccccatgcttgctcctgacatgtggcccctgcagtaacacgggttacgtttattagagttgctcaggaggtgttgagccccgcagtgagacagcttagcagcgtggtgaaaacgagctctgccctttctctgctctagggtctgccttctagggaaccgcacgctggcaaatcgcaactttgatacctgtgccaagatgcaggttgtcagcaacggtacagtgaccactgcactctggcgcctcttctgcaatggctccagcttgggtgccacctgtgatgagtactttgcacagaacaacgttactgagatacagggcatccctggtgtggccagtggtgtcttcctgggtgagtgttggtggagacggctagggccacctctctgggttgtttggggctactcttagggtcctggttcttcttgcttagccgtattcctagggtcccgtccagccaaaccctaggctagaatggccttcttcatctgctgcaaatcagctgcgtaaggccatgcattcagtgtttgagacaaacactcactttgcagcccagcatggcctggaaatggctaggtagccttgattggtccagaacttatccatgtcattaccttctacatactgggataacaagtagtggggggcaacttcatcttagagagaaggacccagtcctggggagcctgaacacttggtcctcatagtctactctgtgtgaggttgggattctgtatgccccccagtggtatcggtgtgatgtcagtgggcagccgagggctgtgtctgggtgatgggggaggagcagatggttcccatactcaggacctgctggagtctcagaggcaaggtatctggagaaagcagcccccaaagggtctcaagaaaggcagcaagggcatatggattgctggctggaggccacctatgaagaggtccctatgggggggtgggtgtcactgtcagggtaagactgcactatgccaggctagaatgcagtagagagtgaaggtggccatactccctggattattggaggaaccaatatggttacaggctctgtttctgcctcgtgcgtggatgcctagcagggaggaggccaccaagactgtgggcagctagctgttgaggagcacatgttgagttttggggagagtggcttcatgcatgtggtcctcacaaggttgagtgcccctgattggaatcagagccatggaagaacgacctgcggttgtgagtggtgatgctgggtgtggacagtccaatgggcagtcctggccgaaggctgagaaatcctgactgttcgtattacagataacctgtggagcacatattcagacaagggggcatttgtggaaaagaaaggtgtgtcctcagtgcctgtgtccgaggagagccggcctggtggattgccatacgtcctcacagacatcatgacctacttcaccatgctagttggcatctacttcccgtctgtaactggtgaggcccccagccttccctcctcttctgtctttgtgtctacttctctgtgtgttcctaccataactcactcactctctctctctctctctctctctctctctctctctctctctgactctttcttgtctttctatctctttgttactgtttctgtctcttggtctgtctctattttctggtctctgtgtgtttgtctatgtttcttctgtctttcagtcatcagagatcacctttccagcaagcagtggtcgtattggcctatcttctctgatgaatctttctataggcagcatcctctaggttttctgtcactgtcatccgtatctactctgcagggatcatggcaggatccaaccgctccggggacctcaaagacgcccagaagtctattccaacagggaccattctggccatcgtgactacatctttcatttgtatcctttccttaaaggggccctgtgccgaggtgttgaactctaacgctgctgcctttgcaccagtcccctcagtcacatcctcattgtgcccatctgtggtgcgctgtccagattcaggtcctgaccacagcctgccctccttgtacagccttaggtgatgtgccacattaaaacatggcacctgtattcctgtctcttatgattgtatttgacacagtgtcccttaaaaaatccaagagaggagcaggggttgtagttcagtggtaagagtgcttatctagcatgcacaaggccttggcttccaatctccagtaataccaaaggaaaaagaaatacaacacatcactggattggtgcacaccaagggtgcacagccttggttgggtgtggtgtgagatatggcatgtcttagttagggttttactgctgtgaacagacaccatgaccaaggcaagtcttataaaggatgacatttaattagctggcttacaggttcagaggttcagtccatcatcaaggtgggagcagggaagcatccaggcaggcatgattcaggcagaactaagagttctacatcttcatctgaaggctgctagtggaagactgatttccaggcagctaggagtagagtcttaaagcccatgtccacagtgacacatctactccaacaaggccacacctcctagtattgccacttcctgggccgagcacacacaaaccatcacatggctttagcacagaccacagttgcttttgtgaaactgatgttccaggagtcctgtcctcccagcagggaggttggtcaccaaccatacaccttttgagtaccctgtagctagcactctatagctggacagatctgaggacagtacccagaggactgtggaggtgttgggcacatctgtggggacaggatatggagatgtcttaccacatggtgaccctggctacagtgttgctccaggcccgtggaatgggacccactctccagcatgcatttacctggagcttgcatgctactctattgccccaggactgtctgttccttgatttcaactcagatctttcctgcatagtgctgtttggggcctgcattgaaggtgtagtcctgcgagataagtatgttggggttctactacatgaaatgactatagttggtattgtctttcctgagggagacttcggctttgaaattaaatgacctctgggcctcacagttgtatgtgagttaaatgctcttatcagagggtcacactatcttttgcctgactaaagcattgatgtgtcgccccttgggcctggagcctgaagactgctcagagcaaagttgaggcctgatgaagctgggaatggggaatgaatacaggtgtgagaatgggagagataggatctagggaccccagtccttctgctcagttagcagaatcttagtttggaccattgtggactcttcattcttagggtactgcttgtcagaatctcagggcttcaagggttcttatataccgcatggtgaagaagtatagtaccaccaggcctacagggatatgaccgctgcagaaatggcagtggccagcaccaccttggtatcagccaggacttcctgttcctgatgggattctaggggaacagtttcaagccacctaagccctttctgagggggctgtcaggctgactgggtcctagttgggttgggcctctgaaatgggctcttagtttgggggttcacactcaaatggggacagagttttttttttttttccctgccttcagatcactctttagaagctctactgaccaccttcccttactcacctgtaggtttggggaggccttgcaagggaacctggtcattggcatgctggcctggccatctccctgggtcattgtgattggctccttcttctccacctgtggtgctggcctgcagagcctgactggggcaccccgcctactgcaggccattgcgcgtgacggaatcatccccttcctacaggtgagtccttcactcaaggtgcagcagatgaagctggctgccctgggaagagatcatgcaatgtcaggtctgggtgtttaggggcccctaagagtctgtcctgcagagctggaccgatagaatgaagacagggggcctatgtcctgcttttggatactatactggttatctcactttaactgctggactgagggtgcaggcccagggcagaggttgcctggttgttactataaagtccttttccagtgggccatgtttatccattgacctattgaggccatgtgaaggatggccccactggtgtcaaccatggatttggtgtccctggacctggcctctaaggtacaggatgcaatgagagtcctggaatgatatcttcaaaatgtcatagcccaatggcttaaaccaaaggaagttgttttccaaaaattccgcagactggagactgcccacacaaaagtgatttgaagatagaaaaaaagaagaaaaaaaaggaggtttgggtgtggcaggactgtgccctgagtctatctatctgtgtggcttttgggttttcttttgcatacagcatggtgacatgtgactaaagctaggttttgcttgtaagttttgtaagttattccatggttaagatgttccgatgacactgccttgcagatggttcattctcacaggcagtttccaaccccagcccacctacctctccccatactgcaggtgtttggtcatggaaaggccaacggggagcccacatgggccctgctgctcacggctctcatctgtgagaccggtatcctcatcgcctccctggacagtgtggcccccatcctgtccatgtgagtagcctgcaaggacacagtttggagggtgtgaggacttggttactgttccttccgatctgaacatagggtaaggactaaagatacataaagggtaggcacagaaggccaggtggctatgctgtgggcacacagctgttgggccagctgaggtgagtgtggctggacagacagctgttacggtaggtgcaatggctgtacctgtggtaggtgacagggacagtaagcatgcgacttattcttagggtccctcagctgctgtgtagagacccctagaggagctctattgtgtaaacaggttgggtctccctaaagagtggtaagcagtagatgatagacagtggcaggatactactgtgccttcgtgggtggtcagcggcctcattggcccttctgctctaggttcttcctcatgtgctacatgttcgtcaatctggcctgtgccgtacagaccctgctacgcacacccaactggcgtccacgcttcaagttctaccactggtaaggccttctgtgtggacgccccgagggacccacaaacctgagcacatgcaatctgttctggaggctgcctgctgctaggcttaaaactgttttggtggaaggagacccagtgaagtctaggaggccacggtcctgtcctggcctctgacttatatttcctttcctgagtacacgtgtgattcttatgtcagcttggtcctctccagccagaaatgtttggcaatcccagagctgccagtgttcttcaggctcctttccagcacagtgctggctgggtggatggagcccattctgtgttctgcacgtagctgggtgtcttgtgcaccccaggagggaaacagacagttgcactgtctccaggctgcagctctgctgtgccacagcaggatctctgggagccatttcgtatttcagggatgactgagtggcagacctggttgccaggcgtcatgggctgatgctctgttcaaggaagagttgcataatagggaaagtgctgttggtgaagcaggctttcaggtgccatttgggggctgtacgggcctgttctgaacttcatgtccgccaggaccctctccttccttgggatgagtctctgcctcgcgctgatgttcatctgctcctggtactacgcccttttcgccatgctcattgccggctgcatctacaagtacatcgagtaccgcgggtgagtggcagcccctcagaaagctgtgacttcactaccctggggcatgagtctgggtgctgctgctgaggtctcatggaagttagacaccctgtgagtcctaggtgtcttgtgttgtcccctagtcccagccaggctgacgtactcgggtatatgctgaattcctgcccgggagttactgtgcagaagctgggaagggtttttgttttttgtttttgttaatttcatgtgtgttctaatttattaataggcacatctatggcttccactgttgacagtctgtttaaaggatttggcacctgtcaaccatagcactgtcatgtcccaggagctacgttaagagttccatttccaccaagttacctttgtccttccctgacatttctgtcttcactctggtccttgagaccaatctagttcagggcttccaagtcatgatttcagcctcattcttctctctgtccctggtgtccccagtgaatggtaccacaaggaagtcctgctgctcgaaccttttcattttatccagtagccctgcttgtcctgggaagccccttcctgttgggtttacacacattgtgactgtctcagctatgtaaacattcttcaaagtgctactgtgacaaggtgaccttcctctgtacccatacagggctgagaaggagtggggggatggcatcaggggcctgtcactgaatgctgcccgctacgccctgctgcgtgtggaacatgggcccccacataccaagaactggaggtgagtatgccccatagccacagtgccaaggtagcagagtggagtggagaccctgatcctgccaactggttagcgctgtcttggaagcttttactcttggccttctgaggagagatctgacagggcatcactgccaaagaatgggagaatagccagaggtgggtcctggatatccaacaagccaccagcagtatggattggaggcatgctcctctacgggagtttcctctgttctaaggccaaccttagctgggacacctgaagcctcagacacaaggtcctaccggtcccatctgccccacctgtccttcttattccacctggtcttcctaggatgtctgtctacttgctctcccatctctatcccatctggctccatgagcacgggagccctgtgtgtggccattgtaactcctgtccctgcctatcctaccacaggccccaggtgttggtgatgctgaacctggactcggagcagtgtgtaaagcacccccgcctgctgtccttcacctctcagctgaaggctggcaagggcctgaccatcgtgggatctgtgctagagggcacctacttagacaagcatgtggaggcccagagggctgaagaggtaggcaggcaggtggagtgcagagtgagtgaggtccgggttgcaaccacctaagaagagctgagccacggcctgcatctcgaggcttaggggcacgatttttacacgtgccgttcctggtttctgtcagggtggctactgagtctgaaaggatcagaagtaagatttgaagagatgagatgtgtgatctcctgagacagaggggcagtgacaactgccatgggactggatccctgagggcccctgtgtctagccttggcactttgttcctggtgtctgttatagctccctgtgcaccccagcaccttctagtaggtagagattgttgggtcatgagtctgtgtgcgctgggctgtggtggcgcacacctttaatcccagtacttgggagacagagacaggcggatttctgagttggaggccagcctggtctatagagtgagttccaggacagccagggctacacagagaaaccctgtctcgaaaaaaaccaaaaccaaacaaacaaacatgagtctgtgtgctgtcagatgttctgatcctttggataagaggtgagtaaccagaacctcctcctacagcatactggagccatctctgatgcctgctgcccacaatttgctggtcctgtaactcctgggcttcttctacacaggctttcttatttctctgtgatcagttgtgacaggaaacctccagcccaagcagaaacagaacaaatagtgtcaccagtttctcatgtccatctacagcctctgctgtcctcacaaggccaggcagggtcctgccacctccagtgttcagctacccagattgtcagaaaccttttttactcctctctctatatttgtggatcttacctaaggctccatcgtagctgccgtgtcttggtgtcacccttttctctggaggggttgatcagcgagcatttttcttatggctatccttatctggtcttgcttgtgcgttcaggcttcctgctgtctgtgtgtctctaagctgcatcccaatttctgagtccagtccattctgggtggactgtggagtggactctgtggagtgtattctgaggactgactgtgggcattggtggtaatgactattgataactctggtctggagtgacaatcttgtggctttttcagtgatgacattacttgcccggcctgcctgtcaggcagctttgagattcggcaagatcaaagaggacaagagaagagatggatcgttttcttgctcctccaaaagaaccagcagttgccccttagaatgtggagcctccgatccgaaccctggctgctgctgactgcaaacccacgaatttaaacatcatagctctagtccttacggatgggtggttttctgtcttgtcctttggtgtctgacctgtagctggtctgaggggcattttgttatgggagagagagtggctctgtcttggaggtgctcttgtttttatctgtgatatttcttgggtacaaaaaaggccagcatctgctttaagcaatggtatgctcatgtcctttcctggtgtctcctctacactttagaggggatctctggagttaaggccaccctttggacagattcgaagggtgtgcatggactcttgtttgttatctgatgtcactggcagaacatggggaaaggtatttgtgttgaagtgagtgcctgctggggaccctctgactctggtttcaatctccattctgataagaaatgagaagagtatctgtggccgggcgtggtggtacatgcctttaatcccagcacttgggaggcagaggtaggtgaatttctgagttcgaggccagcctggtctacaaagtgagttccaggacagccagggctacacagagaaaccctgtctcaaaaatcaatcaatcaatcaatcaatcaatcaatcaatcaaacaaacaaacaaaaaccaaagagttcctgtggctatctcatgtatgtctgttagattaatttatattctgtagtgctggggtgggacccaggaccccatatgtgctagacaagtgctcactcagccactgagccacactcaaaccctggttggatgattttaatctctatttgcttttaggcagaaggttctaaagaatctgaatcaggaacatgtgttgagaaacagaagccaagtattcgcctctcctggtacccataggaaaggtttagcattggaattagtcatttttattgatcagcaaaagccagaaggagctgcccaagggtccacctgcccctcctgcctgatggagctctgccctttagtcggactatcagtagtaatattaaacgaagacagtttgggaaagccattcattttaagtgatcagagcttgtgtaagaagcttgttctgggcatttccttactatgtcagggttaatatcactttccctctactgcagcatttgcatgaaagggcttgagggtttgagtcaccctatccttccctaactaagggtcctgtcttcctcttctgtgaggtttccctgcccacagtggctttggcagatgtgccaacttcttatctggaccagattcctgcctggtcagggctctgtcctctaaaaccttaggctgggcaggcgattctctagcagtaaggcaaaaactaagatccagctccagctctttgggtctagcctggggaaagcaatgttgcagcctttgtcagggacacaggcatcacaaagccagggcaggggtgtgtaggtaccgtgtacggtaggcatatccttctggtcagtcctccgcagtgttcctctgtgctgtgacctttagccagcttcagcccataggaggacagagtagccctgccacacacatgccatcgagctgagtcagcctctccagtacttctcctatgaaacccccatcatgggcactgtccttcctgcctgggagcagctgtgtccctgtgaccacgcctcccgcctgggctgcctctcaatcactggcatgttccccttttaggacagtgtgtttagattgtttctgaattacgcagaattctataagtggaacatgttcctcttgtgagcctggtctaccctagatggctggctggtggttggtggaggtgaacacaaagcaagggtagaggtgaaaggatggctgggaaccgtgtgtattgtcagtacagctttagttgtggaactgtagtgcagggcagtcattgtgggaccaatataggaggcagtcgaaatcaggcaaaggagggagaatagtgagtcttgtgaccagtggagcaaacctagactaggtgaagtctaaatttgaggtatgggcagagtgggctcaaatcactttctccctcttctggctttgctggggggggggggggctccaggcattcctaggcttagcctgtctccacatggctgccttccttctcagatctctctttcctccgtcttctctgagttacttgttactgagttcagggtcccattgaacagttaggatactttttccaaataaggccatgtttccccattttggctgtagcacggtcaaaacgaacccctcttgggaacaccattcaacccgtcactgtcctcgttccccaaacacatctccctcccacgcaactacattcgttgcactgcagtctccaaagttgtaagcatcaacaagtctggacctcgtcacaggccacaccgaaacggactcctctctgtgcttattaccaagagatgtggaaaaacgtttgcctgacggtgaccacatggtcttcctgatctaaaagggagagcgagcgcaaaggcatgagggtcaccgtccacataagtgtgaagtctagtagggctgttcctctaggtaccatcagataccctgcacccaacaggacctagtaggctgcctgctgtagaaggacagcatccctaggctgttgactcgtgaatggtgtgtcctgagtcgtagcgtacaatctctctctccattgtccctaagcagctctggggagggaagagctgtcctggtagatgcctgacatagtgatggaatgacgggagtggacaggtgtggagactgacatggtggcttgtctgatagcccttactggagcattccattccctcaaaggctgttaaagtcggtccatgaagcatggcccatgagtgttggatgcttattctttttaaaagatttattgatttttatttgtatgagtacactgtaggtgtcttcagacacaccagaagaatatgtgtggggctgcctcactgtagggacgaagggcatgttgtccctggcatgtgtcttagcatcctgtactaacacctgcctccacaactcccacagaatatccggtctctgatgagtgcagagaagacgaagggcttctgccagctggtggtgtcctccaacctgcgagatggtgcgtcccacctgatccagtcggctggcctcggtggcatgaaacacaacactgtcctcatggcctggccagaggcttggaaggaggcagataatcctttctcctggaagaactttgtaggtgggtgtggcaaccatgcccatcccaagtgttactgtcacactaagtgtatggccagaaaatatagacttggggccttggaatgtgctggccaagttgttagttacagaaaaagcaaatggcaggtttgcattcttgaatactctcctctcatgcccaagcccagtccccatgtggggattttcctagaatgtgacacactgtcctctggagatgatggaatagctctgatatggaaagttgttctttgatgcctccccgccaccccctggttagatgacttcatgggaccatgcctacttagcttgtgacagtcttcccactgtctggagggaagctagctccctgctcatcccctcatgagaccccatggtccagctggcccttggtaacttacccatggatacctttctccacagacacagtccgtgacactacagcagcacatcaggccttgttggtggccaagaacattgacttattcccacaaaaccaagagcgcttcagcgacgggaacattgatgtgtggtggatcgtgcatgacgggggcatgctcatgcttctgccctttctgctgcgccagcacaaggtgtctgtcgtaggaccataggccaacagctaggctacagggacaccactatgtggagggtgtggccttgcctgagttcctgcagaaatgtcccccctcttccccaggtgtggcgaaagtgccggatgcgcatcttcactgtggcccaggtggatgataacagcatccagatgaagaaggacctgcagatgttcctgtaccacctcaggatcagtgccgaggtggaggtggtggagatggtgcgtgcacagctgtgtgctggggacgggagggtgcagatgggcagacagacggatggacggacttggatgtcatgctacacttttggaataacagagatagtacatcccggcatgttccatagggtagcacttgtatagtcttactgttcccatcctacatctgagcttgtctcagctgacagcagctctggtggagaaggtctgtggggtgtactccctgggagtgaggtctgctcagaggtctggagcctggggttctagttttttgttttgttttattactcactccattcgtttacatctcaaatgatatcccatttccctgctaccccatcccacaacctccctcccctttgcctgtatgatggtgctccccgacccacccaccctctcccaccccaccccactcctccagcatccccctacgctgggtcatcagacctccacaggaccaagggtctcccctcccattgatgtcagacaaaggccatcttgtgctacctatgtatctggagccatggattcctccctgtacactccttggttggtgggttagtccctgggagcactgggtggtccagccagctgatgttgtttttcctgtggggttgcaatccttctgccagctcccccaccagggtccctgagttcagttaagaggcacttgctgacaggagcttgatgtggctgctccttgggaggtttggccagcaactgaccaaatcagatgtggatgcttggggctctgtttttgtccatgacttcatagttcctcaactagaaattatttgcctatctgtggatatatcgggccatgagtgaagtcatgctggggctaacagatagaataaagtgaccctgggtcacagtagatgcggtttactgtgtctgaatgactaaggagtgaggttcattctgagatacccactccagctgcccctgaggacccaagattgttcctactgaccgagcagccccttgtggattgactgtgtatcctttgctccttcctgccttctgctttctctgaatgctatgttctcacttgtgtggtctctatggcttactcctctgtcacctgatcatggatgacacccagtacacggtctctgcatggctatgtagctcagtttctggagtagaactggcagagagtcacattggatagaaatagtcccatagaggcctgcttctctacagtctcacagagggattatgttagaggggtgtcccagaagggcccatttcttttccatggccatgtggagtgcctcattgggtaaagggacctcccactacccttcatggtcacatggaggagtcccagctccagggctgcagcggtgcttctttgctggagcttgcaaactgcctttctctgcctgtgtctctttaatcatggatgaggtctggcatctctctgcattattgacgacctcttgcatcttcttgtcagctcccagggaaccttgtggtatgggtttatgttttctcattcgataggagactatgtataagactttgagacctctatgagagttttgggtatgtgcaggttggggcatcactgggttttgttgctctgggtgtgctgttcagaaatgcatatccacatttggacatttctcagccatctggagttgcagacccgctctctgtggcttctgtttgtaaccttctctgtaggtggcactctaggtctgtctgcattattagtagtcagaaactacccttttgactaagtaacagaagctgcccagacggggtcttgtgaggtagtccaggctagacatggagaccagcagtccactggcctggaccagtgtctgtaatgtacaatgcatgagctgcctaagctctcagcctcgggcttggcttctagagctaatctccctatgagttcccactagaatacagacctctgtccctaccctggggacatggtcaactgacaaggggctacccagagtgtaaggttttaggtgtttgggtgtaactggcagggatagtctgaatgccaacattcaggatcattagatcactagtgcttaaatgctgctgtccttggtttggtatcttttccctgtgaatttaataactctgtgaagagtgagcttgtctgagacaggaaatgacaccagttatttaggaatatgtgttccttgagaccacagctcttacagacaagccaggaatgccctgtccagaaccctgaacagctctgtgcttagtcagtgtgaactgcagcatcatcattgacagtgtggtgatgtcacagagtccccagcaggaacttaggtaggctgttgtatttgtccacctgttattgcaaaccacacatttgcatcaatagtcacacattctcatgccttcccaggctctgggatagagagctctgatactccagggacagaaatctaggcctggcgtacacggccactgcttgcttaggtccacttgacaatggggattgggtaggttttggttggcggcgacaccatgttttgtatgcattgtttacttctgtgacttgacgctttttaggttgaaaatgatatttccgcattcacctatgagaagacgctaatgatggagcagaggtcacagatgctgaaacagatgcagttgtcaaagaatgagcgggagagagaggtgtgtgcactggggagaaggtaggtagggtcagtgccatctggtcccaaacatgggctctgtgttgaggggagcagagcaacctagccggggaaaaaaaaatggcactggattcacacagttcctatggcatttggctttggttgttaatgaagagcaggcatggccatctgtgccctttgatacagtgtgactctgagggctggcacctttgtagtcacttcagatctttaaacattcacttcactccgtcaatgcctcagccactgagggggctgtgtaggtagacactccccttgttcacccttccagggctatcaggcaccacccatctatgaccctttaaaacccctgtgagcctggcagccagaggggttgttgaagcaggcccctccctgagatggaagctgccacagaggtgtaccatggtgcgtcctcgtcagggttgagtgactgagaggccaggggctacaccacgtaaggagactctggtaccagtgttctgatagttcagcagaggtctgggtccatttatttttttctttcaaggtgggaaagtgaggtaggaagaggcaggggagggaaccaagagtctatctggtagtacaagaaacgggagatccttttgggatggggacagtgccagagccctttgtggaattattgtctactagttgaggagtcttattagccagttacacatgaatccttttgggtcattctgcagcctgcctgcctcattgggcacgttctttcgagggtggctttcaagagcgagccactgtctgttctgacctgctcttccctcaccaggcccagctgattcatgacaggaacactgcatcccataccacagcaactgctagaacccaagccccaccaacacccgacaaagtgcagatgacatggacgaaagagaaactcattgcagagaaacacaggaacaaggacactggcccatcaggcttcaaagacctcttcagcctaaagccgtgagtgtctgtgtggcctgggccgatgcacattgaggacagatttccagccccaccttctgaggagtgttagagggcagcgcactggcccacagacctgcagagaactgggaccagccagcccaaggctatgctatcagtgccagtgggccaggtcatgagggggttgggctatgagtcttcctcgcttgaggataatgacttcccagggcccattcccacccccatagtctaggctgctgtcatagacctctggggtcctgtcatcttggttgatttgagaatcccaagactgtgaggtccttgtggctgtcacagagatatgggaatgccatcatggctgattcagttaagtcttcttgacacagcctccaagcccagtagtgggccagagcctcctctgactgggtctttatggtgggattattctgaaactccaagttccagggagagggagggtttaagggttctatggaatgggaatctattgaagggccaaggccagccatttcattacttagcatggccaccaccagtacttgaattggttgaatcgtgtgtggagtcctctgctggagtaacctgctctttgtgttctcttccatgtagagagtggggaaacctgtaagtgtactttcattttctagactgccttagaccgagttgccttgcatgcctgcgtgtgtacagtcctgtgtgtgtagaacatcctgctgacctcactgcctcccctcagagtggctcagggcacacacccagatgtcattctcttaagtgacaccaaaggcagtgtggaagagctggttctgagctgctctgagatggggcagacgtgtgtgcttcctgcatcaatgaacagattcacccacatccctccaggtctactcagtcaatatataattgcttccttggctctccatccatccaggaggctgccatcctttcctctctagtgagaagggttgtggatcaattctgtatagtcagactacctgtgtgtgagctctggggctggatgcagggccaggagtcctaggcaggggtgcagggtctgagggtctgcctgcaagcctataggtggaaacattctgggaggacatatgctgaggtcgcctggagatgctactgtggtcctttcatctgtgctgtccctgtcctgtctccctccagtcattctgtgccattgtcccttacagacaggtaatgtgcaagatgctggttaggtggttaatgactttagctgaattactcagacactgaggaaaacttgaggagcttggataactggggagctaagagcatcccaggcttccttcaacacataatcaggaaggcatagtaacagggtttgaccctacgctacttgtgcacatgtacctatatacacacgtgcctgtacataacagacagattcctggacacacacatgggcactatcggtgggatacttgcttgtcaggacccaagcttagccagggtcaggaagaagctccagggttcaggcctctttcttggttagtctagcaagagatgtgtttccttgcacaatttccttggagcatttatggcttcggatgtgtgctgggttagagtgcatgtatgtaccagttagaaaacatgtaaacatgtgtgcaccaggtaaagctcatgcatgtgttgtcagatgagcatgtgtgctggtttgagtatatttgtgttgtgtacacactagtgtacctacctgcatgtgtgtgtgggtatgcacctgttagcatttgtagatatttatgtgcatgtattttctactttggatcgtcataggcagttcttaggcagttctgccaatagccagctaaggatttatgacttcacttcctgcttccaagactgctgtgtagacttacactcccaggtgtagacactgtgtagaaagttcatcttgtacaagacattttactgatcaactctgctggattactaggaaaggaggtgggattgagttagctttcagaactcaaggacttttcctggaccctctggtggttttctagcttcaacagggcattccacaatggcataaaaaccaggcaaaacccagacctcaggttccgtgtgactgctgtactctcccatccccaggctcttgcatttcatgccgtttgagaaccgctgttggaccaaacacacagtaattgtgccctttccatggagtgaattcagagttcctgtaatgaaaggcctgactggtgccacagagactcacctataattttatcaaattaaactgaagagagaagataaagggcccatgactgttttcttcctggagaatggcagttacaggctgttatatttggcttagagttgagttgatcagtggatgtgattatgggacatctcgggacctctctatgaccctgaaatggcagcttcatctgcctgtccctctctctctgacgcacagatgcctctactcagaagggctgccatcaagactgtacaggcagattaacaggctaaaaattctgccctgtgtcctaagcccaaggacactccagatgtcccagtaccgatagaagtgcaatttcccgaggtagttttctaaacatcggttcagttctctagagcagggatgtttgctaccaaagagaaggctgacctctgtcctacaggcacctgagtgcttatgtgtgctagtgagtatgaacctgtgaaatcctcaaactatgtgggtgtggtccctgctacctgggaaactgaagagtacagggtcccatacaacaatagagcacttggaactcagtaatgttctgctcatctcagagaaacatgaatctgaaccatgcggtgccagaggctcttgtctctttgtcacaacttgatagtgtcatctggactggctaagggtaggaaagagggttgcctaaacccagacccagttctctgctgaatcccagcttccatacagcatctgacagaaccaggacggcagggtcattgactggtgagaggacactctagagctctcctcttgagcacctagtcctgactacacctaagtactatgtactcagttcaacagatatgctacttggcagcaccaagcatgccagtaggatgccagggattcagcagttgtaccagtgccctaagacacaggccagttcccacgcctgcccagatggctgctgtgccttccctcatatcctgtttctgcctgtaccaatggttgcttcgcaaatgcagcttattgagtgtgttgtagtttacctgcattactttatggtccctagaagcttagcggtttagtgatgctctgttctaaagtgtctagagccaaatgctttctgctgctaagtcaccccacaccccatcctaatatgctaagccttgcccttcccatgaacaagctgggaaggacaagcagactgcaggcctcaagcccactgtgcccactctaccatccttctcccagggaccagtccaacgtcaggaggatgcatactgctgtgaagctcaacggcgtagttctcaacaagtcccaggatgcccaactggtcctgctgaatatgccaggccccccaaaaagtcggcagggggacgagaactgtatccttttccaatgtttcccagtggtggtggtggtgagctgtattacaactgtggcactgtcaggcctgactcctcttgtttacagagcctcaactcctgtgagttggggacgatgggtcaggggagggtggggcaaggcaggcagtgatgtgtggtacaatgaggggtccacctaggcctgtccatgccaaaacatgcttttctatgtgtggtgtatcatgcattaccccggggaccttggacctagggacataggtaggcaagtgccatggcgtctgaccagactggggagggctagggggtgtcaggtccttcctagcattcgagttcctgaggatcggtgatggcccttccttacaatgctgggaccaagtgtagcacctagagtaagcgctctataaccccatcccagtatgtacctttgatttgcttgatacctgactaagccagagcaaatccacatggtgtgtctctgggtgacaagccttgatgcagagcagtatacactaggacacagactggggtcatctgaatgcccagcaagtgcagtgtgatcctaagcctgcctgagaagaacaacccctcacaggaagaactgagcccttgttctcgtgcatgtacctgcccatggtctcagtggttccgtgccccacagagctggcactggagcaatgctgaatctccctgcctggatgcagtatgctctgagcttagcctccctcggcggcagatcaagcaggacagatggccgcctgctcttccatttcacagttcaggctgttggccatagctttgacacgtgctttgctaagtgtcaggatatctctggggccttgttggacagccacttgggaccacggaatggcaaatgagggagatgtttctgtttcctggtcagaaaccactgaaccaccagggttccagtgacccagggttccaagtggatgggattaataactgaggctccagaaatctctctgccttctggaggtggcagctttgtccctgttctttcgtggtaccacatcatcatttcctctgtttggaggtccctagcttcttgggatgttccaatctgccacgggccttggtttctcagactgagtctgtaactggggtccctgatatgactagttgagattggtatggccttaactatcaacccagacatggagttcctcgaggtcctgacggaagggctgaacagggtcctcctggtcaggggtggtggccgagaagtcatcaccatctactcctaacacctgcaacctggacacacctggatggggtcaggactgtgcaagctgcctgtggccaggctgggactcgccagcatgccactgtgatagccactgctctggcactcattgcctggcctaccaacatgttgcagtgattctggtcaccctgacacacacggcttcccacagacataacagctcctaggcttcctccaaacagaagatgctatatggcggggagtatctagagctgttctggtaggaacggctccttacattgttgtcggcaatggtaggtatacccaggagatctggggcagctcttcctattactggcagggcctcgcctcctgacactaggatcacctttctgcagatggctgtccagcattttgtggcagttatattttacttccaccagagaacagtacaaaggcgcctctgtacttttcatgaacctgacagataaaccagaactcgtgaacaagcacacagttccttgggtctagaatgtcactgagttgttccccattggcttctttgttcctttgagtatccttgctgtgctttctgtacagtaagcacactgaggactgtccaccctcacctcctcattctctcccccaccctcctcagacatggctcagggtaccactggaaagtgagatagtgtttacagggtaggagtgggtcaccattggaaccagtggtacctgacagctgtgttcccatctgagtcgatgccctaggagctcctgcagagagaacctttgttctgcagggctatctgcagctagcctgctttctcttctcatgggaactcagccactttatttcatacgcaccgagctgggaacttcaagcaggtgactacggagagccacagtgtaacaagcaaacggcaggaactctgagaattctgcacatagtccaccacagcaggcagcatccagagtgtgaaccatgatgtgtctcagcatacagctttgcacatgaaatgccgtcccatccctcaccctcctggagagaaaagccaggcccagcccaacaccctcagcctcagcagccacagccctgggtgtgtgtctttctggctgagtgtctcctgccatagatccttactcagccgggggccataggcgcctctgcacttttcaagaacctgacagatgatttgcactttacccttgggcattctgctctgtaggtcatggtttgttcacaggctgtaggcaacagcactgatccgttcctcacgttctgtatggcgtatttatttatttaaccctccccggggaagcttgatagaggtggcttctatgtggatggcccgtggtgccaggctctgggcatctccgacttcctccaagagaatcagccctgtccacattcacgacgttccagttagggtagaggccacgtttgcacctgcacaggttcttcaggctttgttaggcacccaggtaagctcgccagagtgactgctgcccagtgtgtgtccctgtcagcatagtgatttccacacctgcttttgcctcaattctgaacttggctcagactcctgagccctggatgtctagagcagagcaggtggctcgcctcgcctctcccagctgttaggaatgccctgggcagctggcctttgcaggttctgggtcgctgcttacaagagatgcctgtcaagagcgtccagcctcctttctgttgcaatctccatgttcctggtaactgtggccgttcagatcagtttcatgttttttcctttttatagacttttgtctttgtatgactttgttagtagcagagtaaagttctataaaatataaatgtttaaggaacttcgtgtgcctcatttccatagaattcagtggtggcagaagcagtacttacctattccttcccagagctgctcagaggcccacttcaagactgaccacccaagaggctagaccacccagggctctcagggtcaggggtgaccctcctgcattggagaagctctacaaaaatacaaggggaactctcgtgccaacttagatttgtcaactcagtactgccattgtagggaatcaactcagaattttctaaggatgggagccccagaatcaccacagtgcaagtgaggctataatctagaaaatgggggacaggtaggaggtgttgagtcactgggatacagaactgtgcagccatgggactggtgttggcacctccgcagttgttaagtaggtttatctctatggcccaggacatatccccacaaaccttctccctggcattcatcatggtgtcttccatacccaggcattctgcagcagagcagtgtttggttatagaaacggggctcttgacccgtggcatcacgcacaagcctgggagacttactcagaagctgccccatagtatgggagtcctctcaggttgggtcccaaaagaagcaaatccaagaaaaccgtttgtaattcaaggaaggggggtagttcaggaaagactgccaaggaagcacagagctgcctttgggaggatgttctgatgtagaagcttgacatgctaatgactgatgagtgatgtagtcaccctgtctgtggtgagccttgaatatagtgggcacagtgttggctatgggaatgaactgggagagtagctgtcctttggccctactggggaccagagttctcatgcatgcatggcttagagcacataggcctggcattcatggtaatgattacaagttcaggcataggggtgtcattgggaacagacagacacagagaacagctcaggcatatatccagagtcctaacaacaggttctatggcaagtatgaagcttaggcaggcggtgtagtctttgtagcctgttacaccttgcagatgggactttgtgaatatcgtttgcctttgggggaaacaccatgctgcagtttccagatgtctgtcagtaactgatcccttctgcttaggacactaggaacaggaagggcagcaccccagaatacccctgaggaggggcttggctcactgacaaatcacatccatgatgatatcactgtagtgaggaaccccagggctggggatcagcacacaggccacttcatcaaaggtcacaaaaacatgcagctgtgaacaggcccaagggaatagcagagtggacttgcaggcggaaggtacaaagagtatgctctgtcacctagagtagaacaagggacaggcagcaggtcctcttgagctgcccagcaaaggcctgggctgtgttagttcacatggggatggtccaatggatgatgtcaaagacacagactccttattggttctaaagccagctgagaatggcagagactgccttctgctctcagaactggccttgatagcaggcaggagcagtctgcgtgtttatgagccctgaagagacagggttaccctgaaggtttagaagaacaaggaccttacacttgtctgaatttgctaggagacctcctatgtgtgaaaaaaggacacgaccaactcggggcagcaggattccagatcatacttgagaaattaaatagaaactggagtcaaaagattcaccctgaaagtgatggggtacctgctaagaaagggtcatcttggcgacacttcactcctgcgacagtttatttgggaatgtacatagatcgggttgttgagttctaagaatacacagtagccacaacctccacatacacagccaaggttggttattttcctcaccacagccactgtcgtctgttgccaggtactaccaactgccacagagacaccatcctggcacccagcacagggtggactaagcatcaccacctctatctttcttacctctgtctccattttcaacattgcagttttactactaggtagtcctggagttatcccaagccaagttcctgcatctcagtagatccactgttctcagacactagtgaccacgtccagagtggctacgtgctggagaacatgagcagtttggggacaggggaggcggtgtcactagatagtccagtctggtcttggattgtagctcttgatgtagcctcccacaagctctcactgccacacccaactaaatggtctgggtgtttctcatttacttcacaagtgctttcccatctctttaggtcttatcatggtacggagggagaactctcagctgtctggggtggtgtacccccctccacttaacactcacacagtggcaggtgctcggcccctgccatgagcttgtcagggcttccacctgccctgcatttttaaaacgtgaagccagggctcaggcttggctgaatctccccacttcccatgctgctgcagctggaccatggccctaggtgtcattggggatatcctgtaggacatctctcagggcctgaaaggacttttttttttttttttttgaaaaaagcttatgttcattggtgttttatctacatgtatgtctgtgtgagggtgttggaagccctagaattggagttacagacagttgtgaactgccatgtgggggtgctgggaattgagcccaggacctctggaagagcagcctcttaactgctgagccatctcttcagcctcctgaaaggacctcttagcacaagcccaatataagagtgctgcatactgagagagaaactgggtggccatgctgattcaatccctctgctgtggtgtgggtggtggaacctcacatacatgccatctctacatccatgacgtgggtactttagtcatgttgtaaggaaagggtgacacactctagtcattttcgttttggggagcatgtctagctaacagtgaacagcctacagaggactgatggtccccaggtcagagacatcacattcaggtcttcgggaattccttagaataggcacggggttgaggggaaaggagataaacataaggttgtgtcgcttctcaacagtctgcataagctggagcccacggagtccatctggagcttggtgtttcttgttaacatgagctgaactctgggtttagagttctggtttttcttagtctagaaatcccttattaagaagcattgctatggagttgtgtgcgtcaagcagtataagccaggacggttctacagcattcaccctccacaagtacctgtcatcttcacctgcagctacggtgtgtcagtacactacccaccgctctcagaaaagtgttttaatacaagggtatgtgtgccttgttacagaatgcacaattctttattatgccaagaaggcatcatgcccaactttcataaactcacaagaggttaaaaagttcctcttgttctgtcctgctggtggaaccatgaaaattgtggcttcttgaggaccccatacctttgcagcctttatggagggacatctaagtatcacttggctatgcacagcctgaatgaggacctccagcattgtacctgatccttctcatcccaacccgtctgggtcttatccatatctacctaggatgctggaagctcgacaccaagcctcatgctgcccacggaacgtcactctgtccctctgctcaacagtgccccctccacatttgctgataatctggcctctttgttttgctttgtttaacatggtacactgaagaagaaccactttccaagccagtccactgactttacaacatagaaacttcacaaaaagcattgccttttctattcaggtacccgaaggtcaaagaaccatgaggatacaaaggatgccttcaaatatcccatggtcacactgcagcaaaagcaggaacagatgcttttgtgccctcatgtatgggctttctggatgacacaggagcacgtgtccctggtaaccatcagctgcatcaaatgtactggtatccaaatggcatggagaaaggtagctttgtccatgaatatccaagcctggtgccatctccctggtgtgcccccttgacatctgcagctggtgttgagccaggggatgctgtattctctactgggcacatgccagcccctgctctgttcccaagggcatttgggcagagtgcttgtttgggtgctaggatgggtggaagtggtggtggtggtgatggtggtggtgctcatggtgatggtggtgttcatgcctctggaccacaggcatcacatagccctcaggccccagcatgggaggcaggtcccgtactacttcatgctccaccatggtaggctggccatgccccttaagtggtgagtggccttctctggctttctgccggtaccgcttgtgaccatagggctgcggtggaggctgtggtgggggctgaggaaggtggtggccatcctgagcactctggggcaatggcacggcctgcaggcaatagctgagagctttccctggcttgccactgcctggtgtcccaagaggttttcctggacccttaggagacctgaggaactgcttctcctgccccttgatccggggctgtgcagccagggcccgggtggcaggctcattagctggtatgacatgctcagccaggacttgagacctgcggtggtgtatagcgtgggcatccgactcttgtgatcgggacctgcttggaatgtgtgtggccctgccatgatgttcttgcctggcctgctcaggtggtgaccctagggacaagacaaaggtggtccagagtaaggcttgagatatgtcataactgtactatgggtttgcaatagagctggctttctgtctgggtcacgtctcagatggccacatgccccaagctgggcagggagaagtaaaagctcagccccccacatattttatactccatctgggtgtcagacacctcattaaagagcctgaatgtcactccttaaaggggtttggccactctgggattttactgcttgggtcagctggccttttgtccctattgtgggtcctattaaggagattctctactgggatagacagaacccttctaggatatgaggagggggtgacagaaagttatgtcactctagggggcactccactgagatgagatcaagcccacttccaggatagtctggttgcagcttcatgaaatgcttaaacccttaaggtcagccctatgcagtggccttagtacatggggccaattgaggtcacacttcccactaaaccctttagagtccctctccagatgccacccctccttccacccagcgtcagaggatcaaagctctagtacaaagcacatggagccagccattcccaagtgtgggtcaacttcagccagggacttctagctgatcagagatattatcacaatggacagattgcctgcatggactctcagggatgcctagtgtggatggggggatagtagaggacttggcctccagctttcagagtgccagccaggctgtagttcatgagtctctaaaggttacaagaggcacaaaaccagaaaggaacctcgtgtctacaatgctggctgtccacttgtcctcaagctggtaattctgccctaactgccagctccccctgctggaaggctcatgaacatacatctagtagttttatatcttccctaagccagagtatgtctcatacatacacctggatgttgaaccaccttgctttccaggccccttgccaatgacagaagggtaagctgtgagttcacatctaggcagaggataatggggcacccaagtggggtggggacacctggaacccaacatccagagccccttgcctacttgcaccttcagggagacatctatacccagagggtagatacagggtgggagtcctccagtacctaccaggaccaaacttagatgtgtagttctcgatgccagcaaggtctaggtagtggtttctgcgctctgtgttctcatccacacagtagggcactcgcacagagcagggctggggatcagcattgggcttcctgtatggagcagaggataggcctgacaatttgctcaaggccagactttaagtcatataacagggctgcttgcagaagtggatggtgttcgaggatgtctaaggagggacgttgactagtatccagtacccagagaaggcggaagtgacacagttggacaatgttgtatgttgtccagagaattaaggtccacaacccatgatggcagcctatcagcacccaggatactaccacatgtctcacagggcttgagtgaccctaaatttagggtgttctctgtttacctacctgggaccacaatgccccctgctcccttctgttggatagacatggtgctcagccccacaaggtaccctcactcttcatagcacacagtgtctacctgtctcagcaccccgcctgacaggacactggggaggctagcaggaagccaaccactgaactcacatctcacctgctgtaggcggatagccttctgtcagccactcggggctcatctgtgagctcaatctctgttctgccacgagtgggctcccggtctgaaagaaaggcatcccattcattcattcattcattcatttcattcatcctttgcagttcagttattcactcacccctgacccacctgcttatccacgcatgcatttcttctgcctattcatgttacaaatctgaacatccatccacactcatcacaggcatgctataaccagtgctgtccttgaactccaccccccatgttaaggcagagggtttattccacatcatacatcattatacaagacattgcctcttatacacggacaggggtgcagggatttgatagtttaggctgtcttagaagcacagtatgtgtggagttaatggtttaaaataaattaatggttagatacaaagaaaaatgactggatttgcagagcacatgtaacagaggcgaaggccaaattttatcagtgcatgggataaagtgctggggggagacgctccatgctgattatgaacagttaaaaaacaagttaaggctggccttgaacttttaaccctgttgcttccctagcgcttagattccaggcctatgccaccatgccctttgttaatgaattactttccttgctcgttctatccattcattaagcaaacagtttcgtcttctgccaggtgccaggttctgcttgggacattgtggaagcaagaagtttttgactggaagtagttagggaacctgaacaacactgatacccagggccagtggtggggagataacggtggggaagggcaagtgtaaaaagcattaagttaggtggctgagggtgtggcctgcccccgcaggcctgtcttaggggtggtgctgtccctgcaggcctggtttagggagatgctcatggagatgatattgtttgtacaggaaggctcctggcatagacccctcaccttggccagtgagaggacattccttcttgctggagggttcagggctgacagttagcttcactcgaagggtcttgctgctgccggaggagtgattgacagaggcatcgacaacctcgtagatggtgtgcatcaggctggacatgtcctggggccaacatgacagacttcaagggacagttttcctttccttaccaagcatgtattcaccccctgtccacagcaggcaccttgggtccatttactccccatcagacactgacttatacccagattagacccaggatgttgtacatggcttaaaggtagccctgctgtctgtccttgaggccagggttagcctaacctttgatttttatattctagaacattagacgagcaagcagataagctttctctctagatacactttttttcagcaccattgtcatggccaatgaagatgcttcctctgcctcttttagacacagttcaatggagcaaggacactccacaggcccaggctgcctggcctagggatgtcagagctatagaaaaagaccgtgctggaattggtgataagacttgtgcagactgccagagtaaggagacgctgatactagctaggtcaggatgttaaaatgggctctgcctccccttctgtcttaggaaagttctagtctcttctttctccccagtcagggctcactctgtctctctatctaaggattcagacattatctatccatctgtctactgaaccagattggttccagatctcaagaggtcttacccccgactcctcatcctatgggtggactgacagaggtgggcgtattacctctctggtgactttcccactgttgtcaaagtcatacaatgtgaatgtccattcttggcggttgtcttcttccactgagacgtcacactgcagtgcctgtaggcagcatgcaggggtaggaggcaaggaagaatcaactggcgcctgagacccgagtgccccaactgaggctcttcctggttgtcagccaggaagaggtagctcaggagaagttggcttgcatccctcaaccctgcttcttgcccacccccgccccctagtgaggagccgattccatgcttcatgactcagtttcccccctgtggcatctgtctctgctcatgcaaatactcagggtcacttcgagttggaggaattaggactgtgtgttcctgctgctcccctctgtcgttccctgaccagtagtgctagatacctattacatctgcctagcaacgtcaaggtcacagcaataccaggcaaacccccagagcatcacattttagtcctgtggtaaggcctcagagaggctaaggaaaccacagagctgggatgaccatggttcccatttagggccaccactaatcatgctggggcccagggagacacttacgcagatgtacacaggagaggacttacgtcaatgttcaagtgcttcttgctaagtctcagtggaccctcacggcttgctgccttctccccatcatctgtgctgaagagctggccctggccctcatggccctcagacttctcagggggcagcacaactgaaagggcaagaggaggtgagacaagggcctgtcccatgtgggtagcgtgactatcttgctctattctgttctacatgagctctgagctagagcctgctcctgtagaataggaaagtagtgagaagagagaggcctcacttgggttagttcaactatgtataccctggctgtactttgcagtctgtagtgactttcagtgagcaatctgtctcctctaggctgacattgtacagatgaggtgggagaaggaccttcaagatcaaaacagagtagtcaccactcctgagtcctccaggagagtgagtccctgtatccccaggttttctcctcattttctaatgccttcatccaaaacccactggcaaggccacatgtgggctagctgttggccaagcagtcttgtctcccctgacttccagtgtgaatggataagaagccctgtttctggggctcacatattctcagggtctcaagctgtgtcttgacaggggcccaggttgttggtcaggtgtctgtccaggtatgagctgagaggatgcccagtacctgagttgcagtaggcagtgctaggagtccctctgggcttcagcagatgtctgaagggggatctataggctagtgcacctactaactagaagccggtaagaactcatcacttctctgtgtggggctaactccaccaaagatacacacatatgatagtgactcaagcagggttcaagtcacagatttaggaccactccaccactccacaactggtgcagcaagtggccatgacattagctcaaaattcaagagcaccagtccatgcaacccaacctccccactcagtcccagaactacatacacaaaccactgtacagggaccctgtggctcaatattttgcttctcctgtggacatatccgagctgcctgctt

SEQ ID NO: 38 - DNA, 5121 bp, Mus musculus
ctacgccggagtccggcggctgctctggagcagcgtgtggctgcgagggacagcagagtctaacggagccatgcccacgaactttacggtggtgccggtggaggcgcgcgccgacggcgccggggacgaagctgctgagcgcacggaagaacccgagtctcccgagagcgtggatcaaacctcccctacgccgggagatggaaaccccagggaaaacagccctttcatcaataatgtggaggtggaaagagagagctacttcgaggggaagaacatggcactttttgaggaagagatggacagcaaccccatggtgtcatcactgctgaacaagctggccaactataccaacctgagccagggtgtggtagagcatgaggaagatgaggacagccggaggcgagaggtcaaggccccacgcatgggcaccttcatcggagtctacctgccgtgcctgcagaacatcttgggtgttatccttttcctgcgtctgacctggattgtgggggcagctggtgttatggagtccttcctcattgtggccatgtgctgcacctgtacaatgctgacagccatctccatgagcgccatcgctaccaacggcgtggtcccagcgggaggctcgtactacatgatctcccgttcgctggggcctgagtttggaggtgctgttggcctctgcttctacttgggcacgacatttgcaggcgccatgtacatcctgggtaccatcgagatcttcctgacctacatctctccaagtgcggccatcttccaggcagagacggcggatggcgaggcggccgcactgttgaacaacatgcgtgtgtatggcagctgtgccctggcactcatggcggtggtggtctttgttggtgtcaaatatgtcaacaagctggcactggtcttcttagcctgtgttgtgctttctatcctggccatctatgctggtgtcatcaagacagcctttgccccacctgacatcccggtctgccttctagggaaccgcacgctggcaaatcgcaactttgatacctgtgccaagatgcaggttgtcagcaacggtacagtgaccactgcactctggcgcctcttctgcaatggctccagcttgggtgccacctgtgatgagtactttgcacagaacaacgttactgagatacagggcatccctggtgtggccagtggtgtcttcctggataacctgtggagcacatattcagacaagggggcatttgtggaaaagaaaggtgtgtcctcagtgcctgtgtccgaggagagccggcctggtggattgccatacgtcctcacagacatcatgacctacttcaccatgctagttggcatctacttcccgtctgtaactgggatcatggcaggatccaaccgctccggggacctcaaagacgcccagaagtctattccaacagggaccattctggccatcgtgactacatctttcatttatctttcctgcatagtgctgtttggggcctgcattgaaggtgtagtcctgcgagataagtttggggaggccttgcaagggaacctggtcattggcatgctggcctggccatctccctgggtcattgtgattggctccttcttctccacctgtggtgctggcctgcagagcctgactggggcaccccgcctactgcaggccattgcgcgtgacggaatcatccccttcctacaggtgtttggtcatggaaaggccaacggggagcccacatgggccctgctgctcacggctctcatctgtgagaccggtatcctcatcgcctccctggacagtgtggcccccatcctgtccatgttcttcctcatgtgctacatgttcgtcaatctggcctgtgccgtacagaccctgctacgcacacccaactggcgtccacgcttcaagttctaccactggaccctctccttccttgggatgagtctctgcctcgcgctgatgttcatctgctcctggtactacgcccttttcgccatgctcattgccggctgcatctacaagtacatcgagtaccgcggggctgagaaggagtggggggatggcatcaggggcctgtcactgaatgctgcccgctacgccctgctgcgtgtggaacatgggcccccacataccaagaactggaggccccaggtgttggtgatgctgaacctggactcggagcagtgtgtaaagcacccccgcctgctgtccttcacctctcagctgaaggctggcaagggcctgaccatcgtgggatctgtgctagagggcacctacttagacaagcatgtggaggcccagagggctgaagagaatatccggtctctgatgagtgcagagaagacgaagggcttctgccagctggtggtgtcctccaacctgcgagatggtgcgtcccacctgatccagtcggctggcctcggtggcatgaaacacaacactgtcctcatggcctggccagaggcttggaaggaggcagataatcctttctcctggaagaactttgtagacacagtccgtgacactacagcagcacatcaggccttgttggtggccaagaacattgacttattcccacaaaaccaagagcgcttcagcgacgggaacattgatgtgtggtggatcgtgcatgacgggggcatgctcatgcttctgccctttctgctgcgccagcacaaggtgtggcgaaagtgccggatgcgcatcttcactgtggcccaggtggatgataacagcatccagatgaagaaggacctgcagatgttcctgtaccacctcaggatcagtgccgaggtggaggtggtggagatggttgaaaatgatatttccgcattcacctatgagaagacgctaatgatggagcagaggtcacagatgctgaaacagatgcagttgtcaaagaatgagcgggagagagaggcccagctgattcatgacaggaacactgcatcccataccacagcaactgctagaacccaagccccaccaacacccgacaaagtgcagatgacatggacgaaagagaaactcattgcagagaaacacaggaacaaggacactggcccatcaggcttcaaagacctcttcagcctaaagccggaccagtccaacgtcaggaggatgcatactgctgtgaagctcaacggcgtagttctcaacaagtcccaggatgcccaactggtcctgctgaatatgccaggccccccaaaaagtcggcagggggacgagaactacatggagttcctcgaggtcctgacggaagggctgaacagggtcctcctggtcaggggtggtggccgagaagtcatcaccatctactcctaacacctgcaacctggacacacctggatggggtcaggactgtgcaagctgcctgtggccaggctgggactcgccagcatgccactgtgatagccactgctctggcactcattgcctggcctaccaacatgttgcagtgattctggtcaccctgacacacacggcttcccacagacataacagctcctaggcttcctccaaacagaagatgctatatggcggggagtatctagagctgttctggtaggaacggctccttacattgttgtcggcaatggtaggtatacccaggagatctggggcagctcttcctattactggcagggcctcgcctcctgacactaggatcacctttctgcagatggctgtccagcattttgtggcagttatattttacttccaccagagaacagtacaaaggcgcctctgtacttttcatgaacctgacagataaaccagaactcgtgaacaagcacacagttccttgggtctagaatgtcactgagttgttccccattggcttctttgttcctttgagtatccttgctgtgctttctgtacagtaagcacactgaggactgtccaccctcacctcctcattctctcccccaccctcctcagacatggctcagggtaccactggaaagtgagatagtgtttacagggtaggagtgggtcaccattggaaccagtggtacctgacagctgtgttcccatctgagtcgatgccctaggagctcctgcagagagaacctttgttctgcagggctatctgcagctagcctgctttctcttctcatgggaactcagccactttatttcatacgcaccgagctgggaacttcaagcaggtgactacggagagccacagtgtaacaagcaaacggcaggaactctgagaattctgcacatagtccaccacagcaggcagcatccagagtgtgaaccatgatgtgtctcagcatacagctttgcacatgaaatgccgtcccatccctcaccctcctggagagaaaagccaggcccagcccaacaccctcagcctcagcagccacagccctgggtgtgtgtctttctggctgagtgtctcctgccatagatccttactcagccgggggccataggcgcctctgcacttttcaagaacctgacagatgatttgcactttacccttgggcattctgctctgtaggtcatggtttgttcacaggctgtaggcaacagcactgatccgttcctcacgttctgtatggcgtatttatttatttaaccctccccggggaagcttgatagaggtggcttctatgtggatggcccgtggtgccaggctctgggcatctccgacttcctccaagagaatcagccctgtccacattcacgacgttccagttagggtagaggccacgtttgcacctgcacaggttcttcaggctttgttaggcacccaggtaagctcgccagagtgactgctgcccagtgtgtgtccctgtcagcatagtgatttccacacctgcttttgcctcaattctgaacttggctcagactcctgagccctggatgtctagagcagagcaggtggctcgcctcgcctctcccagctgttaggaatgccctgggcagctggcctttgcaggttctgggtcgctgcttacaagagatgcctgtcaagagcgtccagcctcctttctgttgcaatctccatgttcctggtaactgtggccgttcagatcagtttcatgttttttcctttttatagacttttgtctttgtatgactttgttagtagcagagtaaagttctat

SEQ ID NO: 39 - protein, 1106 aa, Mus musculus
YAGVRRLLWSSVWLRGTAESNGAMPTNFTVVPVEARADGAGDEAAERTEEPESPESVDQTSPTPGDGNPRENSPFINNVEVERESYFEGKNMALFEEEMDSNPMVSSLLNKLANYTNLSQGVVEHEEDEDSRRREVKAPRMGTFIGVYLPCLQNILGVILFLRLTWIVGAAGVMESFLIVAMCCTCTMLTAISMSAIATNGVVPAGGSYYMISRSLGPEFGGAVGLCFYLGTTFAGAMYILGTIEIFLTYISPSAAIFQAETADGEAAALLNNMRVYGSCALALMAVVVFVGVKYVNKLALVFLACVVLSILAIYAGVIKTAFAPPDIPVCLLGNRTLANRNFDTCAKMQVVSNGTVTTALWRLFCNGSSLGATCDEYFAQNNVTEIQGIPGVASGVFLDNLWSTYSDKGAFVEKKGVSSVPVSEESRPGGLPYVLTDIMTYFTMLVGIYFPSVTGIMAGSNRSGDLKDAQKSIPTGTILAIVTTSFIYLSCIVLFGACIEGVVLRDKFGEALQGNLVIGMLAWPSPWVIVIGSFFSTCGAGLQSLTGAPRLLQAIARDGIIPFLQVFGHGKANGEPTWALLLTALICETGILIASLDSVAPILSMFFLMCYMFVNLACAVQTLLRTPNWRPRFKFYHWTLSFLGMSLCLALMFICSWYYALFAMLIAGCIYKYIEYRGAEKEWGDGIRGLSLNAARYALLRVEHGPPHTKNWRPQVLVMLNLDSEQCVKHPRLLSFTSQLKAGKGLTIVGSVLEGTYLDKHVEAQRAEENIRSLMSAEKTKGFCQLVVSSNLRDGASHLIQSAGLGGMKHNTVLMAWPEAWKEADNPFSWKNFVDTVRDTTAAHQALLVAKNIDLFPQNQERFSDGNIDVWWIVHDGGMLMLLPFLLRQHKVWRKCRMRIFTVAQVDDNSIQMKKDLQMFLYHLRISAEVEVVEMVENDISAFTYEKTLMMEQRSQMLKQMQLSKNEREREAQLIHDRNTASHTTATARTQAPPTPDKVQMTWTKEKLIAEKHRNKDTGPSGFKDLFSLKPDQSNVRRMHTAVKLNGVVLNKSQDAQLVLLNMPGPPKSRQGDENYMEFLEVLTEGLNRVLLVRGGGREVITIYS

SEQ ID NO: 40 - DNA, 32351 bp, Homo sapiens
  misc_feature (1)...(32351): n = A,T,C or G
tgtcgtgtgccccgcccgtcccatctgccctgcctgttgatgggccgtgccctggtaagcgttgccgtggtaacagccgccccaccctggctgcaggccccaggtgctggtgatgctgaacctggacgcggagcaggccgtgaagcacccccgcctgctgtccttcacgtcgcagctgaaggccggcaagggcctgaccatcgtgggctcggtgctggaggggacgtacctggacaagcacatggaggctcagcgggccgaggaggtgggccgggcggggtctggaggccaggcctctttcccaccccagctgcacaggacacatgccctggcatgtcctcatcgcagcgtgtcaacacggtgctgtgcgtggcgctgctgtgttttagccgtggcggtggctttgagctcagagcagcgcgctaaggcctgggagcaccagccgcaccccgggaagcttgggaggtgtgagggccattagctttccaagggcgaaccctgggaccgcctcctcccgccatgggtgagccccgtccagagccgtaatcatggttctgctgcaagctcagtctcccgctgttcaggctcactgggggctgcataagtgtgatgccgtgtgctgggggctcactgggggctgcataagtgtgatgcccgtgtgctgggggctcactgggggctgcataagtgtgatgcccgtgtgctgggggctcactggggctgcataagtgtgatgccgtgtgctgggggctcactggggctgcataagtgtgatacccgtgtgctgggggctcactgggggctgcataagtgtgatacccgtgtgctgggggctcactgggggctgcataagtgtgatacccgtgtgctgggggctcactgggggctgcataagtgtgatgccgtgtgctgggggctcactgggggctgcataagtgtgatacccgtgtgctgggggctcactgggggctgcataagtgtgatacccgtgtgctgggggctcactgggggctgcataagtgtgatacccgtgtgctgggggctcactggggctgcataagtgtgatgcccgtgtgctgggggctcactgggggctcactgggggctgcataagtgtgatgcccgtgtgctgggggctcactgggggctgcataagtgtgatgcccgtgtgctgggggctcactgggggctcactgggggctgcataagtgtgatgcccgtgtgctgggggctcactgggggctcactgggggctcactgggggctgcataagtgtgatgcccgtgtgctgggggctcactgggggctgcataagtgtgatgcccgtgtgctgggggctcactgggggctcactgggggctgcataagtgtgatgcccgtgtgctgggggctcactgggggctcactgggggctgcataagtgtgatgcccgtgtgctgggggctcactgggggctgcataagtgtgatgcccgtgtgctgggggctcactgggggctgcataagtgtgatgcccgtgtgctgggggctcactgggggctgcataagtgtgatgcccgtgtgctgggggctcactgggggctgcataagtgtgatgcccgtgtgctgggggctcactgggggctgcataagtgtgatgccgtgtgctgggggctcactgggggctgcattaagtgtgatgccgtgtgctgggggctcactgggggctcactgggggctgcataagtgtgatgcccgtgtgctgggggctcactggggctgcataagtgtgatgcccgtgtgctgggggctcactgggggctgcataagtgtgatgcccgtgtgctgggggctcactggggctgcataagtgtgatgcccgtgtgctgggggctcactgggggctgcataagtgtgatgcccgtgtgctgggggctcactgggggctgcataagtgtgatgcccgtgtgctgggggctcactggggctgcataagtgtgatgcccgtgtgctgggggctcactgggggctgcataagtgtgatgccgtgtgctgggggctcactggggctgcataagtgtgatgcccgtgtgctgggggctcactgggggctgcataagtgtgatgcccgtgtgctgggggctcactggggctgcataagtgtgatgcccgtgtgctgggggctcactgggggctgcataagtgtgatgcccgtgtgctgggggctcactgggggctcactgggggctgcgttaagtgtgatgccgtgtgctgctgaatttctgcccactcagagctttgtggggagggacgggtgagtgccccgggcgtgtagcatgctggtgccagctctgagccctgctgctgcagtcggctgccccaggacatcggggtctgagactttgtgtcttcatttctctgattttcaaacttcttatgggaagcttcacactatccagaaacggaatgatgacacgatgaaagcctgtggggtcccatcacgtcacgtcacgtcacgtcacctggagttacttctgtatttcttgctaaagcagggagcttttgagtgcccacctgcgtgattttcatgccaagggcacctcattcccaggcagggctggctgccgtgggcgcctcgagcctcctccttccccctcatgtgtgtgggagtctgtggggcctataccacgtgcctgttgcagtggtgtgtgtccgaggtccctcccatgcgggtgccccctctgtccttgctgtgggttgggagccagctccctgctgccaggcccccactgggaccttgtgggtgtgtccaggcatctgcagccgccccccaccgcctccccggtccgtttctctgcacaaccacagccgcactgaggcccgtccaggtctgggccggtcagcctaggggtgggaaccctgctcaagagggctgtgggcacgtggatggtagcagcctcaggtggtgtggcctagggccaggatcccatggaggtaaaaaatggcccccgccgctcccgccacgttggccacgtggatggccaccttctcaggctgttgcacaggttcgccttcccagggaagacaggagatgctctgggccttccctttccctgacggcggcgtcatggctcaccacgggttcaggcgttagctgctattgactgtgaacccgtggatttaggtatcgtggttttcggggggatgttcacggtcctggtccccatatgtccctttccgtgttccttatcccatgctggaatgctcttaggaggaatcccggagttggaactgccctgctggcgtggattctaagaatcctggcactgcctggcctccctggaggtgtgtgagggcgcgtctgtgcgcacgagggacagggcagggattgcagtgactgggggatgacgggaccccctgccacgctctgccacagtcttcacggccatgggaagagctgcgctcacttatactctcacgttaacggagctcacaggcagatcctctccgtccgacagcccttcggctggggggtctggggcagcctcagacaggagcccgctcttgcggacgggaggacgagcgcaccctgcccccgctgctctcagcgagcctttggctgtgacttagctgcattggttgcgagggctggagccagccgcaggccccgccttcccttggctgcctttggggctgcactgccctggggagccgtattctcctccatcgtggctatgttagtgtgaaattagagaaatctgggcaaatcttttttatttatttgttttttaatttttatttattttttgagacagagtctccctctgttgcccaggctgcagtgcagtggcgccgtctcagctcactgcaacctccacctcccgagttgaagcagttctcctgcctcagcctcccagtagctgggattacaggtgcccaccaccacgcccggctcatttttgtatttttagtagagacggggtttcgccacattggccagtctggtctcaaactcctgagctcaagtgattcgtctgcttcggcctcccaaagtgctgggattacaggtgtgagccacggcagccggtctgggcaaggctgtaaagcatggacatttctctaagaagcgtgcagcttcgtgactcatgcagtcgccagggaggctcatgcgcgcccttgtgctctgttctgtgtggcactgattggcataaaaggggtcctaaggccctggtgttcttgctccccgctcgtaaagttgtcctccgggttgaggtctgtctgcacggaggcctctgcgactgctgcgccgggcaggtgcggggacttgtgataacagggtccccgacacggtgctgacttgtgataacagggtctccccacacagtgttgagttcctgccaggccagggcagtgccgcgtcctcctgaaaccctgcagtcctgcaaggtggttttcccaacagtgaggccagaagagagttgagatccccagctccgactcctcggagccagcacgtgggggtgagcacagcagccagtcatgtaggaagtggccccgtgacgtggctccagcacttggaggccctcagggcccctccagtggctgcatccaaacttggctgatcctgaacagccgtttccctgggctccgttctccggccagatcggggcacaagaacagagaacctgaattgccctgcagaggggtctcgtggggatgagaagcagccgcataaaggggctgctgtgtggcctttgctgaaatagccacacttcctgccttcttcccacatgacgcccgatgcgggggcttccctgtgccttcctgcccagagacggctgtgtccaccccgcagcgtccgcctccagccggtctctgcctctctggggcccctgcctccgcttgctggctggtgccccttgggggtaacgtgttcaggcctttcctgacctaaacaaaagtctcaaagaggagcatatctgctggccctgcaccctgtcccgtcttgcgcccgggcagctgggcagaaggtggaggtgtctggagagcagggtaaggacgaggggtgcctgaggaggagtggggccgtgggagaacattggatgttgttttgtgtgtgaagggctggtggagctctaggtgtgagccagggtagggggtgaggataccagtcaggctgacgtaggggctgctggaatctcggcaaaggaggcaggtggtggctctgatccctgagtggcccggggctgctgtgatgggacacagaccacacggctcacagcaaagggcgtctgttctctcctagttctggagcccaggagtctgagatgaaggagaccgcaggccacgctgcctccagagtctcccgggaggatcctcctgcctcctccagctcctgggcccccgggcgaccctgggcgcctgtgcctccacgcagtctcttcctcccagtctgagagctcttcctgccttcatcctgtaaggtcacttgtcagtggcttcagggcccacctctgacccaggatgctctctcaacatcataacctaattacagggttcttcaatacatccataaagacaggttttccaaataaggttgcattctcaggttcctggggctgggatgcgggtatcctcttttttggggccactattcaacccactgcaattgagctttcggccctaaaattcatatctgccacacatgtacagtatgttcaccccatctcagtgtctcctgaagtctcaggcctgcacagaccagctctgagtcccaactctcatgtaaatctcattgctcggagctcccaaatctcatcctctaagcatccaaaccagaagccagtgaaatgtggggtctggtccatcctggacaaaactgctgtgtctgtagatgtgcaagtgaggaggtggttatcccagaacgcagcaggggacaagccaggagaggcatgtttgctccaaaagggagaatcaggtgggaaggggccactggtaccacacaaggctgagacccagcagggcaggccctggggttccagggcctgaaggtcagagggtgggaggcctgcgtccacacatgcatggctttagtgcgtggcaggtcctcggccacgcacgtgcaaaccccatggagtcaagccgttccgtggcgcagcctcatcagacacccctgggaagagactgcacacagcagtgaccccctccaaccccgggaggagaccacacggcagtcccccacccccgccccccgccgttgctgttagggtgctgcatcctggaccccacggcctccctttgaagagctgctaatttggcccattttcgggtgtttctgatgcaccaggtggatgaacctggcccagagcgtccgagtgaactgggggtgggtctgggatgttgtggatcgcctcagagaactgcctggcgttgtgtccccagagcagccctccacatcccctgcacgtggcatcagtcacacctgctctgtgtctctctccccagtgtgtgagcacgcacatacacacatacacacacagcggccgggagcaccgcagcacaccgttgagccttcgggccttccctcctgctgggtccacagaggaggtggtgcgggtgccctggccaccgtgggtggtgggcgtgggtctgtgcaccccattcctgctgtagcaccaacctgtcctgtctcccgcagaacatacggtccctaatgagcacagagaagaccaagggcttctgccagctggtggtctcgtccagcctgcgggatggcatgtcccacctgatccagtcggccggcctgggcggcctgaagcacaacacggtgctcatggcctggcccgcatcctggaagcaggaggacaaccccttctcctggaagaactttgtaggtaggcatggctggcggcccttcggcatcccctcaccgtcccctctgtgtcctctcagtgtcccctcgctgtcccctcgctgtcccctcactgtccccttttcgtccccactgtccccttggtgtcccctctgcatcccctcgccgtcccctcactgtcccctgtgtgtctcctcagtgtccccttgctgtcccctcactgtccccctctgcctcccctcgctgtcccctcactgtcccgtgtcccctcagtctcctctgcatccctttgccatcccctcgctgtcccctaaccgtcccctcaccatctcctcgccgtcccctcactgtcccctcaccatctcctcgccgtcccctcgctgtcccctcaccatctcctcgccgtcccctcgcggtcccctcaccatctcctcgccgtcccctcgctgtcccctcgccatctcctcgccgtcgcttcgccgtcccctcgccgttccctcactgtcccctcgccgtctcctcgctgtcccctcaccgtccccttgctgtcccttcaccgtctcctcgccgtccccttgctgtcccttcaccgtctcctcgctgtcccctcaccgtcccctcactgtcccttcaccgtctcctcgctatcccttcactgtctcctcgccgtcccctctgtctcctcgctgtcccctcaacgtccccaggcctgtgcgctgtcaggtcccgatgggccttgaggccaccgacccgagggtgtgtgctctgaggctgtcgaaggccctggccctgggagcggccatctgaaagtgtccaggcactccctccccttctcccagagccccgcaggggctgggggattccctggacacatgaccagcagctgaactctgctgtgagtctctggctggtccttggaggagctgacggagtgagggtgggggctttgtggggacccccctcgcctcgccgtgcccgcccctgcactggctgtgagtccccggggaggccccttccgcaccctggcctcagatgacctgcggacggccgcctctctccgcagacaccgtccgcgacaccaccgccgcgcaccaggctctgctggtggccaagaacgtcgactcgtttccgcaaaaccaggagcgcttcggcgggggccacatcgacgtgtggtggatcgtgcacgacggcggcatgctcatgctgctgcccttcctgctgcgccagcacaaggtggggcgtgcgacggggacacgccagccggagcacggccaccccacgtgctgcgggccgggacgggctcctctgaggccccacagccatgccctccctgtctgcaggtgtggaggaagtgccggatgcgtatcttcaccgtggcccaggtggacgacaacagcatccagatgaagaaggacctgcagatgttcttgtatcacttgcgcatcagcgccgaggtggaggtggtggagatggtgagtcccgagggcttgaggggaggaggccggggggaggtggggaggaggttgggggcggcccgggagggctgtgggcctcgtgaggtgggggtggagggggaagtggagatcgggagggctgtggcctcgtgaggtgggggtggagggggagatcaggaggtggaggtggaggtggggaggagaaggtggtggagaatgtggcggtggatgacaagcgatgcagaggatggacaaggaggcaaggaaaaaggaaatcagccagaacaccacagaaagcacagagcaccgagcagatagcacgatggacaccacgagtaacacggagcagcgagcgaagaccaagagccggcatcagcatcatcaagatcaaacaaggaacaccgagataaccacggaccggagaacacagaccaggacacaaacaacaccacagaggcagtagacaaggagggatgcacactcagaaccacaacccgaaaagggtgcacacacacaaaatggagaaacaccacacccacggatggaaaccaaacaataagcagccgagcacccggaggacaagggggcccaggggtcagcagaggccaggcagaagctgacaccgtggcgccaaaaaggccccgggcagtacagacaaaggccgaaaggcagcataccaccgaagcgtaagacccaggaaaaggaacggcagaaggcgcagccagcccgaacgaggccacaggacaaagaagagcggaaagaggagaaggacagaacgaaggacaagcaaagacaacacgaaacacaaaacccagagccgaccagaaaagacaacaggacgcgcagggaaggacgagacgccagacaaacggagagggaggcaggcagcggacggcccgggaaagcgcaagcgacgaccagagccaagagccgcgcaggagagggagacaagagagaggcaagggaagccaacggcaggaaccggcaccgacaggcaaagaagggcgagacaannnnnnnnnnnnnnnnnnnnatgtcgaccatcgcccggtcccccccacgctaacgcccatccacctccccgggccgcgccccgggccccccgaccgcggtcggcagccggcgtacggccgcgcgcctcttcgcgtgcggccaggccaggccgacggccggcggcggacgggccgcggcgacgggctggcgcaaggcggcggcccgcgcggggcggctcgggcgggggccggcggcgccgtgagtcctcggccggcgggggagatcaggaggtgacgctggagatggggaggagaagctggtgccgattgtgccgggggctgccaggccttgcggggtggtcaaggaggcttggttttggaatcgccaggacatcacagaaagcacagagccccgtgtgttgcttgtggacacctcgtgtaacacgggtgtgggtgttgccctagagccggcatcagcatctccgtgtcctccatggtcccgtgtcctcctcggcccgggaccccgtccaggacctcacacctcagtggtgttgccatggtgggtgcacctctgagcacctcccgttttgggtgctctccccagatgggctcaccttcccacggctggaaaccacacatcagcagtcgggacccggggagaggggcactggtcagtgaggccaggctgcagctgtcacgtgggacagacaggccctcggtcagctataggcagggcctggacagagactcgtcccgtccttcacgcctggagaggacggggttgatgggcggaggcctggcattggagcgcttgcccccggcccccaagcatggagctctggatcctgggggtctggtgggccccttgtgctggatggaaccatgcctgctcgctaccagcccacccggatccacggctgtgccttcccctccggtcctgctggcggtcccgggactttgtgggttctgaccccacttggatcacgccgacaacactggtcttgaagtcagaacccgcaaagtcctggtttcttccggctcccgtgaccccagcgcatggttttgcaggtcctcaggggcctggactcctggaggtgggtgctgggaagacataaagctggatagagactgtcacgctctcccccaggaagccacctgtgcccctgcagcagcctgggaggtgcggtctctccagccccgcagccccccagtcccccagccccccagccctgggtatggcagaggccccgagcacctgctcctggtttgtgtcgggctgtgagtgaggccaggcacggcttcgtgcctcaccgacaaccttctgtgtttctgtgtcagttcccgtggaactcagttgtcctgtggggttgttcttcctcttgccctgcaggacctttcctaggccgagggctgcaggcctgcgtgacgctggatggttttctgcccagttttgtacactgggcttagtttccatgtggctgtgtcttcggggacgatggctggagtttgtcttgtttggacgaggctttgcgggttcaaggttgtaggggttattattggtgctaatagtcgtatgaataacgttatttccaagtcataaaaccgcttagtaaaatagtaacaaaatgctgcctgggagaaccagccctgccagggggccaggtggggcagccactggggcccagaggaaacaggcaaagtgagcccatggccccagccgcacccccagcccctccgtggtgccagaagcagctccccagctcctgagcaggggttgttagctctgaagtccgggaacctggagctcccagcaccccccatgctcccagccatgtctctggcagggctggggctgcccacccctccgtagccctggccgcagggacaagtgccacctggctggagaggggcgtctgggtcgctgccattcagtctggcatgctgtttatttttttaaaaaaagttttgagacagagtctcgctctgtccccaaggctggaacctccacctcctgggttcaggcaattctcctgcctcagcctcctgagtagctgggactacaggtacacgtcaccatacctggctaatttttttttttttctttgtatttttagtagcaatggggtttcaccatgatggccaggctggtctcgaacttctgacctcaggtgatccacccgcctcggcctcccaaagtgttgggatgacaggtgtgagccaccgcacctgatctggtgtgctgttttaaatactggtgcttaacaggcacagctgctcccaactcccatgagccgggtgcggcgggtgagacacagggatcccgcacggcgggtgcggtgggtgagacgcaggggtcccgcatggcggatgcggcaggtacggcgggtgcggcgggtgagactcagggatcccgcacggcgggtgcggcgggtgagactcagggatcctgcacggcaggtgcagtgggtgagacgcagcagtcccacactgtggatgttccgggtgaggcgcaggggtcccgcacggtgggtgcaatgggtgagacccagggtcctgcatggcgggcgctgaggttgtgctgtggcttctccatgtgttctgggtgggtttcccatggtgccaagcccccctgagcatagacaatgacacctgtgagcgtggatcatgcagccccatggggcagtgcctcgccctgagccgtgtgtgccaggttggtttgtggctgtggccttgtcctcacagctgcccttgtgcccggtcagagggtcctggggagggacatgagcagagcgtgtgtgcggcgtgactgcccatcgtgcgctcacaccttcctggccactgggcggggggcctgagagccagagggggcctgtggggcctgggacgcgtggcctttcccaccgctcagggtggctcggtctctgggtaccaggctggtgttggagccatccgtggttctgtgcacaccgggcttactacgtgcttgggaactttctaggttgaaaacgacatatctgctttcacctacgagaggacactaatgatggagcagaggtcgcagatgctgaagcagatgcagctgtccaagaacgagcaggagcgagaggtacgtgggggccgtggccacagacaccaggctttctgagaagtatagccgacttcgctgagtcttttctgggaccctcctgcagcccacgacggtcctccagagagcatgcctcaggtactgcgtcgcaggctcagcccccagcctgcgtggaggtggcagaggccctgcaggagcacaggagtggcgtcaaagccagagctcatcggagcctgggcgtgcgggtgcctggttagaggaacggcagcctgccagatgcatgctcatgtgcaggaagggacgagggccgagacctttgaacttagcttttctaaccgagcagcgtgcaggcaggagacatggggaccctccccaagggcagtgccctctgacagggtcagcggcttctgagccggatgagtgcccacagctgcttacgatggctgctttgtctcacagcctgaaaccctggagcccctcagtgcccttccccgcagcatgcacagatttctgtcctgtctaagaccaagtgggaggggagagtgagtgtgcagggagggagggaagcgagctggaggggagttgccaacccccccaccccccaccccccgacacagacctgtgcagcctccgtgcgtggaagctggccgcctggctgcagcggctttggctccgtgggtaactgtaggctgctgaggacgtctgggtgtatccatctgagttatactggcctgggccccatggccactgtgagaccccaagggcaggcgtctttgtggtcacttcgcactggaggacagcacgggggtcacctggtagcgggatgctcagctctgtgaggtcacggcctcatggggtcttcgtgggtcccacttggctggtatcacacacgtgtgtgtgcagaccaggtgcaggtgttggttttctgagactgcagtgacggcggaggcaggggcagaggatttgcctgccctggggccttggcctcagcaggaacctgcagtacacgggtctgcgtgtggggccatatgtgctgacagccggaatcactaagcagcgactgctgctctcccccaacagagaaaggcgtgtggagctgcggtcctgtccactcccagaccccgggcaggtcagggtgggcacagatgcaggacacggggggccgcccagcttgtccgtggacagagaccccttccacgggggtccgggcagccgggagtgtctgggaggacccacatcctctgttttctgtccaggccaggtccctgagatccggcagggtcgccctggcgtcacaagggttcagcccgggtccagctaggaacaagaatccacccatggcttcatgggaagttcagtgtggagagtcagcaaatgctgaccgaggagggaccgggagcgggaacagcaagctcgagctcgaagggcccctcctgggccaggtgggggttggaggtgtcaccgctctgcagaagccggggtttggatgagctgctgtgcagacgctgggtggacaccctctagtgacttacacggtggccctcgggccaggtgggcggcgctggctctgccgagagcgggcagcccttgggctctggtttcacgttcaaggccatgggaaatttaggctgggccgggcgccacaatgagtagaggcctggggcccactgtctgtgtccagagagggaggcagccccaggccctcccccatctgtgccaatctcttccctttcgggaaggaccgacatccaagttaaacagttttatccggggaagaagaacctggtccagtgaaatcactctggacctttggctttttaaaatcaccccggggctcacaaactcctgatgcccctgggacgagtggctccccgggctgcgtcacaaactcaggcggggctccagccacagtgggagaggtggccattccggtgtgtgcataaataccacttccaaggtggcacccgtgtctgggagctcccattggcctacctgtcaggctggccacgacagcacggagggcgtgaagggtgcagggaggaatgagaacccagtggagggtgtttaaccaccaggggctgcgccattggtgcgatctcgcggtgagggcgccacttccccttcggcgcctacagctaggggcgtggacggtgttttcattttcctcggattgtcagaagtgacgcacagggggccggccctgtcattggccccagcggtgccccacagggcccctgccagcctggccggcccccaaacgtcccctggctggtcagacacagcctgcttccccggggacagggcctggatgctggtacggccccacctgccccaagcctccctgagacggggatgcctgtgggcgagcaggtggtctggggtgaacacgtgtgtggagccccgtcaggtgagggggagactctgccagcacgtgtcacctcctgtcagtacggggtcatggggcctttccagttcagggccagggcgggaaggtgagggggtgagcgtttggtcaggaagcctgggaggagggaggcagtcacgggggcggcgcaggaccagtgtgggacgccaggctgggtcctgggtcaggcacacagggcccttcaggttctgtgagctgccctcacctccggcctggcatcccgggtcgctctcgcccagaggagttttgagaccggctggtctcaccgagtcccgggcccgccaggcccagctgatccacgacaggaacaccgcgtcccacaccgcggcggcagccaggacccaagcgccgcctacgccagacaaggtgcagatgacctggaccagggagaagctgatcgctgagaagtacaggagcagagacaccagcctatctggtttcaaagacctcttcagcatgaagccgtgagtgtccgtgcgtgtggcctggggggaacagatcctggcagtgctggcccggcagtgaggacagagtcccttccctgaccactgaagagcttcggggcaaccctgcaggccagtgggcccgttagagaacagggagccgcctgagtgggcactgaggggtccttttggtgccaaggccgggccctgagttcagccctgtggccgggcgctgagggatccttctagtgccaaggccgggagtccttgtaagacctgggtgccaagtgctgaggggtccttctagtgccaagcgctgaggggtccttctagtgccaagcgctgaggggtccttgtaggacctagggtgggtcctgatgttaaccccacagctgggtgacgagcagtcctcctggtacctgggccagccctgaagtcagccctgcggccaggcctgctttgctcaggcaagcctcactgcagcaggcagatgggtctgttccatggaggcgaggaggcttgtgccgctgggcacagaattcctggccttcaccctgtgggtagttcaggctgctgtcgggccctagggcctgccctacgccaaggctcccacctgtggccttgggctgcgaacaccagggctgtacagggtccttgcgggtgtgggtttggttctgcagacgcagcctctgagttccagatgagagcgcaagagacacctctcacccggggtcagagccagaccctaaagccaggttctcaggaagggctgggggctcctgggccctgtggggtgggatgaggcggcgtcctcctgggcagccatgcgatctggaacagcctggtgctctctcctgaagtcagtaacacactcttgtttttttctcctgcatagagaatggggaaacctgtaagtccactcgctacaaccaggtcgccttccgggcccggttgccctgcatgcctgtgtgtgtgtggcctgcgtgtgtctgtgcgcgtgttctaggcctgtgcctgccccgtgcacggtggcttgtgtgcgtccgcgtacagccagagctcacccagagctgctgcggctcccacgtcagtttcctgttgccttcgctcccctctgttcacggtggctccagcacacgcctgaagcctcttcctaagtgaggcccaggaactgagacctgggaggtgtccgagccgctccggagtggaggggaggcgtgcgcctcgcagggcccgtcagtgagtccatccacgtccttctgggtcaggcgctagctgagtcgcgttcccacctggaatgccttccatgttaaagctgtccagcctccaggcggagaggggtgcagatcagttctctgtgtggtcggaccctcggcaggagctacctgcgtctgagctccggggcaggtgggagggtgtaccctggacggacccccagggtgctccctgggagtcctcgatgccgtctctgtcccctgcctgcccccgccagtaaccgcctgggccatgttttccttgtgggcaggcagtgcctggtgcctgagtgaggaacgccttggctgagtggccacacttcccttccctttttatctttaaccccgaaacctgaattaatcagactcaagaaactgtgcagctatgtgcgaggcgtgcagggaatccctgtacttcctgctccgttctgtaaatctgaaagtgccttcagaatagcgtgttaattaaagccgcagaacgacgtagacccaggagtagggtttgacacacacatgcacaggcacacacactcggggaccctcagtggcacctgtgcctcctcccagcgccggggcttgcctccccttggtcggggcgggggcaggtccccacaggcctgtagggtcaggagaaggtgggccagaatggacaacgcgtgggctttgtattcatgtgtggcgtgcgtctgggatggcattgactctcttggcccagcagtttctcggggttgggctgggagaagccctccgaagatctggaggtcggccctgacctcttctgggcagtgcaggcgtgagatgtgcgtggcttactgtgacgtccccgggagcacacttaacggatgtctgtttgtgtgcgtgctcgcatgtacctgtcagcgcacctgccggtggacgtgtacctgcctgtgtgcacgtccacgtacgttagtgtgcatgtctgtgtgcacatactatgcatgtcttacatgttagtgtgtctgcacgcatttgcacattgtgactgcatgcctgtttgtacatgatagtgtatgcacttgtgtattagtgtgactatgcctgtgtgtgtacacatcagtgtgtctgcatgtatgtgtgtgtgcgtatacacattagtgtgcgtgtctgtgcctgtgtctgcactggtcctccttgctgtggcggccggcatactccaccagtagccaagggccaggtctccgcctcaccccagcactcactggctgtggacacgctgcccactccgacccccctgtgctcctggcctgctttcacttcctggagctgctctttgtccccaaacacactggtaattgtggtctatccagaagtcgaattcaaagttccaagttcctggcacgaaagccccttgactgtgctgtggacagagaccccatctgtaattagaccaggctggagagaagatagaaggtctctccctgtgttcctcctggaaattggtggttatgatcacgtttatgtggcttaagcgtcaagcggatcaaagggcgtgagcctggatggcgtccgtggggcctctccgtgaccctgcgtgggcggcctctgtctgtccgccgccgcccctctgcgtccagggcgctggtgacctcccccagggggccacagtcacgaccgcacggctgcagctggcctgagacccgctccgactttcaagtccacacacgggccgggtttttccaacacagaaacgcaagtgctcccctccgcccagcgtttccccaggtggcctcctggaacgccagttctgctgcagtttaggggcctgcctaggaggggaccgtggggtagaggagggagataagctctgtcccgcaagggcctgagcacctcacagcatgattctgcagtgtccccaaacctacttggttggggagcctcctgtggggctgtggccgggcccaggccgccagggacgctttgagacatggaccggccacagcagcttcagagagcagacagggagggtcgtggagcagagctgcgttgtgaggacggaaggcgggggctggacggccacacggtggaagtgcttgtcctttagcccttggccagacaggggcagggtgggccgtaggaggggacccagtagtggccactgagggcctgtgcctccagctgagtcctcggcataccctgtccttgtcaggcctgggagcttcagcagcaacggctgcacaggccggtgtgggggactctgggcctttccttcctgagcttccggccccttggacccagttgtatcaggaccctcggagaggaggccatgtgtgcccagcctgacgggtctgtgtttggcagtgtctgacgtggggtttaggggcgatgatgtagatgtcaagagaagcgtgtcagccttgaaggcgtcaggcacatgggccacccagacggcttccactgttctgcctgctttgcagatgtagatgtagttaggaaagcgcttgcggtttgtgttgtgtgactgtagcccttagaagcttggcagccttagtgggctgagttctaggtccctggaggccaaagcatcccgctgctgaacgcccgccctggctgcagtcagcgcctttcgctcggagccgccacttctgcatccttcagggtcagagaatccgcctgatcctgactcacacagccctttccaacacgtgtgaatgcagctcatcagggctcagctcagcctcgtgtccggagcgtggggtgcacccgccgcccgctgaccgtgcccacctcccctgcagggaccagtccaacgtcaggcggatgcacacggctgtgaagctcaatggcgtcgtcctcaacaagtcccaggatgcgcagctggtcctgctcaacatgccaggtcctcccaaaaaccggcagggagacgagaactgtatcctttcttgcagtgtgcctgctgagcgtgcgggcaccccctggtggcttctcgctaagacctgggtttgtgggtgctgggagtgaggctggcttcccgcctctccttcagccccaggctctgggagctacgaccgggatgcagtggggctctgagcccagtggtgaccgggccagagttggggccagccctggcattggtgtgggggagggagggcccgcctacagtaccagccccactgtccgcaggtgctcagggctgccctggggctgggaggctccctgtcatgcatccccacagcagctgtgcattctgggacctccgctggggctcagccccaccctgcgccgacaacggtgggaggtgaggagcccagctctcggctttaaggccacaattggtcgcagctttgggaatttgtgctttggaaggagaactccgcagtgcatctgggcgtattggcacagacagggtgacgcctggcacatccctgccaggttggcaccaagaactggggccagtgagggcatgtcctccatgcgtcctgatcggaatccgtggcccaggtcccctgtaggctggtgaggacccagtcccgtggctggggttccctgtcgggtggggtcagcaccgtgggctgtgtcgctgtctctgctcgtcctccctgtggccacggtgctccctctctttcccgagcactggcccctctctcccctgcccctccccgcctggggggtctctctaatccccacctctcttttcaccttggctctgggtttctcaaaccaaatcttagctaaccaggagaggataaacctcactcctatcacgatttcagctacacacgctcaggtaagatcagctgtggccttaactctgttgaccacagacatggagtttcttgaagtcctgaccgaggggctgaacagagtcctcctggtcaggggtggcggccgggaggtgatcaccatctactcctaatgcccaacagcatcacggcactctgggacaggcacggaggacggcgtgggcagcctgggcctgggcttggcccagggaaacagacggcagacacacctgtcccccagtgatgccacccaagctgcccatggggcttcctacggaagtttctaggcccgtcacctagggctctcctgttcagccttaacaggctcagcaaatcagggcgtggctggacgatttccttgcatctgagggcagacgctgctaccggagtgacctggacgtggccagatcttctcgcaggtcacaagaagccagtgagcccttgccttggtttctggaagttcttttccttggctggatttacccagtggttaggttgcatttctaccccatccagaacattcttggaagagcacccggagctgaagctgtccctgatgatgaaggtgaaacgtcagccctggccatggctccgctcagggccccggtcacctccgagtcactctgttccttgactgtctttgtgtttctgtacctcaaggcactgaagctggaggactctgtccatgcccgtgtcaccctcgtgtgggagcctctgggctcggcaggtccacatttcatgagctgaggcgtgggccagggccatctggaaagggaactcggcttttccagaacgtggtggatcatctgtcgggtgtgtggtgaacacgttcagttcatcagggcctacgctccgggaaggggcccccagctgtggctctgccatgccgggctgtgtttgcagctgtccgagtctccatccacctttagaaaaccagccacttcttttcataagcactgacagggcccagcccacagccacaggtgcgatcagtgcctcacgcaggcaaatgcactgaaacccaggggcacacgcgcgcagagtgaacagtgagttcccccgacagcccacgacagccaggactgccctccccaccccaccccaccccaggagcacggcacacagttcagcctctgagctggctcacacgtgccatccccaccccggtgctccagggaaggaggacacggacccgacgtgggaggtcctcaggcagcagtggcgcctggtgtcaggtctgtctggctgagtcccgggcgtcccctgccatggcctgtgccttgcatggaggcggcggtggcactgaagagatagctttcaagggcccaacactttgcacttcggctggctgtgagtttctgctttgtaggttgtggtcacatttgcaggctgcgggcagtggcaccgacttgggcctccctttctatgtggcatatttatttatttaaacaccccagggagttacgtggtaacaaggttgtccataaagaggttgcttctatatactagaggccccagatggccaggccttgggctacgtctggcttgcatggtctcccaagggaatcagccccatcaacaaagttcaaatcggggcagaggctgcacttgtgcccccagatgtttctgaggagccagactagggctggcattgctgtagagtgacggctgctgcccagagcgtgtcccagacatcacagcggggctcagcagttcccacagcctctgcctgccttggctaagcatgagttaagcagcaaaacgctcctccatgtctggatggggccggcaggtcctgtgtcccctgcacctggaggagagcaggctagaggcacagcggccacatggtgctggctctgaacgttggttggtggctggaaaacagccctgcttctgagggccgctcagttctgcacacgaaaccacctcctgagggctcagctctgcccccgccctgggctgcagcctctgcacgcaagcaccaggcatcctttgtgttgtcaactccgtgtaaccagtaactacagccatttacaattgactccgtttccttttgtaggtttccctgtctgtctgtgttagtagaaaaataaaatcctatgaaatctgagtacgttgaagaatctcttgagtctcattcagcatgaaagacagctggagaaaatgtactggccgccccttttctagcaggagcgtcagggctgaccagccacagccaactcaggtggctgaagagtgaccatatgaattggacgagggcttccaaatcatgtcatcggcttggaaatgaccttaccccaaacttcctagtgctgtgtgttgaagtgacccaatctctgtatttctgagacagtctctgttgcctaggctggaatgcagtggcgtcacctcagctcactgcaacctccgcctcccaggttcaagctattttcctgcctcagcctcccgaatagctgggatcacaggcgtgtaccaccacgcccagctaatttttgtattttagtagagatggggtttcaccatgttggccaggctggtctcgaactgacctcaagtgatctgcctgcctcagcctcctaaagtgctgggattacaggtatgagccaccatgcccggccattcgatttataatttaatttatataaggatggaggcaccagagagtccgccatgagtggggacagcgtgttctaactcgtgagatgccaactcacacctgtgatggtcacagccaaaaccagagaatcgcggggaggacgtgcggaatcggacccctcttgcagggttgtagctgcacgggaagggcctgtggttcctgaaagtgtgagagacagagccgccccttccccggcaggtccactcctggtgtgtggcacagcctcaggaacgggtgcacgcaagttcacagcagccagaatggatgcagcccgagaacatgctgagtccatgtgggccgtgcctgctgcgggcctcactcagctagaaccaggagccaagcttggaagcctcacgctcgggaggaagctagacacaaagggtctcacgctgtgggactgcacttaacacgaaatgccagagtgggnnnnnnnnnnnnnnnnnnnnnnnnnnnnnnnnnnnnnnnnnnnnnnnnnnnnnnnnnnnnnnnnnnnnnnnnnnnnnnnnnnnnnnnnnnnnnnnnnnnnnnnnnnnnnnnnnnnnnnnnnnnnnnnnnnnnnnnnnnnnnnnnnnnnnnnnnnnnnnnnnnnnnnnnnnnnnnnnnnnnnnnnnnnnnnnnnnnnnnnnnnnnnnnnnnnnnnnnnnnnnnnnnnnnnnnnnnnnnnnnnnnnnnnnnnnnnnnnnnnnnnnnnnnnnnnnnnnnnnnnnnnnnnnnnnnnnnnnnnnnnnnnnnnnnnnnnnnnnnnnnnnnnnnnnnnnnnnnnnnnnnnnnnnnnnnnnnnnnnnnnnnnnnnnnnnnnnnnnnnnnnnnnnnnnnnnnnnnnnnnnnnnnnnnnnnnnnnnnnnnnnnnnnnnnnnnnnnnnnnnnnnnnnnnnnnnnnnnnnnnnnnnnnnnnnnnnnnnnnnnnnnnnnnnnnnnnnnnnnnnnnnnnnnnnnnnnnnnnnnnnnnnnnnnnnnnnnnnnnnnnnnnnnnnnnnnnnnnnnnnnnnnnnnnnnnnnnnnnnnnnnnnnnnnnnnnnnnnnnnnnnnnnnnnnnnnnnnnnnnnnnnnnnnnnnnnnnnnnnnnnnnnnnnnnnnnnnnnnnnnnnnnnnnnnnnnnnnnnnnnnnnnnnnnnnnnnnnnnnnnnnnnnnnnnnnnnnnnnnnnnnnnnnnnnnnnnnnnnnnnnnnnnnnnnnnnnnnnnnnnnnnnnnnnnnnnnnnnnnnnnnnnnnnnnnnnnnnnnnnnnnnnnnnnnnnnnnnnnnnnnnnnnnnnnnnnnnnnnnnnnnnnnnnnnnnnnnnnnnnnnnnnnnnnnnnnnnnnnnnnnnnnnnnnnnnnnnnnnnnnnnnnnnnnnnnnnnnnnnnnnnnnnnnnnnnnnnnnnnnnnnnnnnnnnnnnnnnnnnnnnnnnnnnnnnnnnnnnnnnnnnnnnnnnnnnnnnnnnnnnnnnnnnnnnnnnnnnnnnnnnnnnnnnnnnnnnnnnnnnnnnnnnnnnnnnnnnnnnnnnnnnnnnnnnnnnnnnnnnnnnnnnnnnnnnnnnnnnnnnnnnnnnnnnnnnnnnnnnnnnnnnnnnnnnnnnnnnnnnnnnnnnnnnnnnnnnnnnnnnnnnnnnnnnnnnnnnnnnnnnnnnnnnnnnnnnnnnnnnnnnnnnnnnnnnnnnnnnnnnnnnnnnnnnnnnnnnnnnnnnnnnnnnnnnnnnnnnnnnnnnnnnnnnnnnnnnnnnnnnnnnnnnnnnnnnnnnnnnnnnnnnnnnnnnnnnnnnnnnnnnnnnnnnnnnnnnnnnnnnnnnnnnnnnnnnnnnnnnnnnnnnnnnnnnnnnnnnnnnnnnnnnnnnnnnnnnnnnnnnnnnnnnnnnnnnnnnnnnnnnnnnnnnnnnnnnnnnnnnnnnnnnnnnnnnnnnnnnnnnnnnnnnnnnnnnnnnnnnnnnnnnnnnnnnnnnnnnnnnnnnnnnnnnnnnnnnnnnnnnnnnnnnnnnnnnnnnnnnnnnnnnnnnnnnnnnnnnnnnnnnnnnnnnnnnnnnnnnnnnnnnnnnnnnnnnnnnnnnnnnnnnnnnnnnnnnnnnnnnnnnnnnnnnnnnnnnnnnnnnnnnnnnnnnnnnnnnnnnnnnnnnnnnnnnnnnnnnnnnnnnnnnnnnnnnnnnnnnnnnnnnnnnnnnnnnnnnnnnnnnnnnnnnnnnnnnnnnnnnnnnnnnnnnnnnnnnnnnnnnnnnnnnnnnnnnnnnnnnnnnnnnnnnnnnnnnnnnnnnnnnnnnnnnnnnnnnnnnnnnnnnnnnnnnnnnnnnnnnnnnnnnnnnnnnnnnnnnnnnnnnnnnnnnnnnnnnnnnnnnnnnnnnnnnnnnnnnnnnnnnnnnnnnnnnnnnnnnnnnnnnnnnnnnnnnnnnnnnnnnnnnnnnnnnnnnnnnnnnnnnnnnnnnnnnnnnnnnnnnnnnnnnnnnnnnnnnnnnnnnnnnnnnnnnnnnnnnnnnnnnnnnnnnnnnnnnnnnnnnnnnnnnnnnnnnnnnnnnnnnnnnnnnnnnnnnnnnnnnnnnnnnnnnnnnnnnnnnnnnnnnnnnnnnnnnnnnnnnnnnnnnnnnnnnnnnnnnnnnnnnnnnnnnnnnnnnnnnnnnnnnnnnnnnnnnnnnnnnnnnnnnnnnnnnnnnnnnnnnnnnnnnnnnnnnnnnnnnnnnnnnnnnnnnnnnnnnnnnnnnnnnnnnnnnnnnnnnnnnnnnnnnnnnnnnnnnnnnnnnnnnnnnnnnnnnnnnnnnnnnnnnnnnnnnnnnnnnnnnnnnnnnnnnnnnnnnnnnnnnnnnnnnnnnnnnnnnnnnnnnnnnnnnnnnnnnnnnnnnnnnnnnnnnnnnnnnnnnnnnnnnnnnnnnnnnnnnnnnnnnnnnnnnnnnnnnnnnnnnnnnnnnnnnnnnnnnnnnnnnnnnnnnnnnnnnnnnnnnnnnnnnnnnnnnnnnnnnnnnnnnnnnnnnnnnnnnnnnnnnnnnnnnnnnnnnnnnnnnnnnnnnnnnnnnnnnnnnnnnnnnnnnnnnnnnnnnnnnnnnnnnnnnnnnnnnnnnnnnnnnnnnnnnnnnnnnnnnnnnnnnnnnnnnnnnnnnnnnnnnnnnnnnnnnnnnnnnnnnnnnnnnnnnnnnnnnnnnnnnnnnnnnnnnnnnnnnnnnnnnnnnnnnnnnnnnnnnnnnnnnnnnnnnnnnnnnnnnnnnnnnnnnnnnnnnnnnnnnnnnnnnnnnnnnnnnnnnnnnnnnnnnnnnnnnnnnnnnnnnnnnnnnnnnnnnnnnnnnnnnnnnnnnnnnnnnnnnnnnnnnnnnnnnnnnnnnnnnnnnnnnnnnnnnnnnnnnnnnnnnnnnnnnnnnnnnnnnnnnnnnnnnnnnnnnnnnnnnnnnnnnnnnnnnnnnnnnnnnnnnnnnnnnnnnnnnnnnnnnnnnnnnnnnnnnnnnnnnnnnnnnnnnnnnnnnnnnnnnnnnnnnnnnnnnnnnnnnnnnnnnnnnnnnnnnnnnnnnnnnnnnnnnnnnnnnnnnnnnnnnnnnnnnnnnnnnnnnnnnnnnnnnnnnnnnnnnnnnnnnnnnnnnnnnnnnnnnnnnnnnnnnnnnnnnnnnnnnnnnnnnnnnnnnnnnnnnnnnnnnnnnnnnnnnnnnnnnnnnnnnnnnnnnnnnnnnnnnnnnnnnnnnnnnnnnnnnnnnnnnnnnnnnnnnnnnnnnnnnnnnnnnnnnnnnnnnnnnnnnnnnnnnnnnnnnnnnnnnnnnnnnnnnnnnnnnnnnnnnnnnnnnnnnnnnnnnnnnnnnnnnnnnnnnnnnnnnnnnnnnnnnnnnnnnnnnnnnnnnnnnnnnnnnnnnnnnnnnnnnnnnnnnnnnnnnnnnnnnnnnnnnnnnnnnnnnnnnnnnnnnnnnnnnnnnnnnnnnnnnnnnnnnnnnnnnnnnnnnnnnnnnnnnnnnnnnnnnnnnnnnnnnnnnnnnnnnnnnnnnnnnnnnnnnnnnnnnnnnnnnnnnnnnnnnnnnnnnnnnnnnnnnnnnnnnnnnnnnnnnnnnnnnnnnnnnnnnnnnnnnnnnnnnnnnnnnnnnnnnnnnnnnnnnnnnnnnnnnnnnnnnnnnnnnnnnnnnnnnnnnnnnnnnnnnnnnnnnnnnnnnnnnnnnnnnnnnnnnnnnnnnnnnnnnnnnnnnnnnnnnnnnnnnnnnnnnnnnnnnnnnnnnnnnnnnnnnnnnnnnnnnnnnnnnnnnnnnnnnnnnnnnnnnnnnnnnnnnnnnnnnnnnnnnnnnnnnnnnnnnnnnnnnnnnnnnnnnnnnnnnnnnnnnnnnnnnnnnnnnnnnnnnnnnnnnnnnnnnnnnnnnnnnnnnnnnnnnnnnnnnnnnnnnnnnnnnnnnnnnnnnnnnnnnnnnnnnnnnnnnnnnnnnnnnnnnnnnnnnnnnnnnnnnnnnnnnnnnnnnnnnnnnnnnnnnnnnnnnnnnnnnnnnnnnnnnnnnnnnnnnnnnnnnnnnnnnnnnnnnnnnnnnnnnnnnnnnnnnnnnnnnnnnnnnnnnnnnnnnnnnnnnnnnnnnnnnnnnnnnnnnnnnnnnnnnnnnnnnnnnnnnnnnnnnnnnnnnnnnnnnnnnnnnnnnnnnnnnnnnnnnnnnnnnnnnnnnnnnnnnnnnnnnnnnnnnnnnnnnnnnnnnnnnnnnnnnnnnnnnnnnnnnnnnnnnnnnnnnnnnnnnnnnnnnnnnnnnnnnnnnnnnnnnnnnnnnnnnnnnnnnnnnnnnnnnnnnnnnnnnnnnnnnnnnnnnnnnnnnnnnnnnnnnnnnnnnnnnnnnnnnnnnnnnnnnnnnnnnnnnnnnnnnnnnnnnnnnnnnnnnnnnnnnnnnnnnnnnnnnnnnnnnnnnnnnnnnnnnnnnnnnnnnnnnnnnnnnnnnnnnnnnnnnnnnnnnnnnnnnnnnnnnnnnnnnnnnnnnnnnnnnnnnnnnnnnnnnnnnnnnnnnnnnnnnnnnnnnnnnnnnnnnnnnnnnnnnnnnnnnnnnnnnnnnnnnnnnnnnnnnnnnnnnnnnnnnnnnnnnnnnnnnnnnnnnnnnnnnnnnnnnnnnnnnnnnnnnnnnnnnnnnnnnnnnnnnnnnnnnnnnnnnnnnnnnnnnnnnnnnnnnnnnnnnnnnnnnnnnnnnnnnnnnnnnnnnnnnnnnnnnnnnnnnnnnnnnnnnnnnnnnnnnnnnnnnnnnnnnnnnnnnnnnnnnnnnnnnnnnnnnnnnnnnnnnnnnnnnnnnnnnnnnnnnnnnnnnnnnnnnnnnnnnnnnnnnnnnnnnnnnnnnnnnnnnnnnnnnnnnnnnnnnnnnnnnnnnnnnnnnnnnnnnnnnnnnnnnnnnnnnnnnnnnnnnnnnnnnnnnnnnnnnnnnnnnnnnnnnnnnnnnnnnnnnnnnnnnnnnnnnnnnnnnnnnnnnnnnnnnnnnnnnnnnnnnnnnnnnnnnnnnnnnnnnnnnnnnnnnnnnnnnnnnnnnnnnnnnnnnnnnnnnnnnnnnnnnnnnnnnnnnnnnnnnnnnnnnnnnnnnnnnnnnnnnnnnnnnnnnnnnnnnnnnnnnnnnnnnnnnnnnnnnnnnnnnnnnnnnnnnnnnnnnnnnnnnnnnnnnnnnnnnnnnnnnnnnnnnnnnnnnnnnnnnnnnnnnnnnnnnnnnnnnnnnnnnnnnnnnnnnnnnnnnnnnnnnnnnnnnnnnnnnnnnnnnnnnnnnnnnnnnnnnnnnnnnnnnnnnnnnnnnnnnnnnnnnnnnnnnnnnnnnnnnnnnnnnnnnnnnnnnnnnnnnnnnnnnnnnnnnnnnnnnnnnnnnnnnnnnnnnnnnnnnnnnnnnnnnnnnnnnnnnnnnnnnnnnnnnnnnnnnnnnnnnnnnnnnnnnnnnnnnnnnnnnnnnnnnnnnnnnnnnnnnnnnnnnnnnnnnnnnnnnnnnnnnnnnnnnnnnnnnnnnnnnnnnnnnnnnnnnnnnnnnnnnnnnnnnnnnnnnnnnnnnnnnnnnnnnnnnnnnnnnnnnnnnnnnnnnnnnnnnnnnnnnnnnnnnnnnnnnnnnnnnnnnnnnnnnnnnnnnnnnnnnnnnnnnnnnnnnnnnnnnnnnnnnnnnnnnnnnnnnnnnnnnnnnnnnnnnnnnnnnnnnnnnnnnnnnnnnnnnnnnnnnnnnnnnnnnnnnnnnnnnnnnnnnnnnnnnnnnnnnnnnnnnnnnnnnnnnnttcacactcattcacacactaacccgactcattcacacactaacccactcattcacacacacacccatgtcacactaactcacccactcattcacacactaactcacccactcgttgacacacccactcatttacacaccaactcacccactcgttcacacaccctctcattcacacactaacccactcattcacacactaactcatccattcacacactaacccacccattcacacactaacccacccactcacacactaacccattcattcacacactaactcacccactcgttcacacacccactcattcacactcacctgattcattaacacactaactcgcccactcacacactaacttgcccacacgttcacacactaactcacccactcattcacacactaactcattcacactcattcacacactagaccgcgactgcattcacacactaacccactcattcacacacacaccgattcattcacactagctcacccactcattcacacactaactcacccactcgttcacacacccactcatttacacaccaactcacccactcgttcacacaccctctcattcacacactaacctactcattcacacactaacccattcattcacacactcacccactcattcacacactaactcacccactcgttcacaacccattcacacactaacccacccattcatgcactaacccactctttcacacaccaactcacccactcgttcacacacccactcatttacacactaacccactcgttcacacaccctctcattcacacactaactcacccactcattcacacactaactcacccattcacactcgttcacaaacccactcacacactaactccctcattcacacactaacccactcattcacacactaactcacccactcgttcacacaccaaaacactgacccattcacacactaactcgcccactcattcacacaaactcacccactcgttcacacactaactcacccactcattcacactaactcattcacacattgacccacccactcattcatacattcacacactaacccgactcattcacacacttacccactcattcacacacgaactcacccattcattcacacactaacccactcgttcacacacccattcacacagtcgttcagccactcattcacacactaactcacccattcacacactaactcgcccactcgttcacacactaactcacccattcacacactcattcatacactaacccacccagtcattcacacactaacccgactcattcacacactaacccactcattcacacactaactcatccattcacacactaacccacccattcacacactaacccacccactcacacactaacccactcattcacacactaactcacccacttgttcacacacaaactcgcccactcattgacagactaactcgcccactctttcacactaacccactcattcacacactaacccacccactcattcattcatacactaacccactgactcactcacactaacccattgcacacactaacccattcattcacacactaactcacccactcgttcacacacccactcattcacacactagcccactcattcacacacccattcacacactaactcacccactcattcacacactaactcccccactcattcacaaactcgcccactcgttcacacactaactcacccactcattcacacactaacccattcattcacacagtcacccactcattcacacactaactcacccactcgttcacaacccattcacacactaacccacccattcatgcactaacccactctttcacacaccaactcacccactcattcacacacccactcattcacacactaactcacccactcgttcacacacccattcacaaaatccctcattcacacactaacccacccattcacacactaactcagccactcattcacatgcccactcattcacacagtaactcacccactcattcacaaacttgcccactgcttcacacactaactcgcccactcacacactaacttgcccactcgttgcacaaactcacccattcattcatacactaacccacccacttattcacacactaactcattcacacaacccaacttattcacacactaacccactcattcacacactaactcacccattcattcacacactaacccacccactcattcacaaactaacccattcattcacaaactcacccactcgttcacacacccactcattcacacacctactcattcacacactaactcgcccactcattcatacagtaactcgcccactcattcacactaactcgcccactcgttcacacactaacttgcccactcgttcacacactaacttgcccactcgttcacaaactcacccattcacacactcactcatacactaacccacccacttattcacacactcactcattcacacaacccaacttattcacacactaacccactcattcacacactaacccacccattcacaaacccattcattcacaaactcacccactcatttacacacccacacactcacctactcattcacacactaactcgcccactcattcacacactaacttgcccactctttcactaacccactcattcacacactcattcacacactaacccgttcatacactcacccattcattcacacactaacctgcccactcatggacaaactcatttacacacccactcattcacactaacccactcattcacacactacctcacccattcattcacactaacccactcgttcacacacccattcacactcacccactcatttgcacactaactcgcccactcattcacacactaacccactcgttcacacactaactcatccactcattcacacactcattcacccactaactcgcccactcgttcacaaactcacccactcattcacaaacccaactcattcacacacccactcattcacacacgaactcacccattcattcacacacccactcgttcacacacccactcattcacacacttaactcacccacttgttcacacatccactccttcacacactaacccactcattcacatactaactcgcccactcgttcacacactaactcacccattcatgcactcactcacacactaacccacccattcactaactcactcattcacacactaacccacccactcattcacacactaacccactcattcacacactaatctacccattcattc

SEQ ID NO: 41 - DNA, 3170 bp, Homo sapiens
caccctggctgcaggccccaggtgctggtgatgctgaacctggacgcggagcaggccgtgaagcacccccgcctgctgtccttcacgtcgcagctgaaggccggcaagggcctgaccatcgtgggctcggtgctggaggggacgtacctggacaagcacatggaggctcagcgggccgaggagaacatacggtccctaatgagcacagagaagaccaagggcttctgccagctggtggtctcgtccagcctgcgggatggcatgtcccacctgatccagtcggccggcctgggcggcctgaagcacaacacggtgctcatggcctggcccgcatcctggaagcaggaggacaaccccttctcctggaagaactttgtagacaccgtccgcgacaccaccgccgcgcaccaggctctgctggtggccaagaacgtcgactcgtttccgcaaaaccaggagcgcttcggcgggggccacatcgacgtgtggtggatcgtgcacgacggcggcatgctcatgctgctgcccttcctgctgcgccagcacaaggtgtggaggaagtgccggatgcgtatcttcaccgtggcccaggtggacgacaacagcatccagatgaagaaggacctgcagatgttcttgtatcacttgcgcatcagcgccgaggtggaggtggtggagatggttgaaaacgacatatctgctttcacctacgagaggacactaatgatggagcagaggtcgcagatgctgaagcagatgcagctgtccaagaacgagcaggagcgagaggcccagctgatccacgacaggaacaccgcgtcccacaccgcggcggcagccaggacccaagcgccgcctacgccagacaaggtgcagatgacctggaccagggagaagctgatcgctgagaagtacaggagcagagacaccagcctatctggtttcaaagacctcttcagcatgaagccggaccagtccaacgtcaggcggatgcacacggctgtgaagctcaatggcgtcgtcctcaacaagtcccaggatgcgcagctggtcctgctcaacatgccaggtcctcccaaaaaccggcagggagacgagaactacatggagtttcttgaagtcctgaccgaggggctgaacagagtcctcctggtcaggggtggcggccgggaggtgatcaccatctactcctaatgcccaacagcatcacggcactctgggacaggcacggaggacggcgtgggcagcctgggcctgggcttggcccagggaaacagacggcagacacacctgtcccccagtgatgccacccaagctgcccatggggcttcctacggaagtttctaggcccgtcacctagggctctcctgttcagccttaacaggctcagcaaatcagggcgtggctggacgatttccttgcatctgagggcagacgctgctaccggagtgacctggacgtggccagatcttctcgcaggtcacaagaagccagtgagcccttgccttggtttctggaagttcttttccttggctggatttacccagtggttaggttgcatttctaccccatccagaacattcttggaagagcacccggagctgaagctgtccctgatgatgaaggtgaaacgtcagccctggccatggctccgctcagggccccggtcacctccgagtcactctgttccttgactgtctttgtgtttctgtacctcaaggcactgaagctggaggactctgtccatgcccgtgtcaccctcgtgtgggagcctctgggctcggcaggtccacatttcatgagctgaggcgtgggccagggccatctggaaagggaactcggcttttccagaacgtggtggatcatctgtcgggtgtgtggtgaacacgttcagttcatcagggcctacgctccgggaaggggcccccagctgtggctctgccatgccgggctgtgtttgcagctgtccgagtctccatccacctttagaaaaccagccacttcttttcataagcactgacagggcccagcccacagccacaggtgcgatcagtgcctcacgcaggcaaatgcactgaaacccaggggcacacgcgcgcagagtgaacagtgagttcccccgacagcccacgacagccaggactgccctccccaccccaccccaccccaggagcacggcacacagttcagcctctgagctggctcacacgtgccatccccaccccggtgctccagggaaggaggacacggacccgacgtgggaggtcctcaggcagcagtggcgcctggtgtcaggtctgtctggctgagtcccgggcgtcccctgccatggcctgtgccttgcatggaggcggcggtggcactgaagagatagctttcaagggcccaacactttgcacttcggctggctgtgagtttctgctttgtaggttgtggtcacatttgcaggctgcgggcagtggcaccgacttgggcctccctttctatgtggcatatttatttatttaaacaccccagggagttacgtggtaacaaggttgtccataaagaggttgcttctatatactagaggccccagatggccaggccttgggctacgtctggcttgcatggtctcccaagggaatcagccccatcaacaaagttcaaatcggggcagaggctgcacttgtgcccccagatgtttctgaggagccagactagggctggcattgctgtagagtgacggctgctgcccagagcgtgtcccagacatcacagcggggctcagcagttcccacagcctctgcctgccttggctaagcatgagttaagcagcaaaacgctcctccatgtctggatggggccggcaggtcctgtgtcccctgcacctggaggagagcaggctagaggcacagcggccacatggtgctggctctgaacgttggttggtggctggaaaacagccctgcttctgagggccgctcagttctgcacacgaaaccacctcctgagggctcagctctgcccccgccctgggctgcagcctctgcacgcaagcaccaggcatcctttgtgttgtcaactccgtgtaaccagtaactacagccatttacaattgactccgtttccttttgtaggtttccctgtctgtctgtgttagtagaaaaataaaatcctatgaaatctga

SEQ ID NO: 42 - protein, 397 aa, Homo sapiens
HPGCRPQVLVMLNLDAEQAVKHPRLLSFTSQLKAGKGLTIVGSVLEGTYLDKHMEAQRAEENIRSLMSTEKTKGFCQLVVSSSLRDGMSHLIQSAGLGGLKHNTVLMAWPASWKQEDNPFSWKNFVDTVRDTTAAHQALLVAKNVDSFPQNQERFGGGHIDVWWIVHDGGMLMLLPFLLRQHKVWRKCRMRIFTVAQVDDNSIQMKKDLQMFLYHLRISAEVEVVEMVENDISAFTYERTLMMEQRSQMLKQMQLSKNEQEREAQLIHDRNTASHTAAAARTQAPPTPDKVQMTWTREKLIAEKYRSRDTSLSGFKDLFSMKPDQSNVRRMHTAVKLNGVVLNKSQDAQLVLLNMPGPPKNRQGDENYMEFLEVLTEGLNRVLLVRGGGREVITIYS

SEQ ID NO: 43 - DNA, 28397 bp, Mus musculus
  misc_feature (1)...(28397): n = A,T,C or G
tgtagtaattcatctaaccctctgtgttaactttaaatttttttctccatttataaataaaaagcaatggtcagagtcaaatagactgaactgtttctgtgtaatgaacaagatgaattagtctataaaacataaagctgatataaagtcttttcctggctgccaacagtttataaatgtttacaggagcctcgggaagaatatagactcaggatttacttctggtcctaagtgaccttactacaggtgcttggataagctcttcaatctctctggatccccgggtgtcatctctagtacaagagaagggatatgaagcagacattctctacatttctttaagctcttctctgattttacaatgggctaaaacatagccttccttgagagtgaaataccttcagttcttcccgcttaaaaaacaaaacaaaacaaaataaaaatagtgtttttattttgtgatattttattcattctgaggccgttatggtcatgccttaaattagagttatcacaggctttggttccatacagatttctgaaaaatgatttatagcttagttttatgacataaaaaatgcataagaattaatgattgccaaagcccctttaccccagtagatctaacttaagcagctttttggcttctactaatgcaaaacacagctataatatcatgaattacttactgatttctctggaagaaataatgctacgatggttgtgcttagggaaacacttcctgcacaaaatcgcagactttttcttccttccatgtttgacaaagacctgagttatatatgaattcactcagggttttctccacaatgtgaagtaagtgggcaatgttttccctagaaaagatttatttcaatatcagaaaaaatttttatacaatgtgaaatacaactctgttcatggctttgattgccaacacttggatgggtccttctggaagtatctgcagctctaaacacctgtgctttgtactgtccctaccacagcacaccccatgtgatctcatttcaaactgggacagctgttaatcatacacaagcacttgctttaccctagtttgtcattaaatcctttcctggtttgtgagataagtttatattagaatttacttggatggttttaaagagctcactgtgaatcctggacctggaaacacaccatatctgtctttctaggaatatatgctaatggaaggtaatgtttcaaaatataacacttgtgaaattcataagtcatgactcctgacatgttcaaataagaataggtttagtcaaagaatacacatggagggacccatggctccagccgcatatgtagcagaggatagccttgtcaagcatcaatgggagtagaggcccttggtcctgtgaaggctcaatgccccagtgtaggggcataccagggcagggaggtgggagtaggtaggtgggtggaggaacaccttcatagatgcaggggtaggagggatgggataagggtttgggggggcaaaccaggaaaggggataacatttgagatgcaaataaagaaaatatccaataaaaaaaaagaataggttagggctgtttgtttttgttgtttttaatcttcactgggaagagacttaataaagcattacctagatcatgctctcttatagacaactctatagaagattgtcttaattgctaattaatgtagaaagagccactctattgtgctaccagtcctggaacaggaggttcctgaatagtagaagagataagagagcaagaagagagaaagaaaggatacaactatgcaatttatttgctcttgactgtgggtgtgatgtgactaattgaattcttgccctgacctccctgaaaccacagcctatgacctggaatgataagccaaataaaaccttttccccaaagttgctttctatcagagaatctgtcatggcaacagaaaggaaagtaggataaccgatgagacaaaacagctagaaaaatgtctagctgagactgtggaaagacacattagatcactaactccaagtatttgttgactaccctggggcatagggccacaacacaatcaggggccttctcttccattgatgagagataaggccatcctctgctacatttgcagctagagccatgggtccctccatgtgtatgctttagtgtctgtgtttggtgactgtatatggaatggagtcaagtttgatttgtaagaaatatcttaaacagaattcagcaagtcagcaaaattttaaagaattatatttggatttcgtggtaatatttctgacattattaaatactaggtcagtgccagtgggttgactatttaaagttatacttgtatgtgtgtgtgtgtgtgtgtgtgtgtatgtgtgtgtgtgtgtgtgtgtgtgcatgtatgtgtgtttgatgctgtgtatgaaacacaagactttgaacatgctagataaattctctgtcactgagctgtatccaccagaccaaatgctcaaactttttcattaaattaccagttaattaaatacagtcttaaatgtgtaattcttatgattggcctccgttctgatccataagatcaaactgatgtctcagttcttttctatgtcttgggttactaagtgagaatgtaaaagaccatttggtctttaagaagataggaaatatacatctcctcatggaacattggtaatgacttttctcattggacctcatttctttttgtaattctcaatgtcaagtgtcttggaagacactgcagcttataaaaaaaaaatagctggcctgcattatgcagaacaggaatcccatgtctataactataccagatacctcagacttagactattcattggctcactatgctgtccttctttgaaaaaaaaaatcattttagaaaaagcatattctttcaaccctgggttgaaaggctggggataaaatgaatcccaattgtactgaaccagtgtcacaaccatgagcataacattaagggcaacatacagatctttactccttagattatcaatacaaatcatttgaagatgtccataaaagttgttgaagtctcctaaatttcctttaacatttctacagtcatatttgtaagaaagcaaatctgataataaaatctttaataaaatatttatatttttatgttatatgtatgcacatttcgtctgcatgtatgttatgtgcatcatgtacatgcctggagccaatgaagggcagaagaaggaatttggttcccgcagtcctctgcaagagcagggcatgctctttaccgctgaaccattctctaaaccctctgatgatattactccaagtctttaacgacacggccaatgaaacaatacatgtatagtgcttaggtcccaaattcatattttgtcagttctgtagctatcaagaaccccactcctgtcattcagaagaaaaccctcttctagtcacaactctcaaaagctttttccagggaaattaaaggctgccattatttgtatctcttcctgggttggttctacccctctccacatggttttgcctctgtttttgtgccatcaaagctgtccctgcctctgagctgtaatgtacagagcagtgggtggtccttgcactggcggaaaattcacatgctggaaaatcttatgccagggtcccagcctagatctatggagtagaagaacctaccaatctgtgtttaaacatgctgtccaggttgctaaggcggtttgagtttggagaccacaatggtaaattagttaacctgccaccatagtgatccagctgacaggacacagatttactagcctttccctaaaatgccaacaccctgtgagcactaaagcagtttgtcccaataaacaaataaaaatctaagagtccggagtgcaactgactttcctgtattgtttagttatccagcatcaggggtgcaaaccctggttcttctgcttttgcatagctattgcttaattcacttccaaatttcatgacctcaagtgtgaccttgcagttcctttgaaaaacatgtggtaagtagaaacaggaattaagggaaggagaagctaactaaaaaaaacaaaaaacaaaaaaacaacaaaaaaaaccaactccccaaaatttaatatcacatatattattttgagctacactcaacatagtgattacttacacattatttcaaaagaaattaattgttgaattagcctaatacactatctcagacaggtcaaaaacatgttctcattgctactgtatgcaaaataaattttagagtgcttgtaatccaatatgacagatgtgactccaaaataaatgatattttattttgattaaaacccagacaggttcaaactggtagtaaactaacagacagtaacatgcccagctccctttcatagggcaataatctttttgatcttttttttatatcaaatatttatggaatattttggtgacacagaacatccaagattttggtgagagtttttaactctacaggctctgaatgatgttttttttttaattattatcatataatcatcaaagggaaaataacagcactagagactgctccagacaataggccagctgttcagacagtcatggtaatggagagaaggattatgggaactggggtcaactctgtgacaaaggtaactgaggttttttttaaaggaagacagatagggtctgtattagtaccttttctgttgctatgacaaaatacctaaaactgtgtaccatgtaaggaataaaggtttatttgactcatcattccagggggcagagagttcaatatcaaggtacagacatctgtcaaagcctccttgaggcatcattggtgaagaagaacagattagctcaggtctctctgtgtatgtagccatgaatgccaccacagaaacctaccttaatcgtgggtctctatttagccataaatgtcatcatataaatctacctcactttcatgactctatcgaaacctttggtatattactaatagcagttttatttaataaagcttaacactgtagaaagagtaaaggctttgtatccaaatatcaaatcaactatattcaagacagtatatgcccactaatttatataattttgccaaagctttctccagcttgcaaataacacaaagcttaactctgatatattttgttaaattaattgggaatttgagtcatatataagagtacaaagcccacgaggggcctttataacagctttatttgtgttacctattattttcaaataaatttaagggagttggagatacagcttaatggcaacatacaaatattttgttgtcttccactgatcaaaaatgaacattgcttaaattaaagatcctacatgaaaaataaccgtttaacaccatgttcaaaattcctctacttataattatattaactaatagttgagcatatattcaaaatttattaaaaagaccctctagatttacaataacttacttataactgatatcaaatataccttaaaattcattttttctttgaattcattttgaagttatttttaatttcatgtttcttttagtgagatatgaacttatttattcataatttcacaaataggactcctagcaaaaacaaaaattgtagattttagaaatgcccccattttgccatgcacagtcaattgattctcttggcattcttgactatctaccaagtgtatattatgaacaacatgtatctattacggttctttaatgaatatgaattatacaggagataaatcccagtgtgattcttaggggaccaaatgcatagccatgacctgctgcatacttctctgtgtgcctacttaagctctgatgtacacaactgaaaagtgagggtgaccaaggtgttcttccatgttagcatagagtagatcagtttgaggctctacaattacaattacaatgggaaagagggagagatttaactttaaaagatttaaattgtaatgccattaaactaaacatgacatatttcaaaatattgattaaaactagcaaagtatctaagtattttaaatgtccttgggcttggtaatagatatctttaccactgagccatttgtccgagtctccaaagcttttactagaaataattgtagcatcatataggttgcaaaaatggagagaggtcccatatacccttcactcactcttaagcaggagactctttcaaatggcattgcattttatgtagacacatacaaatataatagtagctgatctaacgaagctcaaaaatttctggagttcctttccaagaatgatccatatatatctatatctatctatagctacatctacatctatcaatctatcaatctatcaatctatctatctatctatctatctatctatctatctatctatctatctatctatctatctatctatctgagacacctgcagacttggttcctcccaaagaggtgtccacatacacaggtgcttgcaataaatgcagccactgtctgggtcctatgaagctttgaaattatgaattggtgacctgtggtacaacccagacttactttcagaattcaaaagggcattaaatcacctaagtctttccttttgttctattttgaaagaatagcaaacttcctttgaaggcaaaggtaaacttattctgatataatcattaagcaatacacatacattcttgagcatcatatgatggcccttaaatatgtacattttaatgtctcaattttaaaatgctttaaagtaaatatttatatgcttgcccaaactagatataaagttaaaagggggggggtgtcagtcctttaaacactgagttcccatttgaggtaaaacacagagttccaagtgtattttagcagattctctgacacgttgtgtgccagagtctccaaagagccagccatggatttggtgatattcataccatgttgtttcctttattcagcttggtctcattttttttgttttttgttttgttttgttttttgagacagggtttctctgtgtagccctggctgtcctggaattcactctgtagaccaggctggcctcgaactcagaaattcacctgcctctgcctcccaagtgctagaattaaaggcatgcgccaccatgcccggctttgcactcccttctttagaggcacagaggcttaaatttttttttttttttttgttttttttttttggtttttttttttttgaggcttaaattttttacatcacatcggaatgccacgtgctgtctagttagtatcttctccttgtcataagtttattaaagtttaccccccctctgaaactctgaaattttcccaagtggcaccccaatatcattgggagaatagcatgttgtcatttaataatgagttatattgctaaatggtttctttagaaaccaattgtaggaaggagaaagagaaggaaaatgaaaataaccagatgtgaagagagaagccacaggactgaacttgtcttgaccttgtatgtgagctatataaattatctttatcatttattttctaatctataactgatgacaagaatggcaatacctccttgatgaacagttatagatattacagtcattcaccacaagagagcactttttaaattattcaaatgaatatgtgtatgagtaccctgagggcaacaaccagcatagggtaatgtaaaagtaaattttattcacctgatgtaattgttgtctgggaggcttattgccttcatctgctaggcctagaatgtttgcagcctctgagatttgttgctgaataagctcacccttccttgttctttctaagctctacttggctggttcaactcagatgttccggatcaaagtcctctctcccagatgacttattcaatttggcttttttgcgttgctctgcttggcatcaaactaactctagcaatcttttataatattctagctccttctcattctcttgctcattctgtctttccctgtgtctagcttgttctctcttcaatcagtctctataaaactctcccagtaaaactgcctcctctctctctgagctgctctaactcccactctactgcactggtctccacgagctctactgtatcctatactgcactctcttcctcctgtactgcctgctctaccttaagtcacttccctttgctctctcttctcttgagagttgagcatattctgtcccatcaaactgttctttgatccatcacttgttcatccactcaatttgacatcactttcaaacatgggtggttccttctacaaactctctttaccttcatcgtttgggattaaaggtaaatactaagggcttgtctgtattccagtattccaggcagagggattaaaggtgtgtgctaagggctgagccacactctaactagaaataggttcaaatatcctgtaacaggtaataaatattaatgatgtaaacattgtcccaaagtgcaccttagaatctggccttgcaaatgcagtgggatgtcacattaatgaagattgtgttgtatgaggctagacatttcctctacacatggatagaggttttcctgcacaagtctcctttaatgtcaacttacttgttctctcatttcttctagcttttagtagtctaacctggaaaagaaaaggagagaaaacattcaagttctgagtataagccatttgttccgttgtggggaaaaaaatctgaggatacattttatatgctacatttaagatggtgtgtgttatgttaggtgatacacattatgtgggaacttacgatttccttccaccacattatctggctaagccaatgaaagttttatctgatgtatggagaagtttcataactttgggaagaagttccaagtttcagaactattaggagaaaacttgcctctaataataacagaagctctgagatctaggcaaattataatcattgttttatggaccatcttcactgcaagattctgtgaggaaatattatgttggccacttttcaaatgatgctgagatgtggggcagtctcttgacttctgtgggcacttcccaatagatgcagagccatgagtcaaatgcatataccccatttccaatgttacactctcttcactgtcctgctcatccagcctgagcaagctctcttgcaagtaatgaagtcagttttattctgagatcttcttaggcaaaacaggtgggcttttgcattctggatcaaatgacttttcccacatatgcctataaacttttcaaagaatatcatcgttgcatacaccaaactctgccttttactggaggaagtggtcttgtttgctaattactacttctgtccattttcccttccttctagaaaaagcgataatcccttaacctggagtattgtatctgcttttgtaagatggtgtggatgctgagacacgtctctctgtacctcagaatgtcaacacgttggccaaagaaatgaatttatcagttaaaatgcagccaagggatttagtttatctagatgtgctccaaaggaaaaatagtttaccattgtttttacagattgaggtaaatctgacagatctttgacatatgctacggatttaatttaataccacagtacagatgtaggctctgataagtttttttttttttttaaatctaggctaagatgagtagagtagtttcaatatttatggggttgaaattgcagagattgcaaaggaagcattttaattaaaacagcattctcctgtatatgctcagattctgtacaaatggagggacaacctctcaaagcctcactcctggtttgctatactccctggggttttcaacacgttcaacagttttggctcagtttggctatcccattgtttgtcttttgccttgaggataatagaaaatgaactttatcatttgttttgatttttaccttctcccagctaaacatgatgaccctttacagctcatctttgtgattgtgtgttttaggtgtcctggagataacatcagtggaaatcggagttgttgccgtcaaagccatcaacagcaactattacttagccatgaacaagaaggggaaactctatggctcagtaagtagcctgattttgttttcaaagcacattgtattgttagtaccaaagatttggatggtttcctagagaagacactgaatggctttgctgtcatttgatcgctactaataggattcgcagcatctcaagggctggcaaacagcttgttcaactctataatctcccgaactgtttgccaatgagtctactaaacaggccattactaacatttgtgaatgttcagaactgcaagccaatcaggctttcacggaagcatctggatgaaatagtgtagagactagagatgacaacttggagaagaatcacttaaaacaaaaacattgggtggaatggaagatcatgcactatgagtatctgccatagctgaaaagtaaaaccacagctcagatgctgtgtactttgttaaaatcataaataatgaaacatacctaggaatttcacatacctaggtaatagtgttaaattttaattatgcatgaacattatagacattatgtaaaaacaaaatactgtcctcacaatagggtctacttctaccaaaaaaaaaaaactacatgtaataataaaggatactcttttagtaaggtcctcatgtgccttgggtagactgattagtgttaagtactttgaatatgttaatatttgaatttgaatattagtgttaagtactcttcaatttcaagttcagttcatttagaaaaagtctttttgactgaaacctcacataaaataataagtatttagaattaaaatcacagtcataattaaaacagtatcattcatggtatatgatttaaacttttagaagaaatgtcttaattaaacatgtgggtagctactgtgtgccagatactggttatcctgcctcccaaggatatataaggaagaagtttagaataacacatggtgatgtacaactctggtcacagcacttggaaggctgaggcaggaagatcacatattctgtactagtgtagatacatagaagaacttatttccagacaaagcaaaacaactccttcattcatgtgaatgcacacatatacacacatacagagggagagattgagagagaggagcaatctttgacttcaagcattttatactatataggggaaactgtcaacaaatacaaaatagttatagaacaactagcttgtattgtaagaaaagactgttagtagtacagtagccttgtgatgacggcagaactctgcttcaatctcttaattgccattttaagtataatacaagcaggacaattaatgactatggatatgtcttgcagttttgatcccagcactatactaaaaatcactaaatgaatttaaatttttctaaattccactatagaggaatatatggaatatagatacataaacttttaattatatttttggagaatatatagtaacatttgacacaggtatttaataagcacatcattttctagcgagatattttatattttcacatttttcatagatatcaaaaattaactttcaatatgtaaatttactttcttaattagtataagggtggtcagtagttcttaaacgtgagtaagcttcaaaatcagtgcgaggctttgttaaacagcataatgatggaacacagtcccacactgtctgattcaagtttaaggactaaggatttatacattcaatgaggtgcccactgctgtctgtgttattggttttgagttgagaaccatacgtcttgaaatgatctagctttgttttttattcatatcagctctgctgttaaatgacaagccagtcataccaggacaaatcctggtatgagggccacaggaattttaattcaatttcttcattgcatattattcccccaagaagcctaaaaaggcagtaaaacatttttaaaaacagctctatttagggctttaaattcttaccacttttgaaaaaatagtgtttttgcttttgtttttattaagcatgtttagggccttgccagatggcccagcctgtaaatcttcgttctcccaaatctaacaacctgggttcaatctccagaactcatatggtaggacaatgatgactcccacagtggtcttcctgcttacacacactcatttatttgcccccaccatacacactcatgcaggcacgcacacacacaaacacacagatgcatacatactaccaccagcaccaccaccaccaccaccaacaacaacaacaaaataaacaaatctgcttataatttttatttcaaagtgtcataggcatggagagatgatggctcagtgtttaaaaacacttgctgctcttgcagaggacccaaattcagttatcagtaaccacatgatggctcacaccataggttattcctgttccaagccataaaatactctattaacatccttaggtaccagacatgcaggtagtaatcagaaaaatacacaggctgaacatccatacatgtaaaataaatcacttttaaagtaaacaaaacaaaacaaacaaaaacaaaatatgtctgaatccagacagtggcctgcacattaattttcagcgacctaaggctaaggtaagaggacaactttgaatctacaaagcaagaggtcttggtcttttaaaaatatcaactaaacaaaaagtcccttcttgttccactatatcagagtcaggatgtaagagtgtattcgtatactctttgaagaggtacttaaatgtacacattagccaaagctaacataatacagaatcatctaatataagttagcttaagaaaataaagtatacaatttaagttgtgagaaaagattaagccaattttaatcataaaacatgcttcttttacaatgtggtatcaagagagtaataacccactctcaaatgaactatgacattaaaaaatgacattttcttatcagttacccattcccttctatgctgacatacctcctgtgctttgtggttgcctcatgttgagctatattctctataagtctcttcattcaacctgttcgtttgaacttgttccccaggtactctatcctattaccatattacctagatattacctagataggctcactgtctgaaatgactattatctggtgtttctatcatcggtgtgtttgctgccaacctcctactaccaggttgtaaccctgaagaaggctgaattagccacctctctcactatgtacacaacatctgcacacaacatctagatccactcggtttccagagcacaacaatgcaaaaacttatctacctcccagtagctccattagaaaacatgttctctgcttctagcccatataagaactaaatatctaaagactatactgctaaaaatcaatactgcatactagtatgcatctacacgccaggagataacactgatttttgtattattatttccaaaatgatttctattgattacagaagcctgcctggaagaatctctgagcaaacacacgagtgattggtgaaactttctctgtattattctccttgaatattttcttctgttcatttatggggaatgtctatctttctttcattttcagagcaatactatcctatgttccaaggtttctgttgaatgatagacctgagcaagtcttgaggatgaattagtctggtcttcaagcatcatgattgaagaatcaaatcaatgcctcagatgagcacagaaaatccaaaacctttccttaatccaccctaattcaatttgggatcttgttttacctaattctttgaaaggatttttattctttaagaattactcacaatgcagtgtgatctttttcaccaactcctggccctgtcgccatcaagatacacttccacctccttactatctcaattcaatttggtgctacctactttttaaataactcatgggttcaattttatgctgtttaaacattcctaggtgtagactcacctactagtgtggtagacataccagcatccacacccttaatagtaaactcgctcccctctctggaagccatcagctgtccacagtatcttggttagggatgaagcccattaatgacttcctagtccatgatacagttgactgccttgatctgatgtagttttgttatcacaggtgtggtgcatccttgattgcagtagtcctgccatgtccagcagtcagttttctcttattccctctgacctctgacctttacagtctttctcccaactcttacatgatactatgatactcccagatccttatgaaggtgggagtaagatacagcagactaatgagtccatgacatttactctccactgacatgttgtcaactaccatccaatacaatacacaatgaaacgtctctggtgagatctaaatggtgtgctaatccaccagcagagagacagagatttacaggaaagtttgatgttttgttcatttcacaaattaatagcaataggtacagtcttgggtcccatgcgctccccaattatgaatccttaaccagatttatagtatcaagtatatgtttcctcctgcgaaataggccttaagtttaatcagaaagtggtggttatcctcataatatttgtaccactattgaatttgtgggcaactcttgacacatcagtcattatggtaatttacagagttcacagacaggtaagaccttccctcagtatcctgtatagcaccttccaatattatgaaagcaagcagtagagagaaatgtccttcattagtacaacctagatttcctaatcattaggacttaggcttatgcttatctcatgaacatctaggccttcctccagaaattatagctatggcacatttcagttacatcccaagtgtcaagacacctgaggtgagaaagctgaatcaggcacacttcattttttaaaatattactctttaaattcattttagagaggggaaaagcatcaattatggaatctccaatatgaaattatttgaaataatccaaatctttattttaaaaagtttatacacttgtttggtctctgtctctgtctctgtctctgtctctctctgtcggtgtgtctgtgtgtgtgtgtgtgtgaacatgagaaggcaggtacatactgcaatatgcacatgtagaggccagaagacaacctgaaagagttgtttctctttatccatcttgtatttcttcgaaatggaaattaaaccattagtctttgaagcaagtgtcttaactaattaactgtcttactggcctcttcttttactctttaagctatatagcactttagtaagtgtaaaacacaactctattgcttgaaagccatatatttcagacaaatgaataagaagtaaaattaaatatgttcataaaaagatttaatattttcaatacagatttttttattttattaaaagacttatcgtagataatttatttttcttctttatatcagtcttatcattgaatggattttgtatttaatagtactttatagatgagaagcacacactactataaaactcccagaatggaaaaataaactgataatgtcagtataagcatgtgatgtttcattatgttcccagcaattatctatagggcagaaacctgaatttaactttgtggcctggatcaatggctcagtgattaagaatagttactgttctttccgaggaccgggattcagttgccagcacccatgtagtggttcacaatagtctgtaactcaagtttcagggggattagataccctcttctgacctaagcatgctcctgctagaatgtaatacactcaaactaataaagcctcatgcacatatacataaatcttaaaaataaataaataatttaaggatagaaaatataaagattcctgggatgaaagaaattgcccagttgaggcttctatcttcagtgtgtcatggggcccttttggtagacgaagagagtagaaactcagagctctggagttttagtttctgaactagtctagttttcttcaagagcagaggggcatttcttcaggttttgtgtctataattaactgcagaaaaagatactaaattctgaattcaagaagcagatgacagaacattcttgactcatcaaaaactctctaagaccattggccacttgaagcagtgccagaattttgcaggtataggtggatatcccagtgagaaggttcataattattttgacagggtgattgacaaaacaaagcatttttttgaaaaaaaaattgaaacaaggcctcatgtggcaagggctaacctagaactaattattgtagctttccttgtgatccactcacctctacatttcaatctctagtagtcatagtagtcagggttctctagagtcactgagtttatggaatgtttctccatagggaactttattgtaatggcttagattgtgcactccaactaacccaataatgggcagccatgaatgggaagtctaaggatccaggaattgttcagtcccatgagcctagacgtttcaggaggtcttctatataaactggtatcctgaagaaatagattctaatagatgtgttagcaagtaagggcaagtagataaagaagagtgaggcttcctcctttcaatgtccttatgtaggtctctagcagaaagtgtggcccagattaaaggtgtgtaccactacgtctgtatttggaacttgctttgtcacaggctggccttgaactcagagatctgcttgccttagtctcctgggattaaaggtgtgttctacccagcctgggactaagcttttcatggccactatgactcaagatctccacatcaagatctagctcagaagcctgtgtctttccagcctcaaaatctggatcacaggtgtgctttccatttctggattgtagttcattctagatgtagtacaaccaggaatagccaccccacaaacatttgtattataatcatatggcaccatgttcagctagaacccagggccttcttctttctatgtatgaacactatcaagtgagtgacatctctagtacccaaaacattttctgtatcttagctttaaatcatcccttgaattgatttttaagtagataaggtttgtaaatgtgataagcccatatttctggtaattccatttttcttacaggatctatagttaataccatgaaaaataagattattaacactctcctctatagctagatcatcataaatactggtattgtaatgtctacttcctgataatcattctaggcacataaaccatgttatattcaaagcatttcaactttttaatgggccagaagacatggcactgctgcagtgattcatcaaagatgactcgtgtgttttcaaacacagaatctgttgtgtgcttaggatttttgactcttctgttgttagcgttgtatatgaagtgagtactttatgtaagaaaaaaatggaagctacaaacaagacaatggagtgtagatcattacatggcttgtatcacatggaatcaagtattatcaccatctgaataaataactgtgtttcccttgcagaaagagtttaacaacgactgtaagctgaaagagagaatagaggaaaatggatacaacacctatgcatcttttaactggcagcacaatggcaggcaaatgtatgtggcattgaatggaaaaggagctcccaggagaggacaaaaaacaagaaggaaaaacacctctgctcacttcctccccatgacgatccaaacatagaagaaaacactgttggtggatgcagtacaaccaatgactctttggacagaaagagatggtatcctcactgaagactgtagctcaaaaggcaaagacatagccctgaattcagcttgtttaaaggaaggaaggctttggatgtttttgtactcactgctgacatacaaagttcttttcactagctctgtgtcattgtgtcatgccttataatcaagatagaggcaagtcaagtttggatggaagttatcctcaagtgaacaatgttgtggtgggggctgggctttttttgtttgtttgtttgtttcatttttaagtttttgtttttgaacttctgagatagaacttaaagaacatggaacactctgttgaatgatctttgggaaagttatttatggaatatgaacacatatcaaagactttcattgctcattcaagcctgatgattcaatgagcagtaagacacgcaagcatttactggaaagcacttgggtcatatcatatgcacaaccaaaggagctttgggtgtggcaccatggaagaattggatcagatttacaaatataaacatagtagtatgaaactgtcctaatacaaatagtatggtatgcttgtgcattctgtctccatccttttctatttccttctaagttatttatttaataggatgttaaatatcttttggggtttaaagagtatcttcaatgctgccctctggtttaccttttctctctctctctctctctctctctctctctctctctctctctctctctctctctctctctctctctctccctctctctccctccctcccccctctggcaccatacgcacattcatgacaaagtgttttaaaaccttggcaaacacttcagaaataggagatgagatcaaggaagcagtatgaatgccccatgcgctctcagttgacttaatttgcacttctgcaataaaaaacaccagcaatgactatggcagaattctgctatagattatgtaacagatatctgtcatcatttgtcaacatatatcagtccagagggacccttaccttaaaatgtagaaggccaaattctctttcattgtcttatttcatcttcaagaatatactaaaagaagaaaaaatgaattgttagactaacattgttgggttttttttttcctactgatgatggcttgccacaggtcacaatggcaaatgatgcaaaggttatctgcacatacatgagccctttgtaaggcccacagaatccttctccctcaaaagaaccaaaaaaggaaatttggtatgaagtgcaactctccctggggcttaacctgagcaaatatatcctagtatatgagtaaccatatactgacacctgttcaagctgaatggtctagtctttacagaaccacataaaccttgttttctgtaaatttaaaatgttctagaaggttccataatataaccacattgaaattcattttcttagaaaaggtatagaaagcagtatgtaagtgtgccatgcaccctcgctctgtagatcactaaataaacacgtaagccttatttgcagtgtctgtagtgattttaagaatgtaggaaacacttctaaaaaaattttaaaggataactctgagatgatattgatgctgcagtcttctttcttgtttggaaatgtctgtttattttcattgtttggattcagtattttgataggaacaaaaagactcaccaaatgtgtctgtttactaaaatttaacctctagagaggctagtgatttgtgatcctcttctaacttatttgtgctgatgcttgaccagtacaaatcagctttttaaaatattattattaaaggttgatcagtcattttaaaattggccttttttttcagaatgttcctacaggtcataatttatgatttctttgaaaagcttgcatttcaagagaaaagcacagaggcacaatgctttggtttatgggtataggttgcattttgtggtgttctttcaacttgttttctgacaaatgggatttttaaaatgtatacttcttgtggttggattctgtatgttagagtttaattggtaactgagtctaaaggctctaatgtaatgaatctctagaagaactaggtatctttttttacttttattttaaaataataattatacctgacacatgaccatggaccacccacaaccaaaattaaatgtttggggagacaaactatagtattcagtgacaagggtaacagcaaatagtgcagacgttggattcttatttcactttgccatttagattactaaagagactatgtgtaaacagtcatcattatagtactcaagacattaaacagcttctagcaaaatgtatcaaagcttgcagagtccaaaaatagaaaacatctttccccctctcccaccctacatttccccctgtatgcatcctaacagagataaatacaaaatgaattcggtaaggagagaggagattcttcttcacttcatatttgtttgatattaatagagaattctggtcctttttacaactactgaaagaaaagaagttcagtcctaaattttgtgtgttaaaaaaagaaaagattttgtgagttctgcctccgtgggaagtgtgggcactgctccaccatgctgaagtgtgttagccacgggtacagagcatatgactgttgacatcagactccttaaagatacagaatcgcttccctcctcctaatcctcaaaaggctgaacagtgtatattatgttacatttaaataaaggcaataaaaatgctgggaaaagagaataaaagtactgttcttattttatttcctttctttcttctcttctcttttcttttctttccttttcttttttttttcctttttttttcttttttttttttattagcctaaaactatacctggtaatgagatcagctccagggctgtgtgcatggcaggatgtggttaaatgccccacagccccaaacaacaacaacagaaaaaaaaattactcaaacatttgtaaggtttctttaatgttttacatgtgtgagccggctatccttaccctaataacaaccaaatgctttcgggttctcctaactactcaggtccacctagtttacacagtggataaagaagaatgaattgaaaacaaggatggcttgtgcaacaatgagaggctcttggaggaaagccaggagctgcaaacgttgacttccagggcatggaaaagaccaacgaatttgatttgaaaagtaggcaggaaagaaaagaaaaaaaaaaaaaaactgtagtaatgcaagttgattccagggctcaagcaagtttgtggacagagtggagggatcagtgttctatggctcaattctaataactagagcattgttaattcttggattgattattcaataaagtaaacgtaacatttttatatcaatgagtagctagccctaagttagtttatatatgtatgcacgtatacatccatatatacatatatatgtatacctgcatacatacatatatacaaatgtatatacatgcatacatacatacatgcatggagttaaaaatatttaagagatgatgaactgtactttaaaatagcacatatgagttcaaacaaatgtggagacaagagctttgcctacctttgctatttaaactaagctagaaaaacaatttatcttgaaagaatcctgaggctctctgaattcttccagaattggaaaatagagcaggaagcatcttgtcgctctccctcgtttcctgtaagctcacactgactagatggttacgggttgctcacttccaagttgtttctttccaactacaaaactctgaacttccttttctcaagaagaaaaatcgaaacactgttaagtatgactcctagtgctcggttttgactaatttaccaatcagcatcaggagcaatctgctagcaagggatctaggcatcgtgaagggccagtcttcattcatgtgagcacaaagaggcaagggacagtttctgcaagttcacacacaagagtgaagaatcagccacttaaaggaggaagaaaagaggaagaaaggaaataataaaaagtaaatgataaaaataataataaaataaaaggcaggtataaaaactgaataattgctagttacatgtgcttaaaataaactatttatcttattcctatatattttaatcaactccaattatctgtcatttattttttccaaatgaaaaagatagaaagatttttaaatgaaaataatatttgctttgttttaagccaagaatggaaccctggatatagccaagctctccgtagctttgcacactttgtagaaagatcagttgaatgaattacaagttttcaatgaaaaaaggctggcccttctagtaaataacaactagcatcataaagatgctataaatacttctttaaacgtcttccataaacatgtgctaatgttcttgagtaatcaacatacaaaagattgaaaaacaggtatcatttgttgttttaattgtagaataaaaatggaaaataaattgtgttacatcttttaacgtatcttgtagagttttaacagaagacaaaagaaaactttacaacctgcattcctcttttctcttgtatattaggggacacatcagaaaattcccttctaagtaaacaatctattgaaacatatttataaataccatgcattagttaaaatggaatgatcatgaccaaactagcaggatcaaagcagctggtcttatttctaagtggatataacagacatttctatgagtctccatcgtgatagcagagaaaggcaacagtctccaaactctgagagaagccatatgccaaccatacatgcatgtgacatgtattattttacacatctttattaccctccacaaaagagcctatattcttttttttttttcatgcaggcaattgcatcctccagagatgagcacagcaaatgaagaatcaaaacatcccatgttcctcattacaactgtaaattgaacatatgccataatacaacgtaggcagtgaccccagttgcagagcaaccaactgcagtgtggccttagccctcctaaagtttggttttaattaccttatacacatcttaaatgcctaaatcatcttacaattttctaaattatttagttatcatttctgtggtcaatttaagctgctgacaatgcaaatacactcaaagaggtctttcaaggagaagtaaattagaaccagttttccatgaggtattatagatttagaaaggactgtgttttatggttatgggaagcactagggttaggggtcaattattaattcaactcaacattaaaatattttaacatatggtatttaaaccagaatccttaacagacattttttttctgtgacataaattaatatgttcaggtataaatggtatttaagccaatatttatataatttctatgagaagcatatttgttatcaaggagttttccagtgggaagcactgaaggaggatggcattaaatgctagtaaagatgctaccttagggacatttcctgataaattgagttctgaaatcaaaatgcattttacatatcaagtttatacttacatagaaatcaaatgaaattaaattgtagccttagctgatatctgtagtcattcctcccagtcacatgggcgagccctatattccaccccttacatccctagaaaataggcaagccagcccatttctacagggacagtgcatttacctgtctacttctcctctgctttaattcaagaggatattaaatagcttcctgccatgcatttcctcacaagaaaatgatggcttttattggaaccaataatctactccacttctttccaatgactagtaactctagaaggctgtaaatagagattgttggtggcaagtagcaagatgattgttctatttttttcttattgttaaattatttaccttattagagtagtggttttcaatcatttacataattcagtttgaactcggtactaatgagaaaacaaaacaaaatttaagcataggaactactactggttgaatttttaatagcagtcagtccctagaatatgttcctatttagaagcaaggtcatttcagggacattgaataaaagcaatttatacatagacataaaacaaaaccaccctagtctcttcgggcttctctaataaaacaccacatcctgagtggattctgtagacaaatgaattggatatatgttctaataatcattttgcatacaaatattgcattcaaaaagacatgactataaataattgagttctctaatacaatttatgtactctagtgagtattgaccatttcaaaaatatatcagaagattgtgtttacattaatagacttcatcatagaaattagatgctgttgagtgactgcttgaggagatgtatctatttatcccaggaagggaactaatgacaaaccaaagaaaccattctacccaagtctatcttgatgaaccactgaggttgttttgcaattttctataaaagatctgatgcctcagaggctgcagtgtcactgaaaaaccccagagcatgctgtctaagctgaagacagttccactagacagtctcccgtatcttagcaaccactcattgattgcttatataatcttagggtctggccttgtgaatcctgtaaatttcaggtgcttcctgaactttgtacatatcaattccctgaatcccatgaacctcactactttccctgaaaggaagtgtttcagtttaaaggaagcagctatacaacacatgtcttcaaaatttctctcctcaaaagtaacttcacatcttattcacagctatttgaactacagataggcactttggctttaaataattcatcttaatattcttgcttttttagacgtacatatatttaaacatacagatatgttcaaatatatatacatattatatatgttatatatatcatacatatatatttagacatgcagtatatttgaacatattcatcccatcccaaattcctcccatgaaaaacacacttttatatcctttaattcaatcccatcaaacgttgagatttctccttttattgccttttccccattgagcccattttgaatttcccagctagtcttgagagtggagcctaccatgatatttggccagcctaccaggatcgttcacacacacacacacacacacacacacacacacacacacacacacacacacacacacaaaacccaaaactctctctttctccccccccccttttcccctccccagaagacatcaaatgacaacagtttctcagctagtagtggaattttgagaccaccctattccctctatgttgaaattttgtctgactagatcttccacaggtcatatgcatgttatcacaatcaatatgagttcttatgtacaaataccctgctggttctagaaaacatcatttccttggtattatcaatccctttgtctcttacagtctttcttccttcttccttccttccttcctgagccctgtgggaagtagtatgacatggatgtcctatttaggactgataacgctgcagtttgtaattctatgcacattaaccagttggaagtctctgagttagttgccatcttctgcaagaagtttctctggtgaacattgaaagagtatctatggatatagccataagtcattagaagttttttttttattaataaattctatgaccattatcaaaatgatagtattgagccataacttagggcctataacctatctaatcacaagtttttgcctcttttaacagtgccaggcatgggttctatctcacgaagtgggccttagatacagtcagaaagtgtttggttactcctataatatttgtgccacaattgcatcatgtctgttaaggctagtttttgcagggtttacaggaaagtgggaccgagattaacctttctcctccagcagtgtacatagcatcatccagcaccatgtgtgctaggtgataggaatagctatcaggttgagttccagcttggtttctctatgttttatgattcaaggacgtgacatatttagcaatagtgttctgccatctacttcctaaggataagcatgaatatggaaaatagcctataattcctcacctctggtgacctcactggccaacatatcagaaagatactgtaaaagaatgaagcagaaaaaaaatataaatataaattttgagccaccctaatttttttcctttatgttactgaaaatttaagtgtgaacaccacaccatagttttttttttttttaattaaaatttggtattttacattttttttttttagttcatcattctctttgatgaacaataaattctgaaaacctatttggtgttacagggcataaaaattaagtataatacattgactaataacctcagagccagtctaagtatttttaagtactcttttctccaaagttgattagtagtagtagtagttgatttttctgttattcaaggaatgggttttcagcctttatacttttaaaatgtcatgctggattgcctgtgcattatagtgtttgaatcataacaatatcccaccaattgtgatagccaaaaatgcttataataaacaagagttaaatttgtttttgtcccctgaactcagcattaggtaatgaagtaagtctcatgactctacaacattgttctccttcttgtatacatattctacacaggaaaagcaagtccagtgtcttttataaccctgcttttcaatcttcagaaatgcaattttaaagacaaccaaggtatttcattttaatgatgtacctcttggttgacattgttttacagggaatgttatgtacttgtaaattagagaaacaaatattttaattcttgctattcttagccatacatttgggaaaggcactctacataaggtaaacatgagtaaccgtaaaagtggcaatagtcactaatgctgggttcagtcctaggagtaaataatatatttgttaagagttttgtatgatgctgcccaatagtgcatattcaattcatgtgtagttttctacagctttggttcttaagtcaaagttcctggtgatgataataccaccttatctgaaggaagaatatttatggaaattttcctgatgtggtaaaattatgatgaatcctgttctgaattttcctttaagagagggcatacagaacacatgtgaagggttctacaaaaatacccattgttttcttgccagaatgctcatttgtctaaaactactgaagaccccttgcaagctcacactggtagccacatccagtgaaggctttctgttaagtacacaaaactgggaataacctgacaaggttattacctatgatcagctgaaacagtgactgacacttgacatcatgtcaactttccttacttctcaacattgcttcctttccctggtcacacacatccttatgggcactccccacaaagctcctacatgtgtctctttattacaattggtttcctgtaggaacagcccgaagacattgtttgagacaagtttgtttatttttaaggtaggaaatgagcctatttcatgctgttacaggaacatagctaaagctaggtaatttataaagaaaagaaaataatctgtgctgtccaggagagtaggaaagtcaaggtcaagagcatgaactaggtgagagccttcttattttgccattcctgatggaaggcagaagggagaatatcagctagagttttaattcacaatatcaagacagatttaactataatttgatttaagtttttcttgaaggcagacccttcctgacataaacatcttccattcagcctaacattatggcacagttacaatgggtattacatttctgacacatgaattttggatggacaatttcaaactgtaccaaggactattagagaaaacagtatcaaagaactagttaccctctcatgtgaatgccagtcttcctcattttctttttctttttttttaaaaagattgatttattcattatatgtaagtacactgtagctgtcttcagacactagacttacatagcctatgagtttaataaatgtactggagatactcaacatgttcttggagccaatcattaatgggaacagataatcttgatggttaaattggaaataggtagcaacataaggacaaagagttaagtgatttgctcagtgaactagagaagacacatggttaagaacccatggatgttctaatattagggaaannnnnnnnnnnnnnnnnnnnnnnnnnnnnnnnnnnnnnnnnnnnnnnnnnnnnnnnnnnnnnnnnnnnnnnnnnnnnnnnnnnnnnnnnnnnnnnnnnnnnnnnnnnnnnnnnnnnnnnnnnnnnnnnnnnnnnnnnnnnnnnnnnnnnnnnnnnnnnnnnnnnnnnnnnnnnnnnnnnnnnnnnnnnnnnnnnnnnnnnnnnnnnnnnnnnnnnnnnnnnnnnnnnnnnnnnnnnnnnnnnnnnnnnnnnnnnnnnnnnnnnnnnnnnnn

SEQ ID NO: 44 - DNA, 888 bp, Mus musculus
aggtgtcctggagataacatcagtggaaatcggagttgttgccgtcaaagccatcaacagcaactattacttagccatgaacaagaaggggaaactctatggctcaaaagagtttaacaacgactgtaagctgaaagagagaatagaggaaaatggatacaacacctatgcatcttttaactggcagcacaatggcaggcaaatgtatgtggcattgaatggaaaaggagctcccaggagaggacaaaaaacaagaaggaaaaacacctctgctcacttcctccccatgacgatccaaacatagaagaaaacactgttggtggatgcagtacaaccaatgactctttggacagaaagagatggtatcctcactgaagactgtagctcaaaaggcaaagacatagccctgaattcagcttgtttaaaggaaggaaggctttggatgtttttgtactcactgctgacatacaaagttcttttcactagctctgtgtcattgtgtcatgccttataatcaagatagaggcaagtcaagtttggatggaagttatcctcaagtgaacaatgttgtggtgggggctgggctttttttgtttgtttgtttgtttcatttttaagtttttgtttttgaacttctgagatagaacttaaagaacatggaacactctgttgaatgatctttgggaaagttatttatggaatatgaacacatatcaaagactttcattgctcattcaagcctgatgattcaatgagcagtaagacacgcaagcatttactggaaagcacttgggtcatatcatatgcacaaccaaaggagctttgggtgtggcaccatggaagaattggatcagatttacaaatataaacatagtagtatgaaactgt

SEQ ID NO: 45 - protein, 100 aa, Mus musculus
GVLEITSVEIGVVAVKAINSNYYLAMNKKGKLYGSKEFNNDCKLKERIEENGYNTYASFNWQHNGRQMYVALNGKGAPRRGQKTRRKNTSAHFLPMTIQT

SEQ ID NO: 46 - DNA, 103689 bp, Homo sapiens
aataccaaaacagaggtgagaatggcagcagagtttgttagctaaattctaactcttaagtaatgagtaaatagggattttttttcctcatagccccccttgaggtcattttaagaatcttcactaaagtaagcttcaaatgctctcagggaacatcctcagctagcttgcaaagttttttttctccactaattatgtagaatggatgtgcactatccagccttagatttctaggcaaaataatcaatttctttttcatcttggtggaaaagtagcccagaagttaggtatctgcccccaaaggaaagaagaagggttaacttgacacagagcagggtcccaagtcaaggacaagggctctctttactgctactgttgtagtatcaataatcaaacagagcaggtggttctgcagaacaaacctctacatttgggaatgaaacagagaagcagaggtattgctttcatttaagtatgccttcagaacccagaattttctagaataaacaataaaatcaggcacgtgaaagagaaaaatataaaaagacataatgtgaagtaccactgtccttactccttaggctctctcaacatggagtcccccagactttgccaactggcatttctgaggttcaaagtactgaatctgggtgcccagggcttttctaggcagaggattgtgtcagaaaatggaaataaatgctggctttgccacttgggcaagtaacttcacctgcctggatgtggactttcatatctaaggtccatgttcctttctactttttcccctatcttgtcagactggagggcaaataacttacgcatctaatcatataacacttaaatttctttgataaatcaaatgctcttaattgccttccagttacagtgggctacttttattgttctactatgcaattcttttactagcattatttctgtcagtctagaagttgacctctaaaacagaatctagcaataattaatagaaataacatttatctgttatagatagatattgaacagtgccaaaattgtatatgtaagtctttaagcttcttattattttttcaatctattcctaatgatctgataagctttatttttcaaattcaaaacaagactagatgtctaataagaggtccttgaaggggtgtgtgtgtgtgtgtgtgtgtgtgtgtgtgtgtgtgtgtttataaaatgacaggaatgagttgggtgatttcccacaactaagtttcaaattgtagaaaatacatgattaaaatatttctcatatatattttaggaaattatatatttatatatattttcctatttttagggaaaaaatatataaaacagcaagtataggcgaaacactgaaaacataccagctaaataaataaacattactatctagtgctgtaaggtaggaagactctaccttaattcacccacagatgaacatggctacaatggtgtaaagcaaaagaatgtttctttctcagaagttggccgaagaaatatttctaagttctttctccctctgccaatataattcaaatgtcaaattaaaatagccaaacttctgctgataactgaatgtattagtctgttttcatgctgctgataaagacataacctagactgggcaatttacagaagaaagaggttcaattggacttacagtttcacatggctggggaggcctcacaatcatggcagagggaaaggaggagcaagtcacatcttacatggatggcggcaggcaaagaaagagagtttgtgcaggggaattcctctttttaagactatcagatcttgtgagacttattcactatcatgagaagggcacaggaaagacttgccaccatgactcaattacctcccactgggtccctcccacatgtgggaattcaagatgagatttcggtggggacacagccaaaccatatcactgcaataggaatatgaaagccagaatttatacttaacatataggaaagaaggagacattatagatttttaagaagaaatgaatttcaaaagggcctactgttgaaccataaacctaaaagcagtctccttcacccctagctaagattcaagagatttatcaaaaagctgtcctaacttagcgatagcccagaagttttcaaccacaaggtcagaaccttccgaaggcaaacattgcaatacaccttgagaattttccaaacatcacgtgccaaatgccccagagattctgaaatgttccctctcttccttcttgccccacagcctcagaaggggccactgttattcttggaagtgcattatatctgtaagtatgtaaggctgaagtgcttgccattcactagtttagtgcacaggaagcagcttgtcactatcggccctgtcatcctgggcagctcacttcgtgatcccagatctctctttttttttttttccacctgtaaagtaagggcagtagaactaagagagttaaagtattttctagctataaagatacaaaattctataaattctcagggttataagattagaagatgaaagactaagccctgatctgggcttcatagactctaggctatattgatttctataagaagtcatttgtttatgaaatttgtgaaactgtctagacagtgagcaatacacaaaattatctgcaaatgtatttcatcttggggtttttggtgctttacctagctttagcacctagctgtacaattgagggctgcatatttctttatttatttttaaagatctgtctttagttgaaacgaaaatgttcaaacaatacctctcagtgggctagaaaataatattaatttcccccattcttttatacaccagactattaacaaacatcagtataacatgtttccttataaaaacattaatgattttaaaaattagtaaagattaatattaggaaatatttaaactaaaaagaaaaaagctgattttaatttagaactttacagttttccataaatgtatgtcatttatgaacataatttctactttcttggattccttttctgaagtcatttatataaatgtattttattgaacagtcagcaatcaaaataaattactctttgattttagacctcaaaatcattagctaaataaaaaactctgcaatgatcaatcaaaattcaatattagattatacatttctagagggcaaatgtcatgcggcattacctttcgtatggtttaaggaatcctgtacatcaccaagcaagcattagatgcttcacaacctgctttgtagtaatttgcacttccctgttatctcagatatccaaaaaaccacattttatgaactggttacttactgtgatggtatatactgcagtttgaagttagtgtcctgagtaggacagaattcttcccagttgatttaagtgaagagactttaataaagtaaccagttacaaaggtgcaggcactgtgaaagaaacaagggataatgatgataggcaagtaatagacaggaactgctaccagtccttgagcttaagaagatggggaggaaatattattttagggttgccagtgatagccagagtcctagaggaggggtcacccagtgggaagggatacagacactgccagaaaagtgtcactgaaacataaaggaggagaggaggaaatatccagagttctctcgccttctgtgtgctgatctaaggattccattctcccattgacaaaacaaactcaaagtcttctatttaaaaaggaccggtgattcacacatgtcagcacagagctgagcagaggaggggaaagaatggatctgggggccaatcgaaggaaatccagtacagcaaatattgcattgcccccaacacaataatttttaattcatagaaaatacattctttttgtcaaaatttgcttaacagaggcaaaatttttcaaatagaatggatatcaggtcaaattatatttcataataagaggcacagaggacagcaaatggattagggaacttttattgggaagtaattaaaataataaactagaaagcaagaaatatgcttccaggagtctgggagcaggagtaaaagagaggaggtcgggttgggttgacagaaaggatgcaaccaaaatctccacactgtagagaaaatctagaaaaaaggattgtgccagggacataaaatagggaaaaatcaagtcttaatcattcgtgaagccataaatagaagtcacagttttccttagctcttgttgtagagaaaaggaaaatcaaaaagaattttcaggggctcttctttctttttcaatatctgtctttccaatatctggtttctgagtcctaagataaccatattttgcccatcattaatgataaactgcctaaattcatgcattcaatcatgcatgcacattctttatggggtaagtttctctgtctaatttattggaaaaaccttgcaccattcacaatgcctacctagcatatagtaggcactcaataaacattaattgaataaaaaccagttaaatgtctgttggcatgacattacaactttaaagaaaatattataatctgtcagttaattcacaaacataaatgactaatatcagaatgtttacaattttgccatagatagcaggactaagatgcctagagagcttgaagtaggaagaggcacagatctacaaaaggacagctgggaacacagaaaacaaacaaaacttttcagagacttcacaactttgtcaagggaaggttctgtttaccatcagctgggaggggacaaacagcagctttgtgaaaatatgtttgttgtgtttagtgccaagatgcaaagttcagtttccaggaatttgtggtgatttattgtatgttttaaacaatcttatatagaattcttttcttgttacaaaagatcctttttatcatcttggccatatttccttcctaataacagatcattgagtctgtttgaaagtgagggaacagaaaattaaccttagtttcaaactttgaaaaaaatttgtttaagcaacctatgctttgaaatatcacaatactttatggaaaattaatattagaacgcagaaacccggatcaaattataaatctacttttctagaaagtctcatcagttttctagaggtgaacttataaattcagattctattaaaaaattggggtattctgaaaatatggggtattcattactttttgattgtgctcatctcggaagcattgataaaatatccccctttgccaagtatatatcaatatttattttagctaacccagctggtacttaataattcaacactattttattacttttctctggttaatctattgcagcaaagatataattgcttttccataactaaacccctaactctttttatcatttctactctgccatcttagacatattagaatgatgaatggtcaatggtaagaaagggagtagggaggaagaaaaagaatataaacaggacaggtgttgcaaaaattagggtaatagcctaaggtctatcacaggagttccaaattctggtctaccatggagtgacctgggaatcagcttattcatctataaaatacatgtgttggattcagttatagctaagattcccactggctctgaagcaatgcacaccactatctgtgggataacacctcttttctgttcacttgaagctcctggtttaaaaacaataagatatcactccttcattcacccaaatgtgagtgattattagcatcatttctagctgcagcctgggaagtgcacaagtcctaatgatgacttaaaactggcatgttctgtgtccaaaagggaaaaatgggctgtgacacatactcataaggtctgcaccacagggtgaaaaaatgaggcctgcatatgtctaaatttttgaacagcgtggctgacttttgaccttacttagcattacttgaagcagcttactgacgctgccaataacatcatacataatagggcacacatcttgtaactgaaccataggtagtgctgagcaacataaagaatccaggcaatacatatgtaaaatgtaaactgctcaaacacaatagctactgaaggatctgctagtacatacactgattgcttctctgaggttcaagagccaggttttaggattcttcaatggctgctgccatggtcttgttttaaaaagcctcaatcatttctcaagacatcacacgtaacaaaaggctgcatctatttctctcaatacagagctagcctgatagtagcagatatgtttaagggcatagaaataaagtatgccttccagaagttggataaaagagaaaaacagcctttgagaattagtaggtaccactctaatctgaagcttgtactgtccttttcaatcctagcaaagaaacaattaataaaggaacccattaagacctgattattgcagctaaaaaaggaaggtagaatttcagtcctttgaagtaactgagaatgattcaggcctcattacagagatataatctacattcatacatttatgttagtgattcaaatctattgggagagattgaattccgttaaatagtgcatctttcctgtggaacttttctcaggctttctcgggctaacctaagaggtgacctaacaatgcaaagtagttgggtatttagagattcaactgtgctgtaaaagaaaggctgcacagaaaagaaaaagaagaatgagatataatctaaaaagctatgtcagcttttcctttgggctgttttgtaaatgccctcttgtcatcacgctgtacagaagagcagcgaaggggctctagaactttcaaacactgcacctgctgcaaccagattttaatatgaaagtttaaagacatcttttccctcattttagacagaaaaaacaaagaaactcctagctaaaagatctgaatggcttcttctactggaacataaagttggtagatgtgtgtatgagagagagagggagaaagagagactagctttggattggaggggcacatgtctagggtgagtttaacaaaaattcttaaaccccaaagtggcatcaatagtgttggttcctattgtacagaaaccccaaaataataacttcctgtgttttgtaacttttcacagcagaatctttattgtatggtttcatcaaacataatttttaaaaaatgtagttttaattagttgtaaattcaaacatttggattcttctggaccattgggctgaaacccaaatccatgggaaacactacactgtctttcaggcatttgtcctctcaggtataaaactgtgaactaaaacattgaaattcgcactgttggttcatttttcagtatcctaaagaaaaagactcgcttgatgtgtgctctttatttgcttaactttccaattaatatctacagaaattagagctaattatattaaactttaaaaacctattgtaatgttcaccacattgttgaactcttctaaataagcactgcatgagttataactaatgcaattaaaatcctgattctagtattaaatgattctatttcaaaggatttgaatacacagaaaaatataagaacattcatgtaaactcatttttcaagtcactaaatacttaattgagcaatccttcctaatgctcatctctaacgctaattcttttttctttgcatttcctctggttcacaaccaatatggaggtcaaacgcacatcatagggatcctagcttgtgtgaacacagactcttctaattagttccctccaaattacagttgctgttgttaaactcccagttcaccttgaagtgtttctctgtcttacattggcagcctaattttaggttgaaacatatgaaattaccacttttgtaggtacaaaaccttaaaatgttggcaattttgtgggcttcaacaaaacacaaatgtctaactgtcctatgtgacatagatagttcattccagtacatgtttaggcattccttctagttaaacgttccctagtttagagtcattcttaaagaagtggtcctctaggagctgtttcttattcagattggaatggattatcacagtatttccttttttgtgcctcttaactcttggcaaaggtttcttagccttggacttagttctgtcaatacctgggctgtgagctagtttctgcgagcaagggaggagttggggtggcctgaaagagtgtgaaaaggagaggaggactagtagtgcagtgatattgtaaaacagagccctttaaacattaaatgtgaagatagaaaaaaaaaaaaacctcccctttatgacaaagtgcaaaggaaattgcataaaaaagaaaacagacagcagggtattcagccaaattatatggtaaaatctttgcgatcgccataaagtgcgtttgctttgaagtgcacgcatgattcagtgaagggctcatgttagcaattagaaatcggttatttgggtccctgatttcatttgcgccgagagaggcaacttttaagggtgacgataaatctccctgagcttaaaaggcagagagggccaaagtgtgaactttttacttcagcaacggaagcgagaaatcagtgattcattaaagaggagacctccttggaagctggcagcagaggaggaaaggacactaattatgtcttccttttctgtgctcgttctgaccagtttataacctgctgctttggacggtttaaaatcctcagcatcttctgctttctcccagccctctcctcttctgggagtgagaaggggggaaaagtcagccaagcaccaggctccaggtggctctcaagtacttcactgccaaaagaaatgggggtggggggaggagatcctacgctggaaagcaagtgagaaaggggctccccagaagggattggttcaggctggaagacagcaaaattcggaaagcgggaagataccgtcagcgccgtggcccgcgctgcaagcataggacgctttagcagcgaattagacagagctagaggcgccggcggaggctgcggccgcaacagccgcggcgaggaagggacctggcagcccccgagctcggtgcaaaggcatcgcgctctctcctcgctcccctgctcccccacccccttctctgcccctttcaccctccctctccctggcgttcccagcagcctagggtttcagatgtcccaccgccggttgaccccctcccccctcttctccacccctgcaaatgaggtttgaccagcagaggcagagcccacctctggcttagaatcactgacatttagactccaggcttcaacctgtttacaagcggactttccaaaggaagggggtgggagatagggccatacaaaacaccagccgccgtcccccaaaacaaaaagtgactttcggcagccttcaaatcggcaggcaccactaaaaacagaaaggaagagagggaagaaaacaacggcgactgggcagctgcctccacttctgacaactccaaagggatatacttgtagaagtggctcgcaggctggggctccgcagagagagaccagaaggtgccaaccgcagaggggtgcagatatctccccctattccccaccccacctcccttgggttttgttcaccgtgctgtcatctgtttttcagacctttttggcatctaacatggtgaagaaaggagtaaagaagagaacaaagtaactcctgggggagcgaagagcgctggtgaccaacaccaccaacgccaccaccagctcctgctgctgcggccacccacgtccaccatttaccgggaggctccagaggcgtaggcagcggatccgagaaaggagcgaggggagtcagccggcttttccgaggagttatggatgttggtgcattcacttctggccagatccgcgcccagagggagctaaccagcagccaccacctcgagctctctccttgccttgcatcgggtcttacccttccagtatgttccttctgatgagacaatttccagtgccgagagtttcagtacaatgtggaaatggatactgacacattgtgcctcagcctttccccacctgcccggctgctgctgctgctgctttttgttgctgttcttggtgtcttccgtccctgtcacctgccaagcccttggtcaggacatggtgtcaccagaggccaccaactcttcttcctcctccttctcctctccttccagcgcgggaaggcatgtgcggagctacaatcaccttcaaggagatgtccgctggagaaagctattctctttcaccaagtactttctcaagattgagaagaacgggaaggtcagcgggaccaagaaggagaactgcccgtacagtaagtaacaaatgcatgctcccctccttccaattatccacccccagcccacacgggggggaaaaatctgttccagatgtggccagctaaatatttacgtccccaacccctgtaaaatgattaagtggaatactttcacactaattcaccccccaacccccgtgtatacattgtgctgccgcatcccctcccctaagcgcgctcccttcacatcccccaccccttgccgctctacccaccccttccctccagcctgtcactagccggaccacgcagggcgctcaagagagttgttgcagtgcaaagatgcccctttctctctccaccgcctttcccacctcatccaaagagcaatttttccttccttctggaaatggctcaagtaaacacattttgtttcttttccctggcaatcttgttaagagttttgggacaggctcctcaagctgaaaataattatccgctgtcaattataggggctttgtgggaactttatttaagaaagaaaagtcaattccactctctccccacccccatccctttaccccactacctctagatatgagcgaaaagcatttttctggttttgatttttgttttgttttgttttgttttgggtcccttatgttagtttgagtgattgcagtccatgaagttagcttttcaggcaccaccgctgctatttgtcttctgcctgccttccctcttggtaacatgatgctcatgtctgcattgtcaatagcgtatgcactgctttgtggtgtcctgttgtactgtttcttctgaaacctctcatattgcagagccatactactacagcattgtaaacatctgggactggattcacacagacctcacacaaatttcattgtcattcttttattttcaaagtaaaagtcataagtctgtttccatggctatagtttatcccacagtgtgacattttctcctcagcgtaaattatgcctgggatccctacattttggtcttgccttttccctctctctttccttctttctctctttcccttctttctttcttgcaggggtgtgggctggttgggggaagagaactagaagaagaggggtggatattgtgtctcttcttgaatcaacccagcaaacccagattactctgttgacttcctttctcagatactttcaagtggtgagacttattcatccactattgattgttatgtgaaaggaacccaaggctctgtaatggcacactgaagacagtagacaatgatgtttaaacatctttagtgaccatttggcattatctcaatggtaaattccaagtcacctttaaaggggacatttttgtgttagttgttcaggaattctaagcatagattgtcttgtcagttaacttaaatacgtcagtcaaacatttcaagattccttggtttagaaagtaccaggtactaatgggaatgacagttgaccagaatttagcattttatttttgaatacaaatttacaagaattaagaatttagttttcttctgtggggatgcacacacattcaacattaacttctgtttctcctcagccactggttctatttactaaaattcacaatatgtttataagtaataaaaatatgtgtagaggtgcttttaaagtgtttcattttatgtttcatactaaagatattaagtaccacattatctgattcaaagaaagtagctgaaataatgtcataatgatgacaattatttttgcttaaaaatcatttgttacccgaattcattagatcctatgtatataacctttaaggtttttcgattaaaaatttaaaaactttatttacttctaaaataaaatagttgtggtgtcattcagttagcaggatggggaagaagctatccaaacattgggctggacagagtgagctgggaattaacaacaacaacaaaaaattctgatggactcatttcttatttttcatggagaaaactcaaaagaatatgataaagtttcagagtgttatccttgagcaaacatttttctttttaaaaaatgtttgtgctatactttaaatgtctttatgatatgacttaaggtcaaatctgctctgttttagtttacacaacctaaattgctattttctagaataataatcacgtgtgattagctgcagagtaaaatgatttccacagtacacactgaatttcatctttacaataagaactatctgcaaagaagaaaagtatacaatatatattgtataaaaggggtgtagaaaagttccatcctaactgtccaaaatatactaatattttattttctctgtgataacatatattacttgttataatgacaagctaaatatcttatatggtaatgcaatcttaatcaacggttaacagtgaaaggggaggggttcactctgctaaatattgtcaaaccataaataatttaggctttccaagaacatctgtgtcaaaacatagcaagtgaaaattagagattgaaaaagccttaatttcacatgtggccaggtaatctaaatgctgctacgatttccagctggactgattcagctgaactacatggtatcattaagatattgtctaaacgttgcataataacatgtgaacaaacttttaccatgcctacagggtagccagccagctgtccaccaaatggtagcttgttaaatactaggatctctaacctctgaagagtgtcaattccttttccaaaaaccacatttcagtaacattttcctaaacaagttattaattattctcaatacacaaagctgttcttttgaggtttgcttatttgaagattaattttctttgttacttttgaccctagtattattgctgctaaaatacagtaacagcttatctaagaggttatatgtttttgttgtcctgggtaattaaacaactgttttctggctttttgccagcagaatgctaacaaaagggaagtaagacaatcattcataagtattgcaaaatcatttttaacttctactttcaaagctagttcccagaaattcgatggttctaaaaagactacatgtgttaacaaagctcttctctatatgggtgattattataatttttgagggtggggggctatactttttgtttgcttctttgccatgatatgagagtagaataaagagagcagagatgaattatgtttctcctgctagaagtctgagaaagcttgaataatttagaatagctgtggtgtatctgtcactagatatgtgtaggctcatttaggttttgttttatcattctttacatctagagctttgcccttgaaaccttaccactcggctttagttctgacctcttagaaaggctggatacagctgttaggtatccttgcaactgggaccagttgacttatttctggatgtgagtaaaacagctgtgagcttctcccatggttgtcatttgtagaaaagagggatctagtgaaaggaaaatgtaccctaaacttgagacaattaagaatagatattccaaaaagggaaactcacaaaaaaggctcctgggcctttctgggaaagaagaatgggaggcaatagagaaatcaatatgtaaagagtatgtagtataggctttatctctttaaatacacacttcatttaatagtcataatagtcctacaactatcaacatttttcaaatttgaaaactcatactgaaaaaagtaaattgtccaaggtcattcaactagacatgggcagaaccaggattcaagccccagcctattggttgtatctctcctttcttattgtacctttctgctacttccaacattaatatcaatttattagaatttgacacctcaaatctctaaaaaacaaattatccaaatctttacttgcttcttgctgtgaacacccgcagttctttagaattaaattggaacagaaataaaatgacaattgcagaaaaacaaatacattaaacgtgtcattgcaggtggccacatgatatcagacaaggttagtgtattctctaggtaaactctctcttttgatatttgggaatataattgcttatggatacacacaaaatacacatacatcaatctcactcatgttaacagaggtcattaggaatacatgactatttaagaaaaatccatgaatgtcattttatatagtaattgtttacagctgagggccaaatgtttaattgttcccatgtgtaataaaataatttgattgtaaatacctgtgataaattggactgttgcagaaacttctgatatatgactctaaaaagggcgacatcttagagacttaagccatacatattaagaaaattttaaaataaacctgcaaatcaaaaagacactttaccatataaaatgatagattattatctgggattattactttttaaccaggactagagcttattgtaggaagctaaatgaagtgagaaaaaaataattgttgaggaaaataggaactcagaagtgatcttctaataacgacacaagagttttctgtgaagaaaaacaatttatggcttccactggtatcttatttcagttgtggttgtttctagaatttggttgcataatttataaccggcagcatttaatcacgagcattgaggatttatgaaggtggaagacactgtatttaatgtttacatgacattgtcctgttacctttactgcattcctaccatatggaccctccactttgatggatttatcataaatctattaaaaatgcacaattcaagagagtttcctcttcataaacctgatttataacctcctacgaggagaaacctaaggaaacagttgtcaggaatcagatgcccgtattggagcatgagaattcagagacaccaaattctaggtcttggatatttcagtaacctattacctaaaggtgtgaatgactctttaaaagcagttgttttcaaaatgatgtttaggcacagaattttaacaaaagaaaaagaagtagaagaagcgtgtcttataggatcaaataaactccactgtcttcatagtttcttctacatttatgctatccagtttagagtgaaaagctttattccagtgcatttctttagaatttaaagaactgatagtagaacatgaatgaacactttaaatttctatacaattactttaatgtccagaagcaaaccccatttattatccaaatgtctaactttccacaagccaaaatgttgaaaaaaagttgacagctcatttgaaatggaactaatgttcctcccatttatgagctgcctgtgaataactacatctttcctaagccttaatgtctgtatgcttatctgacattgtagtgcaaatgatatttctttattatgcttcagaaagaagagtaatatatgtgtattagttcaaagtgattttaatctatcttaacattaattctgtgaactttgcaatgaagagtaattcagatgacatttttagtattactgttccaacatctgtcaacatttatagttgatgtttgcttaatataagtaaaatattagaattttccttccagaaattataaatctattttattttacagtaagatggaatatacaattcatgtttatgtaattttaatacagttttatcacaatatatacaagtaatcaacttcattttgtctcaagtcatttatgcagaaggatttaaatctttcatggtatattgcaatgatctaagataatttacatttgacatttgaccaagggtgtttattactttgtttcacagatttaaaacattattttgtaatcggcactctttcttctcagtgcatgttacctttatctgtgtcagtcagtcagtacaacaaagaatagcttagaaatgtacttttaaaatttgcgaaaggaaatatacctgcatcttggaaagccactagtgacactctgatactgaattaatgaatacaaaatgttgatgttttacagaatcagtttaaaacccagtacttaatttgtatagattttacacaaatagaaagtttcaagacatctaaaagggagccaggtcacccacaaaataatgaccttaaaggctcccttccttttaaatcagatcaattgtgttctttctttgaacgctgtgttctaattggcacaatacatcaaagaagacactcagagtagattcccatgtaaggtggacaactggacagtgactttttactgccgctaacacgtgcatccaattactatctgatagattcatagtgctggcagtaaagcattgccttattttatagttcacctaataattcttcaacctaaacctgtccacctttacctatacccattctgtcagtatgtgcattattaatgaataattttcaaagttttggcatgcttcctgcaaagaatgatgtcattgagctcttaatgaatcatctaaccctaatagaaggcaaagtattgattaacttgatataccccaaatttcaaagaattgtcaactaaacctaataattgcaccacaactagaacctaattctgaatagggtgggttaaattccatctaattctgaatagtgtgggattgctgcaagatttagaacttttttaaaaaggtatttttaatgtttttctgtaattattattacttttcttcaaggaccttgtgttaacatgctttactgataagcagacatgttatttcatccttaaccttttttgctcctgtgttgaggacaacttgacatgttcatagagtctttacaattcaaggctcattgacttctttctaatagctttgttttgagttagtctgtgacaaccctgcttctgagccattgtaaatccctaatagtttatcgtcccttcctcactccattattttcaccttcttggttttgtgtgtgtttttttttttattacttttatctggtttctgaactggctacatacctttaagcccagggaaagtcattcattagtattacttggcacccaaggtgacattcagggccagaggcctagacattttcagatgcgtagcatctaaagctgatagttttgtttttattttgcataaaaatcttcaatggtgtaaattcaatatactccatcaggaccgtcttctcatttcgattctgcagtgaattccttcttatcccagcattccaggtcaatttcttttaagctctgctgtaagtgaagtggacaaaccactgataagcccccttcagagtgctgattatcccattactagatcatcattctgcatttttcctccaagttaaatttttgctcccaataactcttcctgcttttcctattttcttttaaattatttgcatacataacacttactagctactttgccatttttctcacatttttgcctttgtctgggctaccatgaaagaaagaaagtgaagatgattttgaagacagggtctcactcatgatcacagcttactgtagcctcaacctgctgggctcaggcgatcctcccaagcagttggaactgcaggcatgtaccaccctgcctggataatttgctgatttttgtttgttcgttttgtagagacagggtctcactatgttgcccaggcttgtctcaaattcctgggctcaagcaatcctccagcctcggccacccaaagggctgggattacgggtgtgagccaccatacccagcctgaacacttatatttttctactttagttttcatttattttaaaaaagatgaatgctgatttggaggtctttgatattcccaacttccagaatggcacttagattatcaagcttctctgtgtacccctgtcaaatatatgtggcttttaaaaataaaacctaggttctcaataaaactttttaaatcaggaaacaatgtaaaataggtatatgtatgtcaggtgaaacaaatatagaaatacgtatgcctttactaggaatttttgaaacaccaacaggagttagaatctgaattaattccataagtgttttcatatacttctaagaattttttggcactgattgatgaattagatttaagtctatcatatgcagaatctgactattgacatatgttaaatttatgttttaataataataaaagtcaagcttgtttttacaattgtttccaaattttaagtaactttaatttactgatagaattattaaaagaagaattaatattctgtaacatggggtaaatggtaacatatggacactgatttacatactattgatagtctaaagtaagatacctttataatggtattcatagcagtaattaccagattttgggtgtcattttttgggaatatctctgcagaaggatatgattccacaagtattaaagaaaagtgctagtgatgttaatcacattatagtataaaaacttgatgaacaaaaatagtgttttagagctcaaatatgctgacgtccaggaagcaagagagacggtaaagatcacataatgaaattttttagaagccagagggaaaagtagaaaaagagaagaggccctagagtgtttagacacatactgtgaaaggaggaggagatgctttgctggagtgatgaagacaagggttttgaactctcaggaaagagatcaagctaatgagtagcactgcgaaagggctgacatgacaagaaaggtgtgagggaaatataacccaagccctggcattcaactggatgttaaattaactgaaatgagaacctatgatctaagagaagtcccacagaagtcatcgcagccaggctatcaaagtaaggaaagctaagtcccagttcctgctaaagaggaggtatgatagagtgattaaaagtatgggctttgattcaaagggataaaaagtatagtcccggagtgaaagcaggctttgaagccgcagacctgtaggcaaactgcgaggtaagagttgataactttgggcaagttgtcatcagtaaaacaaggatattaacaatacctacctttttactacatggtaaagatgaaatgagatcgtatattcattcattgattcattcatctgaaatttgagtgcttgctttgtgtcagatagtgtgtgaggcacgaataaatgcattgttgaaaaaagttggtctttctgctctcatagagcttacactctccacagataatgtcaaaaacgttaaccaagaggtgatatgatgaaaaattgaagtgagtgttatcaatgacacaagtacagtgttttaatagaaaacaactgggaactaccccaaagagcactgctagagaagccttttgaagaggtgagaagggaactaccccaaagagcactgctagagaagccttttgaagaggtgagaagggaactgcaaagggagagtttggtgcctcattcaagaagtacagagaaggcacattgaggctggatgtggcagaagtttgaaatctgaattgacacacacacagcttaatggtgcctgtcacatcataagccttaatcaaaaggatactatatgaagaaaaagtaaatacgatgcttcctcttatttcaaggggaaacatcaggaaagcaacaattatattattcgatgaagtggaaattaacaatgctggaattgaggaaagaggcaggaaggagaaatatacttggtttttgtttaaaaagggaaatatcggccaggcgcagtggctgaccctgtaatcccagcacttttggaggccgaggagggcagatcatgaggtcaggagatcaagaccatcctggctaacacggtgaaaccccgtctctactaaaaatacaaaaaattagccgggcgcggtggcgggcgcctgtggtcccagctactggggaggctgaggcaggagaatggtgtgaacccgggaggcagagcttgcactgagccgagattgtgccacagcactccagcctgggcgacagagcgagactctgtctcaaaatagaactacctgaaatttgatttggaattgtaatattcatactgttctgaagttttggggaaaaagttagaggcctggttctttaagaaattggtagaagaaacagattgagcacttctaatccaaaattctcaaatccaaaatgctccaaagtccaaaactttttgagtgccaacatgatgccacaagtagaaaattccaaacctgtcctcatataacagatcacagtccaaacacaggggcacagtttattcagcatccccaaggggaaaaaagaccctcccatcccccttcagctgctgttgcttaacagctgatacaggtattctggtgatgctactgtgctgcctagttacccccaacacatgattttttcactgtaatagtggtatgtcatgttgtttactcttaagtacttatgtatgaataagtgtaagaaaatgattgcttatcagtagcatttaaattcagagtcaggaatgatggtgatgccaaacaaccacagattacctacatcaacggctaagatagtgacatctttgctttctgatggttcaatgtatatggactttgtttcatgaacaaaatgatttaaaatattttaaaaaattacttccaggctgtgtgtatgtaaaccacaaattagttttgtgtttagacttgggtcccatccccaagatatcacattatgtatatgcaaatatttcaaaaactgaaaattccaaaatctgaaacctttctgatcccaagcatttcagataaaggatactcaacctgtatttgaaaactgaaggtaacttgaggagagaacaaggtgcttaaaataaagaatagaagatgaatattttcaaggacacaagctgtaaaaggttaaaagaaagaaaaaaagaatagcgaaataggtaaccgtggagatttgatgactatagaataaaaggcaacaaagaaaagtaattcttaatttttaaatatttcagaataagtcttatatttcaacttacagtttcgagacagcattatcacagatacttagttcttattaaacttggtagttgttttttgtttctcatcctattactgtgacctttttggctcatacccttaaagcatttgtagtctagaagtagaaagaggagatcatcacagggagttggaagagcatataaggcagtttctactcaatgccaagaagcagggcagaatttaagtaaacagcagtctctaactgagggagagatgcatgacatcaggaggtcacactgaggataagggactccagctagacagagataaaacaagagaaggaagaatattctaaacgaaggcacataagtgtgtgggtgcagagtcaaacatgaagttttcaggaaatcacagggaggaaacaaagtttgcatgcaggtgggcatcttctgacagacaaagcaaagtacagtagaaggtggtatcatgtgagagggaagtatgtaaatgtatccttacatttgtggatctaaactttctggcaaaatattacattgacatgatttttatttaaacttgccctttacttttttttttcatttttactttttgaagtaaaaaaagaaagaaagtggaagaatatttcaaaagagtattatctatattataattgacaatctaaatatagtaagtagcaagaaattgtagcttaatcaaaagaaaaaagaactaattttatactagggacatggaaaagaagagttcttctgctcttcactaaaatgacattattcttcatatttctgatttgccaaatgatcattattttacaatttaaaatacttggaacttcaaaagttcttaatatgtatatttcactgtgaagaggttttgtaatttccagcaaatccccaaaaggaacacctgaagcatcagtatttcttgctctagttgtgggttttttgtttttttttttttttttttttttttggcatttgtattctaacttgtcttagatttacttggtttagataatcagaaaaagaaacaaagtatgctaaacttctttttctggaaaaggagtacatgtaagtgttttttaaacaaactaggagaaacatacagacagcatatatacgactacacccccctactgacactatgagctcttgagtcagacttcttggtgtagaatctgggttatttataaaacttcatagttgtgtgatcgtagccaagttactccctgggtcttggtctctgcatcttttaagtttagataaaccaacctcaccactgttggaagaatgagtcataaatttacaaatgatactataaatgtaaagttgtattaaatataggacctaacaccatgtaagagtttgacaatgttagttctcattactcttttatgccatgactgcttgtgttgttactaattattccattatgtgaaaaattccctaaatcattgaataataaaaacttcagcagattaatgctttcatcaattgattctcaaaaaaattttgtaatatgggtaagatcatcgttgttatacccatactatgtttagatgagaaaattaggcctaaaagttattgtgccagactgacattatagagttaacataattgaggataaaacctaggccagtcttagtgatggtgatcttctatctttgcttgcctgggacagtcccagtaaatgtctcttgttctggcattttattattaacacctgttcagtctcagtgtactatcacaagaccatcctagtcttaatcagtgtggtctatgtaaggcacaaatccacacaagctagttccctcttagatactactacattccatcacatcccatgtcatatgtcatataatatcatgtaatctctatattccttcacatgtcatataagaccctcatgatttactccctaccaactccctggcctcgtttgttactacagtgcccattatagctattttatgttgatttcagttctagaacctgccttgtcccttcctgttcagccttgccagacactgctaggtcggcctggaatgatgtccctgccctctttcccagctcttcttcttttcaaatttcacttagatgtcatctctgggaaaccttcctgctgtcctctcaaaacctgtgcttccaaaaaccatatacctagcattataatgcaataccacacttgattagttgactgtttacccatctagtttcctcataaacagaaaacttgttgagagtgagaaccacacctcactgacttttacatgcatgcacttaagatagtatttggcatataataagtcctctttctatatattattaggtaaataactgcttttaaccatatgatcttggtcaacttacttagactctcaaagttcagtcacctggtctggaaaggtgattaatatgctacctacctaaaatgatggttgaagtaaattagctcttaaaatttcacttagttctaagttctacaattctgagaacctgaaaaataagttagtagggctatcattatttaagagactgttaagtacttaaattcattaaaatttctgaattaaaaaaaatgtgtaatcatgaagtgaatcatttttcatgtttctctacttttcctaaggttactactgataacattcagtggggattaaaaattactttatcccctttaaaattcctgctgactatgagacagttatttctagtttcagagttgtgtttatggattcttggataatttggtggttattaaaaaatgagcaattcttagtaattattttagagaggaagaataaagtgctgtaaagagtgggagtaaagggagtggtcttgtctgtgtcaaaacatttactgtggatcttaagcaggtcatttactttatcttggcctcagagacttaatctataatatgagtgtattgaactacattattattaaaatattttagtttagtatatttatttcacagactaaggaccagattcctggagtgtacctatattaggaaataaagctatattatgctgaataatgagcacccaaagacatcaggttctaatcctggaacctgtgaatgttactgtatttgtaaagtttttgcaaatgtgatcaagttaaggatcttgaaatgaggagattattgtcattgtccaggtaggcccttaatgccatcacaagtgcccttataagagagacacaaggagattagacatacgtagaagcacagaaggcagaaggcattttgaaaatggaaacagaaagatttaaagatacaatgttgttgtctttgaagatggacaaaggagtcatgagccaaggagactggaagaggaaaggaacagattgtctccctagaacctacagaggagtttggccctgctgacaccttgctctaggcccagaaaaattgatattggatttctagtccccagaacattgagagaatagatttatattagtctaagacaccaactttgtggtaatttgttgcagaagccataagaaaccaatacagatatggtacttagagcagggtcctgctgtaactcaacctaaaaatgtgaaagtggcttgggacgtggacagtggacataagctggatggattttgaagcacatgataaagaaacctggatttctttaaacagacttctgttagaaatatgaggataaaaggtgctaaggtgaggatttaggaggaggtgtgaggcacagtagagaatgcctacctcatttagagaatacatataacatcataaacagaaagctggtggacatattaatattaacagtgctttttttgagggctcagaaggaaattaagaatatgttattgaaaactagaagaaaggcaatcctttcagctacagaaatgtagctgaactgtgttctacgttgtatgaaaaacagaacgtgtaagtgatgaatttggatatttagctgaggaaatttccaagcaaagtgttgaaggatcagcctggtttcttcttcctgtttatagtaaaatgcaaaaagaaggagataaagtgaaaaaagaactgttaagcagaatcaaaatagcacttgatgatttgggaaattctcagcctatccagattgcaaaagatgctaagttgggagattcactgttaggaaagcatgctctgaagagaaggctaagggtacgactagacaaccttatgatagtgctgaagaaatgaaacatgtgatggatggattccctcagccacctcagcagaagtcaggaatagagatgaggttacctaggaaagatttgtagagaaccctctcatggcatgaatccctgtgacatacatgggaggaccacagagtttttgagaatgttgtatcagcagaaacactgccagctggaactaaaatagacaaagacagagcaagttgaaggaaggctgtcagactcccaaaattctacaggcaagttgataaaactattcagctgcaaacacatgatagctttaaagaaaaaggatcaccatgaatgcagagccttgggtacaaaggaagtgcagaggcatagaagcagagactctagccatgtgccctgaggcaggaccctcaagtcacagaggctgattcccaggccttgaaacctagtggagtttaccctgctggattttgaaattgcttgggaccagtgacttctttcttctttacatttttctccttttggaataggaatgtttataactgttatactatgcttgttctaccattgcattttaggaactgataactttttttctagttttatggactcagtaatggagaataattttgcccaggatagatcatacccagagtcttatccatatctgaattccattatttacattacacaatttgagatttttgagctgctgttacttaaatgagattttgggctttaatttaggtaggatacagaaggctgaataatggccacccaaaaatatcaggctgtaatccctggaatgtgtgactattaccttatatggtaaagttttgcagatgtgattaaattaaggattttgagatgaggagattatcctggattattcaagtgggcctcatataccatgacaaatgtccttataagagagaagcagagggagattagatgtacacacagaaggcagaagatgatttgaggatggaagcagagatttgaagatgctacactgttggctttcaacatagtggtaaggccatgagccaaggaatgtggccaaggaatgtggcaccagaagctgaaagaggcaggcaatggacgctgtcccctggagagcttctagatggaatacagccctgccaacaccttaatttcagccgagggaaacagatattagagttctggcctccagaactgtgagagaataaatttccgttgctttaagccatcaactttgtagtaatttgttatatcggccctagaaaagtaatacaggaatctaagacaactttgtgcagcccaaattaaggataatttgacaaaaacaaagcactatcttgtggtagatagtactaagcatggactcaaatagatgtaagttctaacctcttaacgaatggtgtgagtcagaaatgtctctaaacttttgttttctcattccgtctatgaggattaaatgaaataatctatgaaaagtatctaggaaagtatcaggcttataatggaacctcaaattttagttgaatctaaagggataacaaatttagttgactatatgcttttaaaacgttattttaaaatatagtttatttgcttacaataccttgactgctaggcactacaaaagcaaagggctttggttgtttgatacagaacctatccataaaagtagcctgtttttcctttgggcgatacattcaatctgacttgattaaagggttcccattaacctggcccaaaagccccttttctgaagataggcgctaaaccaatgggaacctttcctatttaaagaaacccctttatatttaaaggtgagagaagaccaatttttaaaaatgggtaattagtgttgccttagttcattttctgttgcttgtaagagactacctgaaactgggcaatttataagaaacaaagtttgtttcttatacttctgaagtctgagaagtccaaagtcatggagccgcatctgttgagggtattcttgctgctgtggactttctgcagggcaccgtggcagcagagaacatcacacatcaaaggggctgagtgtggtagttcaggttcctctttctcttcttataaagccgccagttctactcccattataatccattaatcaattaatccatcaatgaattaatccaatcatgagggcagagcattcatgaaccaatcaccttttggttcctggtgccatactggggattaaatttcaaaatgaattttggaggggacaaatattcaaaccatagcaaatgtaattaaatttcagtaactggtacattctgaaggatttttcaacatttatgttgacattactgtgtatttactctttgaaactaacatcttttatcatctatcttctctcactatgtgtagatttcctttaacatcctacctttaagcctctcacatctcaaaatgtttccataatacatagtacaactctcctaaaatttattaacatctttgtttacatcacttgaatttttatggcttggaaaaaaataagattctaaaactggcatttcctcttacagaaaatttgtttctctcatagtaataggggctatgaagttagagacagcagacaaatgttttgttgtcaagtcttagggtaatggagcttttatggagctgaggctgactgaaacagctgctaatttagagtgttatggagcttacttctttttctcctcaacactctttgtctactgagtgctgggactatagtaatttgagaagagagatgatggttgtgatattgggaaaggtggtgcaattaggaatggggctccagtgcaagggaacgagataagaaatgtgacccaggattaccttgagcacaaagagcacatgaggatcaattctaccaaccccagtgccattcaaggatttttacttatattatctgagactaggcaaataaatgcatatgttcattccaatccccaggaggtttctgaaactttcttagagatagaatgcccacagataagagttgtgcattctgatttgagatccataccctacctatttctctttataagaagattctttctaatgagcatttagaaaacaggcttggagaaggagaggaaagccagattggaaataggtagtaataacaggcagtaatagatatttctcaaacttgggtctatggaccacatgctcagaatgaactagtgtgcttgctcaaaatgaaaattataaaagtctcattctagatgcactgcacacagttggcggtggaggaggggggcaaatatgttcacacatagaaatctgaactttaataatctctaaaaaacaataaaattaagagtaacactaaattaagtgtagaggtgatgggaggaaaggacaaaggtcttttgagcttgagataatctgaaaaatttggcagaatgaatttcatacacatattccaggtttgcacattttgtatttttgcacatattctggaaagggagaaagttccagtatattctataaaaagggggtaatttttaaagtaagttaaaacacatgcttaagtttaaatgctccctgtttggtgaaagagattttctgataaatctgagattaggtcagttttcagctcactcttgtaagtgtctgagtgcgtgtgtgctaaagctggagggagggaagagaagatatgatattcatcaaaagctggctgttttctcaccatgtcagagtgctccgccactgctatttataaggaagagctggggatgctacaccaaatgacagtcgtgtaaacaaacttttagggattgagagctcttcccttcttcttttttaagccacaggaatttatgcgtatgtgcgtctaaccccaagagtgttggcgggaacctagccctcaaagtgatcacttgaatttgcagcccagcctccaaaactggaaacatgaagaaggaatattgacgagattctatagtttcctcaggaaccatcttttgaactcaaagagttctttaatgtcttatggtttattgagaaaaaagtcctctattgtgagaaattctttccttcagctgtggagattatttgagtttcagttcctgtagatgaccttttctcagacgagtgaactgggactacagtcaaagctgtgactctgtccaccttgggtgtttcatgagtatacaaattataggctcatgtctatgtaagtgacatttctttatacctacaaaatacacataataccagattcatattccatataattcatggaatatctcctgtaaagtcataggaaacatgaatatgaaaatattaataaagaattgaccacatgggctggaagcagtggcccatacctgtaatctcaacactttggaagaccaaagcaggaggattgcttcagcccaggaatttgagatcagtctggacaacataaggagacctcatctctacaaaaaataaaaaaaaattagccaatcatgatggtgcttgctggtagtcctagctactcgagagtctgaggcgggaggatccctttcacttaggatgaggctgcagtgagccctgatggtgccactgaaccctagcctgggcaagagtgagaccctgtctcaaaaaaacaaaacaacaaaaaaattgacagcacaatacacactgacgcatttttcttctgtacagatttttaaaaatattttttcttcatatcaaaggcttcaaagtcatttaataagcttgacctatagtttcagctgaatttagcagtatgtaaccactgacaatggccataactaattagtctgagatgattattgtactgaacaacctaaagtagtgtggttgggtttttcacagtcccaaaagacttcatggaggtgtggaggtttgaaattatttgttgtatgcggtgctatgttgtatgaggcacttagccaaagacatctttttcctaatgttttgtgctccaaagaaggcatcaaattattattaaagaatctgaattgcatacttccaattttactcattgaaaaatgccatccatcaattgtcttattatatattttcccctattagtgactatgattatagatagaatagaaatatattgcctcagtcctagaccatcctaccctctcatgtccttattagtgactggcactctgattgaattagtaaaattttaaattagtaacattgacattttgtgaagaagcagactggggactagaaagggaaaaattagaatttggaataggttgttattaaagtcatatttttatagtttgttacattaactataaaaaaatccttgtttccctatgttgatcttgggcaaggttttgaggcaattcagttttaatcaacatatgtgttctttatgtgccactgtgttttttttaaattactttgtgtattagcacattacatttaaaaaacagatagacttaaaaaaaaaaaaacagcatacaaaattttcttaggcagcattgaatgattaatgcaaactgggtgaatggtcttaactactgatatctagctcctggttttagatattgtttcagttctgtttttagaataggagaaaataataataactaatgatattgaatgcttaggcctatgtactttatatgtacactcacttaatgctcaaaacaatcctagagtgtggatactaggttatcctattgtactgatgggaaaatttgaagctactgagaagccgagtaacttcactgagtagttaataattgatgagactaggatttgaacccaggtagtatggcttcagttcctgtgcacttaatcactaagctattgtgccctttgataagatgcaactagtctaatttgaaatccttcaattagacagaggcaaattagtcactatgctacatcagcaaattaaactttatagctagaggaaacttccatagagtattctgtgctttcttgacaaagtttgcctacataaagaacaaaaaaagatctcttcttgccatctacaaatgtttacctgcagttaaaaaagtctggctcctgaccacttttattttgaaactcctgatggctaaaaaagaaacagatgaaaaaaatggatttttttcagtagttacttttcaaaggatgataaatggaaacatttaaaaaatacttttatagtgtgaattcattttctatcagatctttcagtttgaaatttcttttgttatttgtttaatatcaaagatttttaaccttctcacatatgaggaacactatttattttattttcttgcagtttgagaaatatttgtcttgatgccaaactgcctgaagacatactcttttacaaagaaagcaaaattttaagagaagttaacttagggttgctgacatttattttcttctttatttaatcttcccatagttcccaagttcagaacttgaaatattatctttattaaagaaagtattcatattaaactcccacatctatatgtagccatttttaagtctaaagtataaattaaaaattatccagacactatcaaataaaatccccatcttagcaaatgcttttcccaatgaatttcaaccaaactaacctagaatcagcttttggcgaaccttgtactaatggaagatttgcttttttgcttttgaaggcaaattgatattcacaaatcatatgtcacaagccactaaaagtgtcagaatcccacagcaggcccttggtagcttgttaatctctcctgtttaaaggaaacagactaattcacttaaatataatgaaagccatgcctgccccagcttagtcccttaaagcgtcagcccatacaagtcctgccttctttcttcacctccttctttcctggctctgacaattaaacatgaaactaagaagcaatgctttccttaatgttgccatgtctgagttatttcagatgtcacatatgtgaaaattgtgaaaatgcaggatgcctttaaaaaaaattttcattgacaatatatgcaagggggtatccttgcccacctttcaccattgttctcaacaaagcataaaagataaatcaggatgttaaatgcagggaccagatgtatatataaccttttgccctcattattctaattggtttccattaggaggagggagggaaaagtaaaacagcaaaaaaaaaaaaaaaaaaaaaaaaggaaataattgatatagaggtgagagagtgaacttttaacattggattggctaaaatctgggaatattataatcagaataatagaagagcaatttcaaaagatcaaatcaaaggtgattcatataacaccaataaatggggaggaaataatttatcttaattttatgcgcccagaaatttttcaactgtggtcagtggtgccccaactatattatttttaacacttctcatatttacatgtatttttgtactttgaaggaagagccaaatgttctctgactcttattgcccagatacacacaatcacatttgtggctaactatatttgtatttagttctcccccttctaaccatgtgcattttccccttttagtagcattagctatttgtggttctccacactgaaatgaactgtaatatgcagtaaggttagatcttccaatcaaggacttcagtggcaaaggacctgagactgggatgacaacagagtcttactttcaacctaagtcttaatcaaagcgtagagtcataagattgaaaatctggagttagggcatgtaggggaaaaaaccattttcattgcaagcatactgtacatgttagtcatggctcagactgcaataggaattttatggagcaagaaaggggaggtgcaagaagaaggttttgagtttcctactaaatttatttttaaatagcattacagcatcaggatttataaagaaagaagcaataacaaaaaggagctttttacctctctctttttttttttttttttgcaaattatttgaggatgaaattgaccaccagaaaagagacatgaggagaccaaaaggagctgactgattaaagagtgagctcctgaatgtggcaaagtctggaatcctacaagacaacctaccaaagcctgttgacagctcatcttggggtataaagtctgagtggaggtcttaggtatggaaggagctttcagaggtcatttaggtcacttcaatctctctccacaaatcacactctttgttattttagacagctcccaaccatgccgacattttacagtaataactataattggaaacttgacagtatccattaatttccaattctagtgtttggctatacctatttttatctatatattttttaactcatatctcttattctctcattttagctcattttgccttggtttctcctcagtaagcatgagaagtaattgggtttaaataacttacttaaaatctttacatattctatgtgaaaaccacctacacagataatattatcagatttctatcttggtttccttaaactcaaaggattcacactgtgtttcaattcattttgatactttatttggtttacaggatcattttacatgtatgatgttatttagttttcaccataacgccatcaattaggtagcatatgtggtagtatcttcattatgtatgtgagaaacctcatcatatttcacttaaactagaattctctttctttgatttctaatcagtaatctttccactgcactatcatattaatcttaaataaagatttgttagccacagcactatttcgaaccaggtaattctttgtggtaggagcctgccctgggttttgtagcacatctagcagcatccctggtctccacctactgaatgccagtaacacctccctcccagttgtgacagtcaaaaactgttgtaggctgaggaattgaaaatctgactatatttggagaataattgcattcaattaatattgagtgtcatgagattctctaaatataagatgtgcatcttcctgttaatatacataagattgctgagttatcatttttttgattatgacaatgcctgtcacctcacagaggatatcatccaatacgttttcttaatacgtctaagggctttggttctccatcaaaaagtaattttccacttttgctttaaaaagagtcacagtaagaaatgctatttctttttttcttagaaatttaattttcaaaagaagaaaatgtaactcagatgggttttgaaagtctcagccacctcagccttggtggatagccaggatctcagccctggtgttttctttctttttttatggtggtccctgaggttgtgagtgtctgaaatatatagtgaattctacaatgcaattcaaatataaggaagtcttgtttattaccaggtgcaaacttgttgcttcattaccatgtgaaccagggctatcttatttgtgtaactgaggttataggagagatatcaactatgaaggaaaatgtatgtggagaccaaaagtgtatatgaaataatgaataatttcacgtgaatatgtagttagtgattgcccaccttctaagttaaaaatagatttcttaatgacataggacaaataccaggttgctgaaagttacttcttccatattgtaaagaggctgtttcaatgaagaaagatattatcaatgaccttattggaaagtcacatttaaggtgggtgaatccttcatgctctatttttgcccttcaacaaacatatcttttttggtgcttcttgagtgtataagacatttcatgggaagtttcaaactctgtgaaatttgcttgtacaaataacagaaaatttagagcataaagctttgaaatgtctttaaattttccaatctatgttttgaaaattactgttgagttcaagaatgcctaatggctgagtcctgttgcttcactgtaagtataattgtatttccttatgaaggttaaaattcccatttcatttcttccatttatctaagtttccaggtgtcattcacaattagccattaaaaatgattgtgtttaattgagatttaccagtggctttaatacaagttttcacttaaagagcaattatgttttatattgcaagttgaaaactgtattaacggtgaattcagtgaaggaaatttagaggtctgaggctaatgaaaactttttaatgacatgcaatacctaggaaatcatattcatctgttgtttttcacaaaaactaactccaggaaaattgatattgttgtagaatattggaaaagttacagaggacactatttagaagtacattcattattcaacaactactttcagtacttactacatgccaggccccgtgaaatattttggggacaacataattaataattgctgtctcccactaaaaccagagacagacgcataaacacataatcatacagtacagtaagtgctggaataacagggcagtggaggcacaaaaagagaggggaagagataaccctgcctaggtctgagtgtttggggtaggaacactcagagctgaatagtgtcaattcaaatttctccaagaggaaatttctttagcagagggtaaaggatatataggatatctccaagacattagggacattttgagtagaggagggaagcagcatctataagggcagataaaattacaacaatttgtcatgctgagggagtatttgttctctaacatatagtatccattgatactctatgatatctctatatgggataagaggacaaaaggaatacaggactagctcctgtgaataacactagtgttgtcaaatatgaggaaatatagtaagttgctttgtgctgtttgctgggttataggagttctccctatgtcctagctaattttatcaaaaattgtaacattacagtgagtgctagaataacagggcagcagaggtacaaaaaaagagagaagagttaaccctgcctaggtctgagtgtttggagcaagaatactaggaaaggaatggtgtcaattcaagtttcaagaaggaatctctttagcaaaggataaaagatatatggactatctccaagacattggggacattgtgaatagaggacggaaagtagcacacatcatggagcagatgatgttattttcatttttcagaagaattaaggagtaactagtccaagttcacaaagatggtaaatagcagagccatgatgccaagctaggtctgcttgactccgattttcatgaaatatcatctctcttctatgtgttttatctggtttggcatggctttttagagagtatagtctcttcaagggatcttcagggaatagaagcaggaggcataaagacatgagatttgtttgggaaaaataaatacagatcacctttctggtaaagggagcagttgagagagtgataggaggtgactttgtgtccatatggatttgagaaagagaccttttgcagatgcagacgaaaggaaatgagaatggtatataggtgcttaggaagtagagactacaaaactgctgaataggcaaaccaaaatcagggaaaattttcaagcaaacttacagaaaatagcaaatgcagatttattaagtgaaatataataatgagtttgtaaggcataaagaatctgtagaagcccaatgtttccaaatcttgccagactatgcaagacagacttctctctcctccctggctcagctcctaaacagagctattatctgcagagataattccagatgctctgaccccttccaaattcttatttgatgatcagtcatctggagtggaactcttactccccattgaggtttcagagtgatgcaccaaactttgctctcctaattaacactgtgggtcatccccatgcacccagtagttcttagagactggactgtcaggctctcatatctatgacattgcctctagggaggagaaggatgggtggaccccttgagtggccttcaaatgcctcagcattaaaatagaaagctctcatgagtgcctgaaaaatctcagctgttatttctccagcttaaaaatgtttgaactcagaaagcaataaactacaagctaagaagacccaaggagcttctgtggggcagcagaagctgcttttagctgaactagcaaaccctctgattgtcatcattccagtcaagatttcagcactgaagaataaccttgagagttgctgctgcaaggcaactcttatcatataaaatgtttactattccttttaagtatacagagtaccttttaacaaagacatttctgggaactttggtttgaattctttattgggtcaatgagataacaaggatgacattcattcagaaaagttagaagttgaagttaggaaaattagagaatttacctatgctttctgcagcagcaggcctctttaaaagatccaaattttgaaatatcattaggacagaatatttggtcgataaagtagtcaggccattaatattctttcacaattattcacttggtgattgtgttgctacaggtgacttgcttctttttagtgatagtgttaatgattgtcatcatgccttgcaaatattaattacatccttgcaggcatcatataaagagacattaagatttcagctcccatgctttaaagtcttgcaattaaatttagaaaacaagacagctagtattctgataagtacctataaaaattcctaattgttgatgcaaaagaaatgacatataaaattaatacagaggtaggtatgagaagccatgaggtagacaagaggtattctttgaaggaagcctgtagtctagagaagtggctgcagggaattcaaagtgatggccttgacttaaattacaaatgttgctgttctgttcagggatcaaggatcagatgcttatggttgaatgaatgattgccctagggaagggagtgttaaagattagcagggaaaactaaatgggcatatcaaaagccatcagaagatatcaaatgtcaggataagtaggaaaactcattaacacattaaatgttttgccctttaaaactacttttcttgatggagtatattttaaacaattaagtgaaacctgttttaattaaagattcttctgatgtgattaagctgtcattttacagtggcatgatgaattgtaacacttggacttcaaaattctccaagtgcattttggcaaaagctattccatgaagtcataatctgtcgtcaagaaccaaagcattgaatgaatactggtcaatgcaaatttgtttctgtttttcagtgctgtcaggatggggatgatttgaagggcaactcttagggttcttaaaaggatataggtattccaaggtgattcagttcaggaaggtggcattttctaaacaatcacaggactaaccctggatcacatattttcaagatggaattagattttctagtccagtagaaagtagaatgatagaccatgagacttggaagggttagggggtgaaagttggagtggatgatgagaaattacataatgggtatgatgtatgttattcagatgataggtaccatcaaagccctcacttgaccattacacatgtaacaaaattccacttgtatcccataaatttatatgaatttttcaaaaagagattttccagtccagtaaggtccctacagtaagccactgaagaaagtggcattatcaccattttataatgaggaaaaataagattttgagacattaagccaatttactgaagttaccccactaataatttaacactttagcccagtctattagactgaaaagtccactgtacaacaccctccctcagattcaatctgcaggattggtctagaaaagatttatctaattcacattttccttcttccaggtaatgtggaagtttttgagattcagtgattttcctggaatgctatgcaatgacaaatgtcaggaagagtaattaagaattgatttccctgtaggattcagaatatcatatgtcattatctttgaatatgcatgtgatttttgcaatgctatcccattccctgtgtgccaatataactttttcttccaaaatcttttatgcaaaaatatgcaagttaatagcattacctagtagcaatcctcaaaactttactggcacataaattaaatataagcactctccaaaggtgcttagatggtgcaaaagaagtacaagatgataatttgactttgctgacttcagatcttgttaggaggctctcattggggtataacactgcacataatcaactgctaaaaggcttgagccattgtgtatgccaaggataagcgtatatgtattgcatcacatagagaacaaatgtaccacaaaagcagagggtctttattggagaatgttattctgagatttttattttaggagggtaatcctattaattatctaatttccatttttctcttggcttctaaagtagatgtatcaattttagatacaatgtactgactttttatgttgtcatgagtagagcatgtaccactaaaactgatgtgcggagataatatgcaccacatggtttcttactgtctatatgtctggctttaatcacagattcttcatgaaatgttgcaagcctggggtgagctagctgttagattcttctggggtacagcctgggctgtggattattggtgaaactgcattacgaggctactggggttaattatgtctgaaagttttcagtacaatccacatcagttgacactctgtgcatactacataaacagtctggagggagacctttattagcagagcaagaaagcagctagctgtctgtgttctataatgtcctttgttttttagagcttctgactcatgtagcccttctgttttatttaatgtattcttaatcaaatatgtgcttattaagccaaataatgaagagtcaagaggttcaaatcttgaacataaattccctatgtctaagaacaattcttaatttaagattatgtgccccaggacagcagcccactgaatctgggggaaagcatgccaatgtttacccagaatttcaacatacattgtggcactggaagccatcctaacctgcagaagtgctatgaagaaattagccaatgaacatacgttaaagatcttctcccttgtgtatgtcgtatcttatctgttggaacttctgccatgtagaatcttcctaattgtcaattaaccataatgttcttatgtataatattctttctgttcctaaacaaaagtagggtggaagaacattagtctaagctaatccagaaatgcccttgcccccctcaagactcctgactttaaagtcactcagcctcttgggtacacgatttctactttacctggcacgaactctgcatcatcttataatgtggtgggtttggtaagttctggaggagacagaggggaatgcattattccaacaggtcttcctaagaaccttcatggcagaaaagactaggaagcttgagggtcctgatggccttttaagtgaaaaagcacttatttggctatacttagctataaggagaaatctgtattcaccaagatgttgaaaagcaggagaattttgcccccaattggcatctttgtctctaaactacctaagcacctcacaaagagaggcaaaatagcataatggttaagagcaaggacactggatcagatgctgagtttgaatcctggcttcaccacttaagaggtatgtgaccgtagacaagttattgagcctcatgtgcctattacctctcagtaaaatgtaaaacagggatactaattgtacctcactcaaggctatcatgatggttaaattacttgatatttgtcacttggtaagtgttaaacagtttcaactgtgaattctcaattccatccatttctctgatagaaagttcattattagtcatttatgtatagatcaacttttatatctataaactaataagaaaaaaacctgacaaaactacaagataacttcttgctcttagcccaacactgggaagctgtgactttgtgcaaaaacatgatctttcagggtttaagattcctcctctgtaaaagaaaggttgaagtagatcactggtatggcccctttctggtctaacattaagtttttccaactttagggttttgttgttgctaaacaaaaataactcatcatgtttcgaaattacattagaatgttgtttttttttatgaaaatcttaggaaattggaggtagtgtcggtgatctaaatggcatctcttacctacacatacatattttttttgtaataatctttttttcaaacagttttggcagttgaagcagaaagaagtgaaacattagatttttgaaagccaagtgtactgggggaaagggatgtaaggtcacctggttagtttgaagtgtgtaattcttttctctctcacctcattctggcttcttcagaatggcagttgggtaatactgcatcagtttgataaggctgccttgcccttcctaacaactaaaaccatcctagacaccttttcatggacactccctccattaaagcaccagaactttagaactgcttttaaaaatagcagataaattaatgatgttcttgagtaacacttttcactagaagagtctgactgagaaacaaagttgataatgctgtacaatattcttatattgaataaaggcgtggagtctttctgccttgagaaacatagtcagaaaatagccctgggacaccgatattagaaaaggaacagacacaaactccattgcatttggctgccagtaaagagctcattttgtttacattattactctccaaagaagacaagatgaaattgtcattatccaaatgttgtctagtgttttccaactaagttcctgagctaaagtaagagattgccaaaaaccatgtttacaacactgaatgcattgtgtaataaagtgttaggtagatcagctaataaaattacttattttagacttagataagttgaatttaggtttaattcactacccaatggggacaaagtgagttggttttctgataaactgaaacatacccaactttttgttgataacagagtgtaagagcctttagatattacccacgggaaccactccctttcagtgggaaaagcctgccattctcaactgaattgctaatggtcatctatttaattgattttgattctcaaatttgttaaaatgcagttggcaaagaatattttttattgcccctgttggctgacctatggactatgagctggaatagagttggtgaaagtttaggaatggagctggaattaaatgcttagattcccatcatttatttcctaagggaaattgtaacaatttcacctcgctctttttcctgacactaagaattgtatgaccaacactctcttgttaaagtattagtggatcaagtcttttgggaaaagctgcaatgtactttgaacatttgacccacagtaccacttaggataatttatctgaatttattttatttataagatgcagaataggaaactgaatcatgacgctttaaatataaatacactctgttctcagcatattcctgcagagtcatatgaaagaggtcctctcttccacgctgcattgtattttacttttatcattttagttttgtttaagtattgcggaaaaatatggaccattatattctccctgtttttattttaccttctgtgcactaacaattagtcttcctttgttttgcactatgagtctgaaacgtttgttagttctctgctttcttagtaaatggtaccatttaaaatagattgtaaatatatattgcatagatatttaaatatatattataaatacatagaaatatatatgcatactcagagtcctctataagctctctgttctacttgagacttttcatatcagatccttatactgttttctctttgtgtttgatctgttcttttatcatgtctacaacaaagatgtttaacctatgtacaaagggaatataatttgactttatataccgccttttgaagatcatttttaatactagtttgaagccacgtacatcagagtggtttggtaagatgagattttacacgtcttgaaaagtccaggagagaatggttatacttggtgaatcaaattgtcttctttcctaccccatttttccaactctaaatacaagtgaaatgaatgttcttgtaaattgtactttctttttatggcttttagaccatagttctatacactatgtgcacacataatttagagactaggtacatgcgaagagaataaagtcactgccttttaaagctctgtgtttacatcaacactgtctagctagatagcctgatgaatgaaaaagggaactggtattataatggtagttaattaagacagctaataaaaccaagatctgatcgaagctgcatctgggagtgaggttttaagaagcaggcaggactgtgcactaattgttggattgttattatattacatgtgtcttggagaggagatagtgtgactcagggtaggcagcagctgaatcagtagcactgggttttatccatcacaaatttagtattaaaacttcagctgtgttataactttcctaatggagcaaattccaacacatgacttgctgcaacagccaaacacacctaccactgcttttagagattttaaccctggtatgaggacaggttctatttggatactttctgagcaggatagaaagtttacttacatctgcgcggtgatgcttatggttctgctgtaacaatgaacaaaattagtgtctctgaagattttcagatgcaattagatgtaagagtaagttgattatttgacctaaaaaagcccacataactgtcctttagtatgagatagttgtagagacagggaagatataacagagtattaactataatatactactgattatattattttaatgatttaataagcacttttaattaaaaatatgccttcctcttagtccatgtgagaaatgccattaattataatattaaggcaacatatatgctagacaaaagcattttagtaagaacacatgagtgttcaacatgccatccactctctactttctatttaagagttttacttacaaaggtgttactagagatgcaacttaaggatctagtatattctttgttaaggagtctgtttgtattctcttaagaaaagggaacattttaatattcaaaggcaaggtagatccatcatattttaattcacctaaactaagaactccagagagagttatagcttattattcactatcttactctatctttatattattacttggttgtattgctaccaatatgaaagaaaaaaatagaggaaaaaatcctcaaattacttatgacataataggtgcactttttgcaaatttattttatttcagaaatggaagtatgttagctggctggataaaccggaactactctttcaagtctggctgtattctagcagagaaaagaagagcccccgccccccagcttttttcatattaaattattgagttttctcttcccattgatggcttagtagatagttcacttaatcttaaagcaaatagggagagatggtggaacttctaccactttccttacttaccagctatttttgctgaggaaaaagtttctagatacattctaattttgttaagagaatcttttaaattagaaggtacctgagctctcataatatttgaaatgtaccctcaggatttactttttaaaatttattatttctacataattaccaaggggcttgacgcaatttaaaaatacaaacacaaaacaaaactaatgaagtgagaaaatgagaataaaagctaaataatgagggtttagttacaacagttttattggaaactgtactggagattgctataaatcataacatttagctccaagcttattgaaatgtaaagaaaaaagaaaacgcagaacaaaccatatagttctcaacaaaaaaacaaagcacagcaagcaaagcatgaaaactaacaacaacaataacaaacaggtcatttagacgataaacaaatatatcctggcactggattcttacatggatattgaagagggactatggactatgcattgggaatctaatattaactaagaagaaagtgttcacaagacactgttctaggaaatttacctgcataatctcattcataatcatcataagatcgctatgaaatcagttgcgtctctgtaataaaaatgagaacacagagactatttggtttcattgcacctacagatggcattgtgtcatactaagaaatcttttttaaattacaaaacattttctctaagaacgtatctcaacaattcttgtgagaagcctagcatataatattaggaagactgaaagtttttatttttaatagtgtcaaaaacaacttctgttagcatttattgaggacatattataattaactcgttcaaatctcagaaaaatccttctgttaggtacaaataatattttattgatgaggaaaaagagtcacagagggaatcctgggagcactttcaaataccgtaatgagagcttctcaggtatcttctaaattgaaaggttctcttggtagaatcaaatgtacctggaaaatgttttctcagcataagaagcctgggtaaacataattatagaacttagacatttccccaggagaatgtccaaatcatgtactcctgccaatctaaactagcacaggggtgggttttaagatactttcatagatgtttttgagctttagactgttgatctcaaaaattagctgtctcaatcagagttatgtcagcagctgagtaggagtcaggtggagttcccgaaatgcacagtggatattttgttcctaaaatgtaagagctaggcttgtaccctggccctggtaagggtcatgctacctctgtattggtgtccccttttagaggtatgaagggccaggcatgagttccctctgtggcagcttttgcattgtgtacaagcaactctttgactaaaccattgaaatctactgtcagagcacaagatttcagtcaaagaattgcatcgaaagtccctcaaatcctcaccctgctaacggtgtaagtggcatggcgttatctttatcagtcccaatgttgtgcccagtgctgaatgatggtcacccatgcagtgcatccccaaatgtgctcctctttcatggactatgcttctaattaatttttggccctacttagtctgagatggaatcactgataatggcataactgattgattctataaatatttattagtttcttttactactgagttagtagtattaaaattagtagtagtagtattagtagtattagaatttcacacttggaaaatccagaccttaaacgtaaaaatcaagatataaatcagtaaatatttaactctagatgtgtgtgcacgtgtgtgtgtaatttaaaaaaggaatgtaactgttgtttatcttttggcaaaaattattacactgaatcataaactattgactccatctctccaaatttatcctgcaagaatggaaattcatagggttcaaactaataatggtagtaaaatattaatagaaatgttagtatagaaagtagtcacaggtaatctggaagtcttcttccttacagataagattccaacgatgggactgacttggaaagcattgatttctggttttcagaggaaaagtttacagagtagcatgtttctttgtttaattaaacggtatttttgatctaacatttaactttagttttacttatagttctcaaatcgtcagagatatttctatttttaaatctttggaaaaccactgaactgttaaaaaaagattctatcaaatgggataaatcagagaaggtgacatctgttattgatataggacatctcaatataatctctaattatcaaaaatatgagaatgaactgctgactcattttgccaattatgtgtctatctatcttattatctgtttattgttgggtgagaaatcaaaccacttatttatataagaaaattgacacatactgtcatgtgtttaaagcatgtcttttgtatctgattagtgtattttgaatgagataaataagaaattctgccatagattagcatcttcttcctaaagaaaaaggataagagaataagagtatttttagacacaataaaattcaaattttaatgcgggctaaacttaattagctcacttttcttcatttaacaatgccagagtaagcagtcttacccaagaaggttaattttaattaatagatatttacctactttaagtacttttaaaattcttagccatgtgaaatataataattatcagcgggcattatttactaagctaccaaatgatacaaataaaaacaagttttctgaacttggaaactttcaacctggaagttaccaaaatcacattcttttaaagaaataaccaaagtgctatctaatacatggaacaaaaccaagaatgagccatagtaatttaataatctctttgctaaacctagatactgattttttttttcatgaaatgaatgatggatagaataaaacatttttatttaaaaaaattttatacatcattttaaattggatacatttctttaaaataatacacagcaataatatataaaacttaagaacatatatgtatattatatatatacacacacctatgtgttgtatgtatgtatatgttatgcatacatatgtttatacatgtaaacattacttttttattgctaatagtattgcatgcccattgttagaaatatgtagataaagaggtattaaaatagctactcataattctactacctagaagtacctgttgttctattttggtgaatttctttttatttttttccctgtatctatgattatataattacacattaaatggataatctgaggagacatcatactgtatacagtacattttatcctgggtttaggcttttctcatggatactttttcatatcattaaaatattcatatgtattagtttaagattcttatattctgacttctagttatatcttagtttacttaaccatttatgtatataatagataatatacatttattatatatatttagaagagatacatatcaatagttaaaatattcacaataatcctgtttgatattcttattatctcagtttttgacgtggacaatttcaactctagatgtgtatgtgtgtgtgcgtgtgtgtgtgtgtttgtttaattttaaaaaaggaatgaacctgttgttcatcttttgtcataaattattacactgagccatacactattgagtatacttttccaaatatattctagaaaaatagacactcacatgattcaatacagtacatccaaataacaaactactaaacaaatgagacttagacttttcataactttagatggcaaaactaggatttgaacccaggtctgtaggaatccaaagactatgaccttaactactcaactttattactttcaaatacttgtctagaagccaactgtttaggtctaagagtattcaaaatttttaagttattgatagatattcccaaagagtttttttagttttctatgaatatatttagccttagcaaaagtagaatatcaagctattttcaaaatgaagtatgagtcaaactgatatgtcatgtacactttggccatatctaacttagtgatttcaaaataagagactaaagcctagcagagcaaataaaatggcatatatagagatatatacacacacacatatatatatattctgatatatatatatattctgatatatatatatatatatatatatatatatatatatatatatatataaagaaaatgctttcccattttcttaggcaagaattatcattgttaaaagtattaagaccacaaagaccttaatttgtaaagtggtggtaaaaaaaagatagctaaattgctttccatatgaatttaataattatctggctgctggggtaagcagcaagacagatgagatggctgaagaaataggaggtgaaacaaaacagaatgaggcaaaagattatagagacaagtgcctatgagaaatttgctcaaagtagaaagtgggagaggggcagagaatgtaaccaaagtatcctagaaaataaacacaactttaatttaatcttaaattatttaagctggacagatctatagtctctttttagctgcaaatgttaagcaaagtctgctgtgttcataaatttcttgaacgagttttggaaggaaacattaaagaagagaaaccctggttcaccatgcaactagtgcagagcataaggaagaagagtcatagaaaatgaaatcagaattgtagtggacacataagattgagcatttagggtaagccagaatttagaatcagaggtgatgaggggaaacataagtcaccacttcccagaattctccccatgtagagctgccagataaaaattaaatatggatttctattaaatggcttccaattaaatatggacttcagataaataacagattctttttataaatatgtccaaaatattgcatgtaatataaatacacgtaaaataaaaagccattcgttatatatcttaaattcaaatttaattgggaattctgtatttttatttgctaagtctaggaacctgctcctaagaacctctagagataatgggaaggctggaagttccaccttatctgggatgggagtgatagaaacttgcactgaactttctttacaactcagaaggtctggtgaacacaaatatgcacaattagtgtcaaaatgattataaaatccagatcccatgttaagtgccctttcttctgtccctagttctgttttcagaactaggtgagactactccattagtaagttgtgttactatggcaaggaagtatggcaagactatcccattagtaagttttattagtgttaactttgtttaatacttatggaatatttcatcctactattgccagtggtttcacaaaagcaaattatatttttaataactcactgttaacccacctttatatgcacaacttttcagaacatatgagacatttcttttaaaaaaaagttgcaagtctacttgtgccttattaactacttcattcatggtatagagagatggcaggtagaatcctcaggagcttctgttaaccatccacatattgtcaaacatttttgcccagacacattctatttacattttatagcaaatcgtggcagtcttaggaaaagacatattccagagggattgtgtgtaagactcctatactgaccttctaaattaaataaaaatatagcatgttcccaacataaagaaaatcatattatagacactaaaaacagttgttctatataagacaaatggtaaaaaagaaaataatagtttttctataggaacaataaaaaccttgagacagagccattgggtcccctccaccagcacaatggaatcctactataagggcatgagatgagtttaattagcaagtattgattgagcacttattttgtgctatagctagaccttttgctctgtgctaaaattgcaaagtaggtcagtccatgctgtcctgtatgatttattcatgtggcaatcaatatttgggcaaagtataaaaggtgccccccaaaaaagagtgattcttagcaagagaagaaagatttgccagggacgaagcatcacaaagaacagccctcagagtttttgaaggatggatatagttttgctaaacaaaaagaagttctattcatactgccctaagatgtgtgaaaaatggcaagtacatcaatattgcttgagtaaaatatgaggtgggcagagccagactaggcaaaagttaccatattataaagggttgctcgcatttcttcatgatggtgacataaaaaccaaagtgttttaggcaggagagtgtgacttgatcccatatgtaactcagagtgatcacttttgacagtgacgtgaaggagagagtcgagtgaggcaggagtcatcccaggaagcatagggaggacgcagttatactagtctgaaagggagatattatgactcatgcttaacttcatgagggatagattcatccattcattcaattatctatttttttctacaaatatttattgagtatttactatgttcttggccttcctctaggtactgattatatgaaagcaaaccaacaaagacatccccaccctcatggtggttatgctgtagagaacagaaataaatttttcaaaagcatattaattcattttttgaaatttataatttataattttattttttaagaaacaaaataagatgctgtgctagaactgcattattcaattcagtagtcactagccaagcatagctattttaatttaaattagttgacacagtaaaagaaaactaaataaaattattctgtttctcaatattattagtcatattttaaatgctcaacactcacatattggatagcataagttatcaaacatttctattattgcaaaaagttcaagatggagctactttgagaccgattatttgtatcagattatttacttatgaggcgatgtactgagacctgaatgacaaagtgtagagtaagctatacaaaaatcaaggaaataaagctcaggcagagtgcatgagttctgaagaatgaaatcaatgtgtgaaaaagaaagaaggccaagtgggctggagaatgttgtgtgaagtagagagtagtgggagaagtttggaaagtagatcctggtcatgtaggccatgctagaaaatctgacatttattctaactaagtagtgatgttatctccaaaattaattgacatgttaatttgggaagctagtgaatggattgatgtaagtgaaaaacatgatataattttatatttgttttttttaattcactttattttggggactgggaaaaatgaaggaaatatacaaatgagaaaaaaatgatggttttggatagcactgacagtggagctgtagagaagtgaaagagtcaagacattttggaggcagaacaagtaagtgttcatgtttgactgtaaatgggggtgggaggtacatagataagaggaaaagagtaagtggtgttgttttgtgctgagattaaggctgtgggacaaggaacagcttcaggaggacaaatcagttaattttggagataagatcactattagaatttcaagggcagccgttaagtgattagaggtttatgaggttagagaataggtcaaggctggagatgtatgtttgggcatcatcaacatatgtattgaatttaaagtcatgaaacagaagtgcctgtggaggcagcatagaacacttaggcctgagtccaacgtcaacccaatattttcatactgagtagagcaagagaagaaaacagaaaaatgacttagaagtactaaagggatgggagaaaaatcaagagagtgatatctcagaagatggatgagaaaactttccaagtatagaaggtcagctatgttgaatgccatgcaaggaggggtaagatgagaaaagacagttgaaattgagcagcattgttggtgcctgatgaaaggcaagtagaagttcgatttttttttttttttttgagctgagaaagggaatgaacagtgaaacaatggggaaaaactttctatttctgagaagggaagcaaagaaaaaaaaggagagaaattttgaggaaagcttgaggtcaaaataaggttgtttttgtgaagagatccccaagcatgttgcagagaatgatcctgtacattgtcagatattgatgatggtaatggtcattcactttggttaagatgaatggaagttcaataataatggaaaattgtaatgcattaatagtcttgtaaacagaaaatataaaacctagctgaagtattatattcttggttaaattctatttgttcagttttattttactgatttttttcctcaaggtatcttcaaatcaagtcttcccattttctcattctatattcattattttccagcagtatattgtttgttttggaatttgaagactatttttaaggtcaagatattttgcagactcccacatggggtcattatacctacattatgatgaaaagctagtgtggatgctttaaaataaattttattattttgtcactaaaaatatccaaatatatttgaaaatagtgtatatacataatatatgctgatttaagttacagacaatctctaatgtgactctcgattgtaataactaaagttttttaggcacccaaggccacagatgggtggtccctatcaacatgaaaagaagggagctaacaagtaattgtatatactgcttattgccttgaatcagggaaactacaaggaatatacaagtgctattatccaaattcgaaaagttattttttcaaatgaaatcctttgaaagttccaaaacttcctttcttttactgacccctagaaaccactgacccagtacatactataaaatcataacaatgctgaaacttagttattattagcaaatgttccacagaaaatcatcatgaaggaaaacttgtactctctcaatcctgagtattggaaatgcaaaatatttgaccctggaagcagaagtgggtcagagagttggtttaacacacacacacacacacacacacacacacacacacagagaaaacaaaacagtaaaaccctaattttggtaaaggaaaaaaaaaaggttaacttttgccccaactataactcatctcaaatctgatatttttactgtttgtttgaaattttgtaataaaaaaattcatttaatctttttaacaactttcaaatgacacatcttgtggtttttatagtaccctagtaacaaatacaattgcttaaaatgctattttcctaacagtttgtctttattcagacatggtattatcatctgcctgaatttatccccattcaagcatgaatccataaaattggactgtggcaatgggatgcattaaagtacttgggctggactagcagcttgcctcagacttggagctgacagcttttctgtgttttcagtctcacctgtctctctgttctctatggacgtctctttgcttgcactctgaccagatctctggccatccaacctggcttgttctgttggcccctatgtctggattcacatttgttcacctctagttctttaatcagagttgtgctttgatctgtctgcattcagcaagagcttttactttcctgggttgttaaaccatcattagcagtattttctcaacaccagtcattcacataccactactacaaatgttgccatatttgtcaggccctatcctattatttccttaattcttttcctgcaaattgactcactttgtatactaaaattaatgtatttttaaagacaaattattatatcactctaataaagggaaagccaatatctgttgccataaatagaaggtgatcacataattaaatataataaaaacaagataccatggttaaattgtggctatatgctatgttttggcaaaagaatctaagtctgaggcctcagatttcatttgttggaaagggagataagcaagttttccagaggtgttaaggacatattagtaataaactgagattttccttgacataaccagaagaactgaaaaacaggaagtgtttcattttatgatttaatgttatttcatactacttgtatgtgccacctcagaagcatctcatataccctcaacatagcatgaaacatctagaatgttatgtgtcccacattttagaagacagaattttaatgtaaaattagctatcagagagtttgtgctaaacatgaataaaactggataatacaatcaggtaatgcatgatcttcagtcgtatttcctatggttgagctataatattagcaataggctttaaggatctttagacttaagggatccaagataagttatgattgtaatgattctttgttttcttgtcatttgataagactttaggattcatagcatagatttcagtggggaataagtacttgtacctaacttgtacataaagtggaaatttaaattcaaaaaaattttttaagtagagcttttaaatgaaaaattatttttgtaaacaaaatgcctgtcatgaactataaactctagacgagttatttttatttgttcatgtaagggcaacacacacccacccacctctatttgaatctgcacccatctctggaaatgcttctttcctgaagttcggaactttgatggaatggtgaggaaattattatataactaatgagatcctaccaaactatgtgatgcatttggggaagaggattaatgctttggagctagtagacaatgcaataaaatctagagactcactttactccgctagaattggcttactgttctagattctgtttactcatgtaaaacagagagactgacatccccaaatttggagacatcatggatttcctttagacggcaacattctccaacttaaattactgaaatatctcaaagcaagcaacttattttttttaatgtagatgaactttagtgtgggcaaggtaacgaacttcctaaatattttcattccctttatgtaagggtactctgtcttcctcctgcctgtggtttactagagtgcttaacctatacgtggcaatcagtaaacacagcactttgaaaaatgaattctggttagtttttttttttttcctaaaactttctataaatttcttaatccaaaatccttgttcccttgaactccaattgaagttatttttgatacaatttattcagaaacttatatgttataaaagaatttgtgacatctatatctaatatttattaactttcacaaattgttttgtcctttgacagaatgtgcctaacacaatgtacactgaatttcaatgactgaagtaaaagtaaggtctagatgctggagtgtgacttctacttctttgtatcctatagttaataatacataagggctacttcataagtgtgcattgatttgtttgtgatactcatgaagatcaaatttaagactaaaataatataattttataaaggagacagctaattaaggaatacgtggtagcatggactgagaataaaaatttactaacttccagatagttttaaattcacaaatgttattgctagagtgaggttatcaagatatgcatacactctttttaaagaatattatagaaaagacaatattgctttcccctctctaccttcaatcatcaccaaatggtatttctgcaaagcatacaagattagttggaatttagaaataaaataaccactatttgttgaatactttccataccttaaataatgtattacttacataaattctatgaagtagggttgttcaatatcaatcaaaagagtataaggcagacctggttcagctctgtctgattttaaattctatgatgaacccactgtcccatgatttctccccagtcactttggatcttattcagaaatgtttctgttcttacatttaggtcctatagcagtgctgagcaaccataacagttccctagaggttttaggtcttcagataatgggtgttaaatctcctccaagattattacattacagtaagttggtctattatgtggacattatagagctttcattgctctgcttcaaagaatagactaaaataacttacctacttgaaaacactcatcaggtttatgttttttttttaataacaaggcagtgaattatggaaatagctcagactatctattatctatctgaatatataaaataataaaccatatcatatttcttcttcattgtattcagtaaaccagatacatgacctaatgaagtataacggagtggtgtagtttttttacattcttgctcctaagtattccctacaagtgaaattttaccaatttttatccaatgcagcattccttatgtataccacattttcaaaaagacatgttcaatgaatctgcataatatctgtaggaaagaagcaagcataatgttttccattgtaaaacattatgctataatagttattagattaacaagcatttactgccatttatttcacctagaactcatatgcaaacttttacgctagaactgagaaatcagatagactctagaaatgctaaaaaataagaacaaaggaagacttgattagaatatatttttctcatattaaatggaaagtatatttcaagtcatcatgtaaaccaatccttaacttgggggtggttctcatgttaatttctaaggtttatacatggacatggtttttctttctttctttcttttgttttgtctctccccttccaccttggattgattctttctttgactgtcaattcttttttcttttttttttttcttttgggcaaaggacaacacatacattcctaattctcttttcttctcaacatttctgagtttaccaaaggcggtagattttaaattcctagaaaaaaaggttagctgtgtatcaagaaagttattccaccagagtctaaattctcaaaagcattttctttcagaatttcatgttaagtaacactctgctgtcctaaagtgaaaaccaacaactatcaatcatttaagtcagtattgtcagaataatgaaaattaaaattatactgataaaagacaatacctgtagccatcacaacaaagaaacatttatctgtgtcctattattaaacacttcttttcatgctgcatataatgtcattgaactttcaaaattttattatatctcataatatttttctattaggttggtgctgtatcttttttaaaaagctaaagaaagtacaccaagaagctaaaatgttggcactttatggatacaagggtagatttcaaaggcttataaccctcactaaagtgtataacttttgggcaattcttgaagggacagggaaaggagtgttattcctattctttgggctactttcagttcattcacctcccaaattctgtgttgatgccaactcctgcttttcccctccactgctatttcagtctcatctgctcccgtcatttttatacactcctttcttctttaactccatttctccttaactgtccaaagtggtagatgtgtccgaaatggaaaatttcatggccactttggcttagtagtggcaagtggtcactgggacaaagatgaggctactttctaaagttcttcactcccagcctctcataaatcttgattatcttgatttcttaccgttttcctgtcctattaactaaccaaatagtggagaaagaaagttcaactcaagagaaatgagcaaagttctaccttaatttaaagtaatgtataagaatgatgcaagagatggacattgataggaacatgaaaagaatgggggcatatagcctgaagtgccagtcctttgtctgagataataaggactctgaaagaagggaagaatttaaccaaaagtgggaaggtgaggagctgaacagcacagaacagaaagcatgatattaaagataggggtcaaatggccagaggaaaccttgaagataagcagacatcattcaaagaattgcaaagtggaaaaagaagtggaaatttctcagtatgggcctcataggttactgtttcacaaatagagtgttgatagaaggttatcattgcattttagataatttgcaaatacgcaaggaaaattgtcttgctataccagaacaaagcccacttatataaagaaagctcttatccccaacagaacgccttatgctaaaagtttttttaatttgtggggtttttctcttgtcctcaactctaaatgtctttaatatactgtgagaacaattatcataatttctacattcaaaagttaaaagccaattaaattataatatgtgtaacattttttgagtagtgggttagtttatacttactggtactactgaactctaaaataatttaactattctggtcatatttgtacaacatttagaacctgagatgtaaagacttcaaataaaaataattaaataaagcttaaaatgttctttgtgtttggattttagtctctatttaaagacagattagatattttggaaattttcataaaataccctctttaaatcatattcattgtgtgctttgatcgcttttagaaaaaatagtaaaaggaaagaagctgtttaaaattaaatatagttggtcttaaatgaacaggaaatcagattcatggatttggctttacatgaccatttacccacattctaactgatgttcctaacatgccttaaattcattactaagtagctagttagacaatctcaatctagatacagtttgcttttctacattaattctctgttatcttcttacattcctcgctcaataacaataacatgtctcattcttttgactttgatacttaaaacagaacaaattaatcacaaacagctaatgaaaattaatagagtactttaactcagctgttggggaaattctgataaagttatagagaaacttaaattgtaattcaaatctggggagatacatttgttagaatttagccttttcataataaatgtttctttgaacttgtgttgtgatgagggaagacaagggaaaagctttgctgatcttttaaacacatcaaagccttaggaagctaaacatgctggacggatgcttttgtcaacctgaatagtatctgtgccgcatctttcaatgtagatatggcatttatctcctctaaatggcagaagacctccggtcactgcagggactctaaaccaggaggtctacacagagcttcataatttcttttggtatccctcaaatttgattattgtcatattttctgaaaatcaattttgtactctgaaaaacaagtactaaatactggttgtagaaaatacagaagagtacaaagaaaataaaaataaccaataatgtcatcacacagaagcaatcattattttagattatcttccttctttcagatatgtaaaaactatatgtgttatttaagataatatattaaatggtagcttttatagaattgtgagcataaaatatcaaatttaaagcttacattattagcaattcctcaactcattaatgctatttttaacctttttctaacatgttatatgattgttggtggaaacataataattacatgttagaataataatttatttaatacatacatttatttggacatttagattgttttcactttgtcatcattacacataataattgtaatatgcatttttttttctgagacagagtctcgctgtgtcgcccaggctggagtgcagtggcacaattcaactcactgcaacctccacctcccgggttcaagtgattctcctgcgtcagcctcccatgtagctgggactacaggcgcatgccactacgcctggctaattttttgtatttttagtagagacgggttttcactgtgttagccaggatggtctcgatctcctgacctcgtgatccacctgtctcagcctcccaaagtgctgggattacaggcgtgagccaccacgctgggccctaatatgctttttaatgtccaaatctgtttttggcatctctgaccattttattttctaatagtgcttcacgcatagaaaaatgttgatttaaagtacttttaattcaacaaactgaaataaaggttttcagtagattatttttgtgttttagctaggcagttctatcatcaaaaggtaatgatggtatggtttcctctttttaatacttatctttctaatttttgtttaatgttacattgcattaacctggactagtgagttaatgttaaatactagttgtgtcagtcggtgtagtttactaagagtgaacttcatttgaattcctgggatatgcctcaattgatcataatgagatcttctataatagactgtggaattcaattaattaatgttttatctaggattcaatagtatctttctttttgtgttatcttaatatttcagtatcagagttatgctacttttttgcaaaataaattgggatcactaatataacataagcttacctattttagaaaaaaaatgtaataacattcacaggtgaaaccactagatgttaaagcctatttttgggattaaaatttgttataatagtagtggcagaaatagtggtactctatcttatttaagatagcctctttctcagtttgagtcagctgtcagggaatataggatctaagaaaatttgaggctcatctttggttattttcaggtttaccattctgccttgccacttccccaaattggttagtaagcgctctttgtcttccatgtcacttcctctatctagatttcaccttagatggaacgtaactaagatgaaaagttgctgacttctgaaatatgcaaaacaaggagattaataaaagtaactgtcattttaccatattcttttatcattcttctatatacttttaaggcatcatctcatttaattcttaccacagttctaaattctatttttatttcatattacagatgaaaaaactgggcttagcaagcttaaataatttgtggacccaggatttgaactccagctttccaaagtccaaatgtataagcattgctctatatggtctttctgtcacttagggtactcattagagaaatctttccatgagacagttcttctccacctctccccggaggaggagggtgtggggaaatgaagtgatatgattacaacaaaacaaagaagacaaacatagaatctgacaatcagtaattttgatcacagtaagtatttgaaactgattatctctgaatattatgaaatcaaaccacaaaaagacgagaataaaatatataaactagcacaaaattatgcatttaaataccatgaaagaaattttgaaaaacaccagtatttcttagactatttaaatcattttcagacaaaaattatatattttgagtaactctcattaaagagataaaatgaattagaaaaaaagaaagagaatcaaacttacaaagaacttaaaaattagcagttataaaaagcacagctctccaaaaacattaatgaaatactgatgaaaatttggttttaaaatatgatgaaaaacatgcaagttcattaatatacaatgataaagataaaacaattctaccttattcatctacaaatttgtgattcaaatggtacatattttatgttatcttatttcagttttcttcccttttactttctagttggtcaaacatttgaatccatagaattgtcctatttgttagacctctgttgaagttattactgttattaatatttaccaattatattctgatattttaaatattcaataatatgaatgtttatatgagttactaaaatgggtatgcctaggtaaagtagcatattctataacatttgtttacagattgtctttcattttcaatatgtactttcccaatctgtatagtcaataaagtggaaagcggtatattaaagctagacaggcaactctaatcatggcttgactcctgtatgaattggtacaaaggatgtgttttccataattagcttccatgtgctaaaaaataatttaacctaaataaatagaatgtaattggcctttcttaataacactcaggttgtaaatcaatgaatatgtttaacatgccaaacattatatttgtcacatagaattgggaacataaaatctgaatgattgttaccagtagaattcccaagagaacttttgtttagtacccttaatatgaaagtatgttttttgttttatactaagatacatactaagtagaacactagctataaatagaatggaaaatacagccactagagtttaacttgatacaaaaaggaaaatctgaagatctccagtctacttgggcatgcttgagggaagggaagggagagtaggtcatttcttctcaccattaagaaaagatgcatgaatgcctcttggtgagtgatcattgttatgagtgattattgttatgttatgagccacatattcctacctgtaagcctagtttgaaaaccaaatttcatttataactgatgattagaaaaagactattcagatttatatgttcctgtcttgctgttatttatcactctttcatgatgaagttaaattttgagtctggaagtacttggaaaagattaaattaaatcaaatacaatattatatctttttaaaatcctaacattagtaggggaaaatgttcaagtgagaatgattaagggagacaaagaaagggaaaagttcttctgtgatacagggatttatcttatgcttactcatgatttcctcccaacattcatgatcaatttccactgagcctttcctgggcttgtttatgcaagtatctttatttgtcagctgactaaacaatgtcaggcaccagctttcgctaggcattaccatatcaggtggtaactactctgcaatagtatcatttttttagagctagtgaaaagagcatttggctgatattgaaaaaaacatgagtttgaatttcagctggcttaaccaccagttgtgttaagctaggtaattcattcaaccattaggacatttattgtgtccaatccaaattactgacattctttaatatgacctctaaagacatttccattggtaagcttctaacgttgtgcacatgtgccctagaacttaaagtataataaaaaaaaaatttccctgtgggaagtaaccatattcccctatgtagttgggataagaaggtggcttacatttctttttttaagtgacctgggagagcctttatgttggttttggatttcaagatttctttgtagacaatgcctgagactattccagaaacaaacttagaatattctatgaaagaatgagaagaagcagtattttaaaatggattcttactctggagtacagagatgatatggcaaaacaggaacggatacaaggcctaaggttgtggacataaggatagggcactatatcctcattcaaaataaaaaaatggggcataacaaagtttcaagacaagtaactgatgcttgcctggaagtggaaaactgggaaggtaaatttgaagtaatatttaccattattataaggaaatgatgcccctcctagttgtagcagcaaaagagaatcaccttttgccccacgtgaccatttgtttctgaaaataaagagggtgtgggccagaagatttaatctactgaagaggatgaaagctacgctgaaggggtagagtagggaaccaaacttaaaacagagatacaagtctcaggttctgctttccctcccgctgcctcttcctacagccacgctcctcacagatcgaataaaaatgaagagatgctgagacaccaacacacattatttattactcaaactggcagcctcacattatctccttccattgcactaaagaggcagctgttgaaaatatggaacacagaggggaaggattccccttcatctgttgattagctggagttaacattttgaaaatcaatgaaatgcaacacaatccagtggttaaggtttgatgtcatacatgagtttggaccttgactttaacctcttttagtttcagcttccttatgtatataatggagaatataatggggccatcaaaataatggccgatgtttgcttagcatagggtcaaggacatagtgatgctccataaatgggatgactattaatcttctataaattttgttatactttaacatagttgtttattctcttcttctctggaattaactcatgacaaaatgccactgctgggttggcttccttgcttaggtctatattctcagtactcagaacagtgctttgaacatacaggtttttgttgctaaactttgactattctactgtctgggaagaaatctcactatgcaagagttaagtgcatctagctatatatactcagtgttccaccaacacagcttacttctgtaataaaatacacaaaagtagtgagtattttctctctagactgattttaatatgtatgtttacataattatagaattgtaaaatcttaactttgattcaagaagttgtaatttttttggggggggtcaggacttctttttaattaaaatttactaaaatataataaaagataagaggaacacaatgtaagtcctaatgcatatactgtcctattaagcctagatatagaaactttctagagattgctagtgatcaagaactatgtagttttgccacatgagccctttcaatctggtggatttaattccttcttcatattcttccccgtctccttctcattctcttgcccttttctctcctcctcctccttcccctccttctgtttctttttcttcctctgcatcttctgctaactagaaacttctttcatatcctgtgccaaatatgtttccttccttacttaaagtaattatataccaaagaaaatcacttaaactcatgctactcaaagtgtggtcctaggaccagcagcactgaaatcacctgggagtttgtaatgcagaagctaaggcgtcaccccaggtgatgtgtatagcttgagaagcgctattttaaccaaacttgttaactactctagggaagatatggttttatccactagagggcagtaggacatatgtaccactggcattgcatttatttcccaattaaaagctcttttaagaaccactctcagttgccaaatggatagtatgcttggttcctttaaaggaaaaaacaacaaagtcaaaccaggttacatagagaaattcaacatgtgagattaatgaaataagcagttccatggcactagcatagtataaaatcaggtgccaaatcctaaattgtgattttggctcttgttcatagatcatagaattataaagctggaaaagtctttgatactcactggggcaaccaacttattttacagatgaggaaggaaactcctagacattaactggctgtttcaaattcatacagcttccaacttgccaatccaaagctggaacttctaccaacaaaatccctacccaaagattaagagagagagagagactttaacacgatgctaaacacctctttgtattatttaaatggaaaactggggttcatacttgtgctttacacatctattgggtttaatagtattcgttgtttctgaagaggtggggagatagggaggaattggtaggttttttttttcccttcaagttatttatattctgctgcactgccatcagaacacagcttgcatgtctccatctcaagcccaaaagtgtccacattaaatatcaaccaatcactaagtattgagtaaccacaatattcatggcactgttagacattctttttagcatgatgctagcatgatttctgctctcgatgatctttggttatgtgttattaacagccggctggtaactgcttttaattttcaatcccacatgtattttgcatgcaaaatgggatcaacaacattgtgtcagactcagagacacaaaaggtgatgaaaactgagctgatggattctcattcttctaaggaattggcaaggctttacagaggaaagaaccctaattgcacatacaacaccctcagtacaacttgctcacatgtctttaaaatgaccttttaaagaatgttttaaatgtcaatgcttttttagaaaacattgaatcaaacatgaaaattgcttgagaaaaattttgcaatctccaattaaaggcacagtcacatttccagtttccttttcctctttctcttattatcaatggaattatttaataaagcctaaaatcacatgaagtttatggatgtaagaatttggatactgatagatgtttacaaacagtttctaagaaagagactgaattgttaagcaaagctccaaagtgaaaaatgtaataagcaaagtcttggtggagtggccccagaaaaaaggagctcctaaaataagtgcacaaaaattttaagcactatctagtctggcttaatttgtatctggacaaaaggaagaggcttgtcagaaatttaaatttagctcccaaagaaatttttcagaactatgtcttcaaaccacagaaaagcacttctcatttgtctctctctccttttaccattagctttagtatataaatgaagtcataaccatcataattttaccaggaatcattacttatgatgtcttttccccatgatctcaccattaattattaagaatatgaatgcaaattactgtttgtgagacaaagtctgaagaaaacgtccatttttttaattttaagcaaacagccaataatctcacaaaaaatgacgtctgatcaatgaagttgataattcttagtttatattttgaacagtttaaattgtaattttgacatttttctaagagacagatgaggctttatattgcttacataagctatgtatgctctctatcctaacaaatagtgcaatagccatgaaagaaaacactagcatttaatatgctttaccttcagcattcattacatacacagttattttaggaaagtaatgttaccatttggacttactctacctatttcatctgagaatatcctctgttttcccctcattataataaaagaatagctctcaattattgccagtaatattagtgacacactcatgtttatatctcaaatatgcttttaattttctgaaacagaggcaaattgctggtgatatcttaatgttttaaggtagttaatgccaaaaggcttggatctgatcttaaactgaatatttcccagatgtttggtagggtgaaaggtggaactgctaacagaaaccaacttcctatccctgttatacttacttaggtgaattttaagtaaggattaattagacattgagaccttataagcagtcaacttcacagctcccagagataaaagctgggggcttgctcagttgtaacataagccatatgttgagaaagcgaagtctcaactgccactgtctccttgcaccttgtttataatgctcctttaactttcttttgaaaatgcaatacttttgaaaatgttgaaaaactactaaaggattagacaacttactgtttttgagtaagtattgggtaaatactaaagttgcagaaatacatccaaaatatttaactcacaagaatgagctcataaatataaaaggacagcttatgaatgaaaagaggaaactgctattaatgtggcttatcctagaccagctttgtactggcagataccctgaggacactaaggctctgaaaactctgtgtctccatgggaagccaggctgcctattataggaagaggaatttagcgcaaattcacagttgtttgcccagattcagtagggactaaagatgaactggaacaaggtcttgccaattacccgtgcttaagggttgggagctttagcttgacaagattttgccacctaaaacagctgttttgtgttggagaccagatggtaattttgccaaaaccacttaaaaggtccaagccatcaatttcaaagcaaatgtttcttatattgggtacatgctcatttttgtgattttttttcatttaaattttcatgtgaatatgcgttctagtttaggttggaggtgttgatgaaatagcagatagtgatgccaagttaagaaactatcaccaatctatgccagccaatgagaaagatctacttctacaaatatagaaaagactaggccaggcacggtggctcacacctgtaatcccagcactttggggtgccgaggcgggaggatcaagaggtcagaagtttgagaccagcctgacaaacatggtgaaaccccgcgtctactaaaaatacaaaaattagccaggtgtggtggcatgcacctgtaatcccagctactcaggaggctgaggcagaagaatcacttgaactcgggaggcagaggttgcagtgatctgagattgcactagcgcactccagccaggccagcctgggagacagagtgagactccacttcaaaacaaaacaaaagactgtacttggtaaaaccaaaaggaatcaatgaaatgcacctatttactaacagtaagagcacaatctatattattaattcttcaaatacgtcaactagttattctgggttggaatccacttgaaataatttttcttataaggttttcctcttcttaggctatttatttattcagagacagagtctcactctgtcacctaggctggattgtaatggcgcaatcgtggctcactgcagcttcaaactcctgggctcaaacatcctcccaactcagcttcctcagtagctgcaactacaggtgtgcgctgccatacccagataattttgtatcctctccacttatcagtgagaatacatatttgtctttttgtgtctgacttgtttcacttaaaataacagcttcctgttccatccacgttgctgcaaaagacactcagatggagggcagtaatgcaatcacagctcactgcagcctctacctccttggctcaagtgattttcctacctcagccttctgagcatctgggaccacaggcatgcatcaccatgcccagctaatttttctgtgtgtgttttgtagtgacgcggtctcactatggtgcccaggctgctctcaaattcctaggctcaagcaatcctcctgcattggcttcccaaagtgctgggattacaagagtgagccaccatgcccgaccattagactttttaaaagtattttatgaatatacatgagattgtcagtatgggttaagatctcatagataagataattgtaagggttaagggaaatgtacagaatctgataaataagtatcttgtaaagaaaacaactggttatatgtttttatgtctgtaataaatttgccagcaaatttgctacctaaagaatttgtgtcaccattttgcttcagtttcaaaggcaaaaatatctctgactttccaatgcggttacgttgtttagtagttagccagcaagggcaactgaacaaaagaaaactgttggttctaatgagcagtactctcctcactcaacatctatgccaggatttttggaggggttacataaaggtgaaaggaaaaaaacaaaacaaaacatgaaaacaattttcaagtgcagccatttaagagtatagtatgaatgtcccttgaactttgtgagtgggaagacatctaaggaaatgtctctgtagctctccttttgaaaatcaatcttaactggacaagacccctggccacaagcctatgcaattagactgcatatcctagtaccacaaatgcaattgttagcagctgtctttgtcaacaggcaagttggagaaacaataaaaagaggagctggtgatgatgaaagaggaagggtgtgaaatggttgtgtgcttcctagtagtctttaagtctccacatacagaaaagaatttgtgctcctccctttagctaaagtgttgaatgactgagaaggcaaagagggatgagaaagctgtttgttgtctagaggaagaaagataggatatcctaccatgtcagaaagctgttaaacactcaagatgaaaacactcatcaggattttagaatcaacaagcagttgtttatatttggatgtttgcagtggaccttattaccttaacatccttgaccaagtttgtgagacaaagaatatccagggtgtggactgagatattggactttgtggttaagggactctttttaaaaaccttttttaaaaggttattatgactgcaaacttgggtaagaaaagggagccaaagtggtccttggcttttgttgtggttgaagcaagtgaatttagaagaaaaagactgagcagaataattctggtttaggcttgggactcttttattagttctcttcctatagcatacaagtcacaagaaatccttcttatgtttcgtagatggcttttatacccagtaaacatcaaatattgtcagtgtgatttttcacagggatacatttagcagtcagtccctcatggtacacgtttattattttgagttgaatatgcatatgttaaataatgggaggattcagcctcaggctggaaaccacgctgaagactgaagaaaacttggggcagtgggtggggagtgctgctctatagtcctgcctaccctggaagggcttctgattttaccccactgagtaccctgggcagagttgagacacaattaaatagggaatacctgccaacagaggaacagcttcccttttcctgtagtgtcccctttcaacttgagaattgaacagaaagaacaccgagcacttctttcttctttcctttttctaggaaaaaatgagtttgccaagttgaaacaagtacttttcacatgagtttcttcagataaatttattaatttgtttacatatatacatatgaaatatgatcccggtgctggtagtacagcatcaggtaagagaggcagatgaggtccatatgaagaaagaagtatgctttcaataaactaagggtggtctcaacactttgggaggctgagatgggaggattgcttgatcctgggagattgagaacagcttaggcaacatagtgagacctctgtctctacaaacaatattaaaaaaaaaaaaattagctgggcatggtggtttgtgcctgtagtcccagctacttgggaggcagagttgggaggatcgcttgagcctgggaggttgaagctgtaatgagccatgatcatggaactgcactccagcatgggtgacagagtgagaccctgtctcaacaataaatacgtaataaactaagggcaagttggatctcttttaacttcaagctaaatatgccatcctcttcatcatacttctcaattgtactacatgatcagagatcagaatgttgaaagagtttgaaatctgcacactaaacatttctcctctaaactaaaagatacctagttcttgtatcagtgcattaagaaataggctcagctacacagtagctataatctatacataaggaaaaattgcttaatagagttctattcctgagttccatttccatggtttgccagagtttaattaagtttctcaagctttttaagggcatgtctatttttatttatttctgttttggttaagttttatttttatttttaaatgctttttgacctgtttttgtataagatagatgtgtatctattcatatacatacctattgaataatagtgactgtgaaatatatgctgtatgatgggtactgaatttgagtctattttgttgaaatatagagacttcaaatatatcttttcttttttttaaaattttgtattatactttaagttttagggtacatgtgcacaacgtgcaggtttgtaacatatgtatacatgtgccatgttggtgtgctgcacccattaactcgtcatttacattaggtatatgtcctaatgctatccctcccccctccccaggccctggtgtgtgatgttcccttcctgtgtccaaatgttctcattgttcaattcccacctatgagtgagaacatgcagtgtttggttttttgtccttgtgatagtttgctgagaatgatggtttccagcttcatccatgtccctacaaaggacatgaactcatcatttttgatggctgcatagtattccatggtgtatatgtgccacatttttttaatccagtctatcattgttggacatttgcgttggttccaagtctttgctattgtgaatagtgccgcaataaacatacgtgtgcatgtgtctttatagcagcatgattgataatcctttgggtatatacccagtaatgggatggctaggtcaaatggtatttctagttctagatccctgaggaatcgccacactgacttccacaatggttgaactagtttacagtcccaccaacagtgtaaaagtgttcctatttctccacatcctctccagcacctgttgtttcctgactttttaatgaccgccattctaactcgtgtgagatggtatctcactgtggttttgatttgcatttctctgatggccagtgatgatgagcattttttcatgtgtcttttggctgcataaatgccttcttttgtgtctgctcatatccttcgcccacttattatgacactaaatttgatgtctatttggatatcatttataagatccttatataaaaacaaataaacagggtttactttgaattttaccaaggaataatctacattgaaattatgttacacacagtttttttcctgatctttaagaattagcaaaaaaagaggaaacatttgcaaaagaaattgaatagtatgaaactgttggatgttgcttattccttatagatgtttacattaatttattaatctgacttgaaaaagtcaaccactttacctagaattaggttttgccattttggtggcaagttgaaaagttgttttcaaatttgtccagtcttttccagcctttgtttttccctgtctcatatttatgtaccaacattttaatcatcatgcattattataaattattttatttcagttgaatttaataattatctgacaacactttataagctagtcagatttgagaaaatcaatttaaagtccttcttacaattcattatatgcaataaataatattaagagagtctttcttctggaaggaatgccttcagattttgacgaataaatgtaaataaaaacatttcttcaagatatgatattgtgcggttttatctagctgaacccaggtacgttaaaaagaagtttaaggtaatgtttttctcaatattcttcttctaagttttaaaagttttgacagtttcagataaaatttgacgaggaaagttagacatttacagttaacatggcttggatatatattttaataatgcatttaataatgtaatatatacaaagtcaagtcagttcaataattttcttttttttcagtgtttcttctcttttaacttttagcttttgcctttccctttatgtcccttgtcctttaatctggatcccagcaatattttatgtgcatgagaactcaagtacatagtagttttaatctatcatctattcttaaataatgaaatttcaacatattccatttagaatcatttactaagacaccaagaggagtatgaaataacacttgtttgtgtgtagatagataggtagatagatagggatatacattatttttatccacttactattctctttgcatttttaaaactctcttaatgtttcctgttgattttgtagcaccaattcccacataaaatgtgtcccttacccatcagttttcattttcaaattggatcagatagatcatgttttttcttaaagggcatgagcactttctcaagaacatactactttaaaacaatgtaagcatttttaaaaagtaaaacaggataatgggataatttctggtcttttctatcaagaggaaacagatcataatgtgccagattgcactcatcctctctaggaatttctttatagatagtttgttaactcaagacttaataaaagtgtttcatgagctttagaaaaacatcttacctaacaatccatttcccacatttaattacaaaaaacaataatgcatatatgttggattctaatatcaatccttagttgcatcttactaaagaatgagtaatgctccctccccacatgtggttaaggtaatagtacctgttcttagaccatctctagcccagtgttgcttttcccatgttatctgtactataatgtcagattttcatgctgagttctaatatttgtttaattactttcttaaaatacaatttttaagcaccaggaaaaccctttaaactaatttctatgaaagtactttctctaacatttcctacaaaatactggctgcatgctttactagtagtcacattgtatttagtagtcagaaatgatgtgtgatgctctcttcttgtatttccaacctatgggttctgttttctttctttgccaagtgtgagttgtggcaaaaataggacatttccatggactttagggataaagaaccacttcagtcttggtaatcatcccaaagggggtgatctgtagtccagaaagccaggaccttccaaaacatattgattaaacatctcctttacagcagaagccaaaaatctttattgccaatattataagttatagcagtgttccccaacttttttggcaccagggactgattttgtggaagacaatgtttccatggaccggtgaaggagatggtgtcagggggattcagtcacattacttttattgcgtactttatttctattattattattacattgtaatatataataacataattatacaactcaccataatgtagaatcagtgggagccctgagcttgttttcctgcaactagatagtcccatctactccataatctcattttggttgctgtcactgcagaaaaccctgcttcacaaagatagaatgttggaaattgaagcaggctctttggtgcttttgtggcaattacaagatattctgccttgactttaatccagaacatatggagatttgaagttgtctcaaatatattttaaagtccactgtcatttgtgatctcaagcagttgatccttttctaacatggacaaagtccattcacctggcttattcataaatgggtcatggatccatttcttcccagtttggggtcttttgagtaatactcaaatgcttttgaaagctgaggtaagtgatcatgtaccagctgtgagaaagaaggccctggctcagcctctttataaatcacagctaatgtttaaaacatatcagaaatcccaatgttcactcatcacccccataattctactttggcttttaatgcagacccttttgctgacttgaacacagttctcattctcccctgaagtgacagattgagtttgttgactaggttgaatatgtcacacaaataggcaagttttgggacccattctgtgtcactgaaatgtgctgccagtggtgattgttgttctaaaaatctctggagtagttctcataactcaaaaactctggccagggatctacctttaaaaagccatctcacttctgtgtataagggaagatgtagctgggcgcagtggctcacacctgtaatcccagcactttgggaggctaaggcgggcagatcacttgaggtcaggagttcaatgccagcctggccaacatggagaaaccctgtctctactaaaaccacaaaaattagccgggcatggtgatgggcaccctataatctcagctacttgggaggctgaggcaggagaatcactggaacccaggaggcagaggttgtggtgaactgagatcgtgccactgcactctggcctgggcaacagagtgagattctgtctcaaaaaaaagagaagatgtgtgtgctctctgtctgtctcctcacagaactgtgcaaacagacatgagttaagagcatgtactttaatgtggttgataattttaatcacatcctgcaaaatgttgttaagttcaagtgacattttttggctagccagcatttctctgtagatgacacagtgcatagactcacattcagaagcgacctctttgacccgagcagtgaaatcagaaagccattttagtcacggcagctactctgtctatgcatatactgacacaaaatgaccaattcagttttcttgatatatattcattcaaagacttgaatgtttatgcagctgtggtgttgattgccaacaaaagtgcacataacaaatcctcatgcacatcctcctgaaaaatatattgcactaaaacaagcattgttgccttgtcaacatcaatagacacatcaacctagactacataccatggtgactcattagtcctctctaacaattgtgccctgatatcccctgctatttcatcaattggtctagttatggtgctagctgaaagaggaacatgtgccaacttttgaactgcagcctcttctgtaagttcatgacaaatgtccttagcagcaggaaggatcaactcttcaccaatagtaaagggtctcttagctgtagcaatgtggttagccactaagaatgatgctctcagtttagacacatttgatgaagtggtgtccttcaatgtttgcttctgttcttcatgttcatctttttttttttcttttgaaaaacttcaaaatggactggcactttgggaggcctaggtgggtggattgcttgaggccaggagtttgagaccagcctgagcaacatggtgaaaccccatatatacaaaaaatacaaaaatcaggcatggcggcacatgcctgtggttccagctactagggatactgagatggaaggatcacttgagtccgggaggcagaggttgtgccactgcactccagcctgggtgacagagtgagaccctacctcaaaaagaaaaaaaaagtagagaaaaagaaaaaaaaagaaaacctccaaagacttgaacttgacttttgacacagggtgcttaatctgcatgtggtgaagaagttttaaaggttttatggcttttttggatagccagtcatcacatattatacaaagcaggcttgcagaatgaatgtgaatcacctgttgcagtgaacccataatttaagtgggactcttgttattttcttttaaatgctgaatttttgtaggcagtcttagaagtcttccgctgttgcatcactgggtctttccctccttcaaagaagcactccagtgatgtttgttttttactcattttggctgggttagcttgagggcttaccaaaactgtgactgaaacaagtgcacagtgcaggaaagaagcatgggtggaagtggtaaatacaataatggatgggccatacatggactaaattaagtgctagattctgacttaaagcctgacaccagatgcagcacagatagggttttgatatgagtctgtaagcaactgatttatgatggtctctgtgcagtcaaatctgtctgctaacgttcatctatatttgcatctgctcctcagtgctagcatcaccacctcagcttcacctcagatcatcaggcattagattctcataagaagcatgcaacccagtccctcacatatgcagttcacaatagtgttcgagctcctatgagaatctaatgctgctgctgatctgatgggaggcagagatcaggcagtaacgactgatgggcagtagctgtggagtggctgcaaatacagatggagcttcactcactcaccaccggccacttcctgctgtgcagcctggttcctaccaggccatggaccagtaccagtccatggcccagtggttggaggcccctgagttacataaatatatagttatggcaaatgaatcaatgttgccatttgtcaagtatacataaatagataaattgtctttctgcacaatcaaatcaaaattcacataccacacagtggaatatatatttcttataagtattatgattacccactaagtaatcatggaaataatctttgaaggaattaagaggccaattatgtattattctataccatgttggaagcttgtcaaatttacaatacacatgttcaaagtgagcctacagcttgaacccctcaaacttattccatattaagtatttaaaactactcagggctgttcatgattagcaaatttgtgaacactttaatgcatcaagtaagactttttcttacaggaaacccaatatcaagatgtgctctactgacccattttattattttccttaaattgaggagaaaagatactctatattataattagttatattaaagaaattcataaaaacctgagtaaatgtggtagacagtttatagcaatgtctttagggtaaatgtctatattaacatgttgatcatttattaaaatatgccatgcagtaactcctctaaccctttatgtggcttaattttttttctctctttataaataaaatgcagtggccaagcccaaatagaatgaattgtttctgtgtaatgaacaagatataaaatctttgcctggctgccaactgtttgtaaatgttagcaggagcctcatggtgaggtagactaagtatttacttaaggctctaagtaacctttacaggtaagtccctcaatctctctggatttcccaatgtcatctattacgaaagagaattggatatgaaacagacaatatctagatttcttcgaaatcttctctgactctacaatttgctaagaccaagccttaaatgatctgaacttttctcactaaaataacaagtattttttaaatttagtaattttagctcaaattagattgatcagaggttttgattgaacatagaagatatctcaaaataatgtaaaataacttagtactttggggaaaaatatgacagttgacatgcttgccaaagcttctgtatcataatagatctaatctaggtagtaagttggcttctactgatgcataacatgtttctaacattattttgcattctggatatattttcccagaagtgataacattgcaatgattgtgccttatttttgcatggtcagtatatgaaactttctgtacagactggcagactttctgtccttccaatgctcgcgagaagacacaaaccacacaaagattcccttgggattttccttaaaatatgaaatgcattagataagaatagagacaaaagtgggatgtggccatgatgctctggcaaaaagccaggatttcgaacttttcagaatttttgaagggttgagttatctactaaaggaaatgaggggaaagaaaaaccaataaattgctacataaaactttatatagaaatatgttttctgatacagaaatgtttacctatcgggaagaattactctctgccttgctcatggctttgttaccattcaaatgaattgtgcaggacttttctaacgtaatcgttcaggcttcttttcttaacttttctgtcttgtaccatttcccgcaatttatcccattgcaaaatgggatcaaaagtcagttatcttgggtcacagcaaatgactcaaacatgtaagtgtttccagtagttgttgtttttttgtttgtttgctggattgctggtagttgggaataagggtagagtttctatctccaggggaacacaagcttttctagatctttattttacccaaaactagcgatagaatcatttcacactttgtgaattcaatttatatcagcacttattatgaacagttctcaagaattacaaatccatttctgtcctagacacgtgtcatttgtgtctcactgtgaatgtatcctaagaacagagaggataatgtttgaaaacatgacattattacaatattgataagtaattatttcctgaaatatttccataatgttaaatacatttaaaaaatctctaccagtgaggaaaaaattagaaaaaaaaagtcaagtttaccaaatctattgatctagcacagtgttgtgaagaaacctattagatggtcatctgcaaatatttgttcacttatgatcactgtgaaagatctggagtcatatttcatttgtaataaaaatgcagtaagaaattgatctttaacacactttaacaattaatttaccacttaagaatattgtccctatattgcattgtaagtttctgatacttttaatgttagatcaatgacaatggctgaatgacaatattggttaaatatagtcttaaattgacaagtgttttgggatctgccactgtactcatcaataaggctaagctaggcactgtatttatcctatgacttgaattatcaggtgagaatgtaaaatgtcattttggtatttagcatactgtgaaagatatatcatcttatccagagatagaaaggattttctgcaaattcagatctcatttctatctgtaattccaaatgcatgtcaagcgtattgacagaactgtggaagatagagaaactaaataactcaaatacattatactaaaaaggcaaccagagtgtataatggtaggaggtggactagacatagattactgattagcccagtctagtaccctccttttaatggcaatgagatcattctagagcaagtattaatacatgctttcaacactgggtgtagggtgaaggataaagtggagccctattgctttgagacaatttcttgaccatgtgcatatatttaagggggccatatagtcctttaattcttggtgttaacacagttagccctttgaaaaagcccataaaattcttatgagtagttgaaggcacttaagtttccaccaacatttccacacttttaaaatggagaagaaaataaagattctgatgactatcaacaacaatgcagtatatctgtacacaaatcccaaattcacaataccatagttatgtagatgttaaaaatcccatacctgttcaaaaatgaggttactaattttccacattgtttaaaatttttcttgttgttaagctgccgctattacttgtgtgtattcctgtctgtggttctgcttctatgcacacgttctgtcaatgcttttttgcatcaaagctgtgctttgtctctgaatcatattgtatagaacagtgtgtggtccttggaaaagcagaatcagcactgtttggaaatatgccaggaattctaattctctactccaatctagaattactaagtcaaaaatcccagcaatctgtctttaagcaagtcttccagatgattctgatgcacgttcatatttgagaactattggtatagaaggttggttaacttgccactattctgattgagcacacagtaaatatatatttagcacccactctctgagattctttgcaaccctatgagctataggccagcggtccccaacctttttggcagcagagactggtttcgtggaagacaattttttacacgaaagggaatgaggagatggtttgtagatgaaactgttccaccccagattatcaggtattagttagattctcatatggagtgtgcaacctagatcccttccttgcattgttcacagtagggttcgcactcctgtgagaatctaatgctgccactgatctgataagaggcagtgctcaggcagtaatgctagtgatggagagtggctaaatacagttgaaacctcgctctcgcttgcctatggcttgcctcccgctgtgtggcccagttccaatattggtccatgggacattacagttcccataatgttttgaggcttcacttcatttaactttgtttcatttttaaagagaggtaaaaccacatttagagccatttagactcacactatggtatggccacataatcccagaggtattagtgaaaatgtgataacaaccccaaggagctccctaagtccttctgtgctaggatataatagatgaacttaggacactgacaacaattcttgggagagagaggtttcatttagagaggttagtatttgtgtcttacattgtgctaactatgatatgtttcagcaccttgattaaaactatgaaactatatagcattataatcaatttcaagttaaaatgtttagagaaaaatagatgtgactgattctgaattaatgagactttccacgtttcacaataatttttttttggaaagtacattcctcacccagaaaagcaccactaccactcaatgaagcagaacctttagttttagctagtggccacctcaaagtgccattgggggaggtggggagaaatgtggctcaagcacttgagctctttctctctccaagcctgtttttatgcatgcactttctctccctggaatgttccttctcaacttcccaaatcccccctattaaaaccctgctcttgaaaagtcacctcaaacaccagctgtcttcttcaggatggcttcactatttaaagtaatgtataacatattttatctctcataccacacttaatatattttctttctggtttttttttttttttgtattgtcattacttatttgggtctttattttattgagctttaaaactccttgaggcaaggaccacatcttgtttgcctttgtaaccttcagaatgagagctaacacctaccctgcacactggtgcttaatacacattagctgaattaatttactcagtctatagaattccattgtatatttatgttctatttatctaggagtggatagaaggattttgcacttatttttcacatctagttttccttgtctatatccattctattaaatacaagttttatttgccatatactttctccttttgtgtttatggaaaaatatttagtgagaaacttaccctccagaccaatagctttttcattctaatagcaccaaaacagaagaagcctttgtccaacatgattgctagggggacaataggtcagatgctcctcttctggagaagaatgagaagcagcagctgggaaagatgcttgtgaatggccaccttctcagattaactatttagtcactcatcaaaacattaccagcccaaacaattatatatatgagtattaaaagaaaaaaatgcatttacacgaaaattgtgacttctaagttatttccactcagagattatcaagtcacaaaattttctccattactaaggtgatgatgcatcatgagggaacattcgcaaagtaatatgaactgatttttgtcataatcgcttttgtaatgttgactatcaaactttattttttaagattttaaatataatctaaaataagctttatagattgctactatttactgaagaaatttgctaaatattactttatttctaatgtattctttaaacaattttatatttgtagacaaaatccttcctagttgccaaaattcttagaatctgcacaagatgtttactaaactgagtctcattatctcccaacttcacttttcccagcttcctgacttgttccttgtactccagttggtaaatcaaacctcttatgatatttgaaaacaccatactgttttaccttaataatttgctcttgccttcccacccttcccagccttcccctggacacttcttaaccttcatgactcagttcaggtctcatctccaacaataatttgatcgtggaaccccagccagtatgacctgcctttacctttgccccatagtccccttgtcatcatcttaagtcatcacttactgccatgtaacatgttttattgtaattatctgtgtttgtcttttattcccaatagtacatagacttatcaatagaaaagccattacgtatttgactttatattttcattttctaaaagcgtacccttctcctcctaggtcttcctaagtgattgaactaaattgtccaaagacccttaaatagattcacaatactacctgggctattcatgttttaagggacataaaaactaatatagttacaacttaatataaataatagaatttcactacaagaatatgcctataaatttacaaaatatctgttttacatgaatgggaaatataattcatgtgtcctttcattaataatataattttcaggtgtttctttgagttaaaaaaaaaaaaacctttttttatagcttttaatgttaaggtaattgtagagtcataaacttgtaagaaacacggggagatccagtatgcccttaactcactttcctccaggaggctcttttaactggcatttagttttgattcaaaatatacacatatagaactataagctactgatccaacaatcctcaaacaaaattctggagctcctttccaaaaataatttgataggcaaacttgatcatcctcaccaaagaacagaaaaactggagtgattccttacaaaaagtaaagaagtcctctaggcttcagtccttcagaactcccctttcacattcacagatgtttataataggtgcagtcattgtccattactcacaagatgatcaaattataacttgcctgaccatacgctgcgtcccaaaattattttcaaaattcgaaaggatattaaatcacctatgtcttccctctattttgaaacaataactaaataataatataaaaataatagctaaacctttttaagcttgcctaaactagttgcaaagtggaaaaaaaatggttgattgagtctttgaatattgtgctcccatttcaggtaaagcagaaagaaacaaaggggtatctaagctaaatataatctacaataccacttgcagttcatcctcagaaataacgggtcaaaaattcagttgtatcttatactattactatagctcagtctgttagtatagtttaatcccaggacgttgcatgcaccttcacaaatattggtttattttttgcttaaaatcatccttcattcctctttgttctattaattttcagtttcaaaagtatacataagagaatatcttgcagtttactgacagtactttcttgtcttttggccagacaatgtaagcagctgcctaatcttttgcccctgaattctacctcctgctctgctctgtatcttctgcttatgacataaataaagtatgttagattttgttctctaagattcagacgttatcctctatggcatgccatcatccttgggaggaacagcacattaagtcattaaagaaaattatcttgatgagtcattttgtcagatggtttgcaacagggttcccttgtaggaatgggaaagaggaggaagatgtgatggagaggcaaagtagtcagagatggggagcaatagagtctaaaagtcagaggcttaagtgttaacatccattattaccgacctttatcaccttaccacctgtgtgtgtgtgagttaaataacctaagtatcttccgtttttatatttgtaatcgagactaacaacagtatccttagagggctattgtgtgaattaagaaaatatttttcagaatatgcaaataaatgtgcgtgtgtgtgtgtgtgtgtgtgtgtaccttagggaaactaccagcataagggaaatggatgtaaaaaaacacaaataatgtctccttcatccttcacaatctttccttggttttggcttgcaaatagagtgagatatatctcttttgatgaaaaggagtgctgtgttaggtcagagacttcctacagatacatggacagaagggtctctgacatgtagtcttggcaaagtctctggttatgtcaacttggcaacaggggaaactcaagcatttctattggcctccataaggctaacctgtgaaggaataggaaagaaggtattcatctctcgagaataagctaagccactctatctctatgggaagagtgaaaacatataatctgtagactgcattggggatggtgtttctcatgatacatgacaaatgataatatgctcaactttcagatttcatgtattaagccaatgggaatttgtatgtattgttcaggatttacatagcccattgaagaatttccaaaatctagcactgttggagaaaaactaccctctgatgataattaagaagatactaagctccaggcaaattctaataattttataggtactatctcatttaatattcacaacaaaattatgagggaggtactattatgttgcccattttgcaaataaaattgagtcatgggacacttcagtgacttctcctatggtaattcactaataaatgtagagccaggagttgaacccagacattttggctccagaggccacatgctaatcacgatgctacttctctaccctgaacaaactgctgagagttatgaaataagtagttttagttccctaggtcttcttaaactaaaatgggtgggcactttgagtagacgataaactgacttccctattgtgatctacaaacttttccgagaaaattatctttagatgcagcaatcgaaacttgtgtataaggggaaaaggagctcttgtctacctcttactacttccctcgattttccatttttcctaggaaaaaaaaaaaccttaaaaatccatgtttatggattttcccccaacacagagcagtaattctgctatttcagggacagtgcagatgttgggattagtctccctgtatctcagaatgtcaacacatttgccaaaaatgaatctatcagttaaatgtagccaagagatttagattatctatatcctagcaagaagaaatagtttatcactgtttttagagattgaggtaatctggcatattattgacatgtgctacagatttaatttaataccatagtacagatatgggctctgataagttattttgaaatctaggctaagatgagtagagttgtttcaatatttatagggttgaaaatgcagagttagcaaaggaagcattttaattaaaacaatattttctatgtatgctcagagtaaaatgaaggggaattcttttaaagccttattacttttttctatatatttgctggaaatacttgccgggttttaagacacattgaaaaagatttgcttgtttgcttgtttgtttaccaatgttttgtgccttttgtttttagaaccacacaaaaaacaactcaatagtttcttttgattttacttttcttccaaatatatttaggattctttatttagccttttaaaattgtatgttttaggcatcctggagataacatcagtagaaatcggagttgttgccgtcaaagccattaacagcaactattacttagccatgaacaagaaggggaaactctatggctcagtaagtattctgcttttgttttcaaatccactccagtaaaccattaccatagttttggaaagtttcctccagacaccgaatagctttgttatccttctattgctagtaaatagagccacagtgggttagtcaccactgtttcaagggctggcaaagcagctcttccaattctgtaatctcctctgttgttcacccattagtctaccacacaggctgctgctggcatttgtctgtgaatgttctaaactgctaaccaagtcaggctctcacggaagcatccggtcagattggcatggaaaatgaagacaacttggagaaaaaacactaaaaacaaagatcttgaattgagtagaaacccatgtattatatatgcgttacggctgaagatgaaacaagggctcagatgttttgcattttgttaaaatctgaaatggggaaatgtgtcaagaaacaccattttgcttgttgttcaatcaactctagaattttatttacctagacaataacctttaattcaaattatgcctcaaaatcatatatatatatgtgggaaatattctttgcaatagggtccttgtggagcaggtatccctgcagtgctttgggcacatccatgcctatattccataccaggtgttaagtatttggaataccacttctgcaatcttggatcaaactcttttaaaccaatttcttagaaatttaagatctcacttaaaatgccaaatagttgttttataattgcaattgtaataataattaaattacaagcagtgagacaatttatcctgctcaagtccttagaaaaaaatgcatcaatcaatcatatcaacatctactatatgccagatattgtttgacatatcaaagatgcataagaaagaagtatagaaatgggccttgacttcaaataatttataatatatttaggggaaatgttaacaaatatgaaataattacagcatgattggttgttacatgtatgaaaggatcagctatagcaaagcagccctataataaagttgggaactaggtttcaatctcttagctgtcatttgaatgatgacaggagtatattagtttgtgcatgtggatccatcttattgtgtccctcccagagacagatcaaggggatgctaactgaatttcatttttttctctggattctactgaaggggagtgtattgaaggcaactataaacttggaaaaattttaatttaattttttggaggacatgtaatattatatatggccagaaataaaacctgtgacacaaatcttttaaataatttttacttttgtaaacagatcctgtgtcatttttacatttttatgtaatcaaaaaggaatttcactttaaatttgtaaataaacttactttgttgattagcataaggctgagagaaccatttagaaccatttagtgaccatttagaaccagcagctcttaaacttgagtatgcatcagaatcagtggaagggcttattaaaagacagaataatgggacccacagccatattttctgattcaataagtctgtggtgcagttcaatttccatttctcacatggtcccaggtgttcctgatgctgctggtgcagtaaccacaatttgagaaccgctggtctggatgtagagtagccttgtattttactaatatcaggtccacttttaactggggagtcaggcatgctttgagttggtccctgggactagggcaaatgcttttttttgcatgggggtcagaggaattttagtaaaatttctccattaccattgctcccctaatgaacccagaggaataacagaccattataaaaagtggttccatttaggggttcacatcataatctcttttgaggcatgtttaatgttttcattaaacatgtccaggttcttccttgatctactatatcagaattattggggaagagaaccaggtacatattctttgaagagataacaacacacatacttagtctagacccaacgtcctaaagccagctaacactaatttagattaaggaagaaaatgtaaataattttaatgaatataaaagattttaaatacttttaattgataaaatatacttatttaaaaacatgacatcaaggagaaatggataactttcaaataaactctgacataaaaatatttaatacttttcttcacatttctcctctttttttcttctgccccaacacagctcatggactgtgcttatgcttcatcttgagctctaagctctgtgaattatttcattcaaattctttatttaaagtagagtccggtggctttctattatctgcagtggcacttatctgagatttctctcattaatgtgtttgttgttcactgtcttctcccaatagattgtgaccttggagagagtgaggtcagtcttgtcccccactatttgttcagcacttagaaccatacagagcacagttatacactgcataaacctaacctctggtagaagctcagccaattacagaacatactttccacttccagcctgtctcagaaagaaactcattctctaaccataacattcttttttgtgtaactttacatttctactaggaataatgaaaaattatggtttgttcaaattaaacgaaaaatttattcaagttcaatattctgctcagagtggaatagaactaacatcaaaatttataagtgcatatctaatataattctgtatattaggtgacaactcttgtaattcctaccttcattttttgtttcatacagtatccatcaattccgtaagccctcctaaaaatctgacttgggcaaagattcagactgactgattaaaccagttttatatctattctcttgaattatcttcctctattcctttttggaaactgtatacctttcttatattttcattattcattctctaagcaatttatctattgtattttgagttttctcctgactgatgggattcagtaaataaagtataaaactgaattaaatagaataggtcttcatagagcatgatttaaggaccaaagaaaattttcaggtagctggaaaaaatccaaacttcttttaaaaaaactccctgaaccctgcttttgagtccttgctgtagcctgaattttctttttatacataactgcttatgatttgcttagatcctgtcaacaacatatattttgaggcccctcctctagagatttggtacctttggcccaaatatttaaaacatctgaaataaaaaggctgatacatgtgcacttcaatttaagaaacattactctataaattaattttggggaggaaaattaacattaagcatacactcccacttttctatacctagcttcatctgaaatatgaaatcacctcaaacaatctcagtccttcattagtctctaaactgtaccccatttattgattgaaatgaacataattatccatattttaaaaattactctgctttgaaaagtatatagttttagacagactgagataaagagaataaaagtaaatccacactaaggatttatattcctttcaaatacagaattatttttgttttatcaaaatccttaccttaaataatttacctttccttcttactttcagccagttaaatcatcatttgaatgttatatttaaatattactttatagaagagaagcatttaagactaaaaaatttcaggacagataacttgagctggtagcattaacatagaatacatctgcttcttatggttctgataatgttctaaactgtgataaatcctacagacacctaggtatataaacatatacattttcaggaatttggaattttgtagaaatttcaaaaagtctcaaggtgagagaaactgccaagtacagtcctcaactgaactatgcccacggggcccttgctttggatgaagaagatagaaccagagggcaagtgctccaattccttagcttcttaactactttagtttgagtataagaaaagaagctacttctctttttctgtttgtttttgttttgttttgttttgagacggagtctcgttctgttgcccaggctgcagtgcagtggaatgatctcggctcactgcaacctccgcatcccagcttcaaactactctcctgcctcagcctgccgagtagctgagattacaggcgcccaccaatacgcctggctaattttttctatttttagtatagacggggtttcaccatgttggccaggctggtcttgaactcctgaccttgtgattcgcctgcctcagcctcccaaagtgctgggattacaggcgtgaggcactgcggaggctacttctaaagccagagtcttgagatcattgagctacttcctctttgttattaactccagagtaagaacctggatttgtggagtgagtgagagcgaagccttgtccaggaatgtctccttaaatccaattggcctcctgaacaaaaccaaagctctatggctatgggatggaacttcccaggatccaagtccttaagatacaatgtaggcattgctattcaccatgctcataatttcttcaacatagtagttcacaaaacgaggaattccatgtcctagttttcaatccctagagttcacgagcaaaatctgtcaaaattccaagctatagaatattgcaaataatttcattaaattaagaaatttgatatttggaagaaagacatcccccccttttggttatgcagaactattgtggttttgctataagctctgctttcttatgaatgtgtgtgtgtatttattatggatttgtaggtaaagtttgcaaacttgacaagcccatatctttccttcagttctattttttcccatggggcccctggttattactgtaaaagaagcattataacactattctttattactgactcatcacaaatattgttagtgagatgtctacttcttgacaatcactctaggcacttaaaccatataatattcaaagcacatcagctttttaaaagggctttcaaaaagtggctatgatgatcaattaaaatgtatcatgtgctttcaaacagaatgtgttttgtggttctgagatttacttttctattgttgacattatgtattaagtgcacaacttaggtacaaatggcaactacaaacagaatccttggactggagttctctggatggcttgtatcaaatgaaatcaagtacaatcaccataggaataaaagattctgtttttcctttgcagaaagaatttaacaatgactgtaagctgaaggagaggatagaggaaaatggatacaatacctatgcatcatttaactggcagcataatgggaggcaaatgtatgtggcattgaatggaaaaggagctccaaggagaggacagaaaacacgaaggaaaaacacctctgctcactttcttccaatggtggtacactcatagaggaaggcaacgtttgtggatgcagtagaaccaatggctcttttgccaagaatagtggatattcttcatgaagacagtagattgaaaggcaaagacacgttgcagatgtctgcttgcttaaaagaaagccagcctttgaaggtttttgtattcactgctgacatatgatgttcttttaattagttctgtgtcatgtcttataatcaagatataggcagatcgaatgggatagaagttattcccaagtgaaaaacattgtggctgggttttttgttgttgttgtcaagtttttgtttttaaacctctgagatagaacttaaaggacatagaacaatctgttgaaagaacgatcttcgggaaagttatttatggaatacgaactcatatcaaagacttcattgctcattcaagcctaatgaatcaatgaacagtaatacatgcaagcatttactggaaagcacttgggtcatatcatatgcacaaccaaaggagttctggatgtggtctcatggaataattgaatagaatttaaaaatataaacatgttagtgtgaaactgttctaacaatacaaatagtatggtatgcttgtgcattctgccttcatccctttctatttctttctaagttatttatttaataggatgttaaatatcttttggggttttaaagagtatctcagcagctgtcttctgatttatcttttctttttattcagcacaccacatgcatgttcacgacaaagtgtttttaaaacttggcgaacacttcaaaaataggagttgggattagggaagcagtatgagtgcccgtgtgctatcagttgacttaatttgcacttctgcagtaataaccatcaacaataaatatggcaatgctgtgccatggcttgagtgagagatgtctgctatcatttgaaaacatatattactctcgaggcttcctgtctcaagaaatagaccagaaggccaaattcttctctttcaatacatcagtttgcctccaagaatatactaaaaaaaggaaaattaattgctaaatacatttaaatagcctagcctcattatttactcatgatttcttgccaaatgtcatggcggtaaagaggctgtccacatctctaaaaaccctctgtaaattccacataatgcatctttcccaaaggaactatcaaagaatttggtatgaagcgcaactctcccaggggcttaaactgagcaaatcaaatatatactggtatatgtgtaaccatatacaaaaacctgttctagctgtatgatctagtctttacaaaaccaaataaaacttgttttctgtaaatttaaagagctttacaaagttccataatgtaaccatatcaaaattcattttgttagagcaggtatagaaaagagtacataagagtttaccaatcatcatcacattgtattccactaaataaatacataagccttatttgcagtgtctgtagtgattttaaaaatgtagaaaaatactatttgttctaaatacttttaagcaataactataatagtatattgatgctgcagttttatcttcatatttcttgttttgaaaaagcattttattgtttggacacagtattttggtacaaaaaaaaagactcactaaatgtgtcttactaaagtttaacctttggaaatgctggcgttctgtgattctccaacaaacttatttgtgtcaatacttaaccagcacttccagttaatctgttatttttaaaaattgctttattaagaaattttttgtataatcccataaaaggtcatatttttcccattcttcaaaaaaactgtatttcagaagaaacacatttgaggcactgtcttttggcttatagtttaaattgcatttcatcatactttgcttccaacttgctttttggcaaatgagattataaaaatgtttaatttttgtggttggaatctggatgttaaaatttaattggtaactcagtctgtgagctataatgtaatgcattcctatcaaaactaggtatctttttttcctttattttaaaataataattgcacctgacacataaacatagaccacccacaaccaaaattaaatgtttggtaagacaaatacacattggatgaccacagtaacagcaaacagggcacaaactggattcttatttcacatagacatttagattactaaagagactatgtgtaaacagtcatcattatagtactcaagacactaaaacagcttctagcaaaatatattaaagcttgcagaggccaaaaatagaaaacatctccctgtctctcccacatttccctcacagaaagacaaaaaacctgcctggtgcagtagctcacacctgtaatcccagcagtttgggagactgtgggaagatggcttgagtccaggagttctagacaggcctgagaaacctagtgagacatccttctcttaaacaaaacaaaacaaaacaaatgtagccatgcgtggtggcatatacctgtggtcccaactactcaggaggctgaaacggaaggatctcttgggcccaggagtttgaggctgcagtgagctataatcttgccattgcactccagcctgggtgaaaaagagccagaaagaaaggaaagagagaaaagagaaaagaaagagagaaaagacagaaagacaggaaggaaggaaggaaggaaggaaggaaggaaggaaggaaggaaggaagcaaggaaagaaggaaggaaggaaagaagggagggaaggaaggagagagaaagaaagattgtttggtaaggagtaatgacattctcttgcatttaaaagtggcatatttgcttgaaatggaaatagaattctggtcccttttgcaactactgaagaaaaaaaaaagcagtttcagccctgaatgttgtagatttgaaaaaaaaaaaaattggagctattgagagatctgcctctgtaggagtatggtcccaggcccacaaagttaaagtgcatcagccacaaatatgtgtccatttgagttttggttctgagaatactcctcataaagatatagaatcactccctcctcctaactcgcaaaaggctgaacagtgtatagtatgttacatttaaataaaaacaataaaaatgttgggaaaagaaaattaaaatattgtccttgtttgttttattagtcagaaactctacctggtaataaagagagaagctcaagtgtgtgcatggcaggatgtggttaaatgccccacagccccaaacaacaacaacagaaaaaaaaattactcaaacatttgtaagttttctctaatgtttcacatgtgtgagttagctatctttactctaataacaaccaaatgctttcaatcttttctaaatattcaggtccacctaatttacacagtggataaagaaaaatgaattggaaacgaggatggcttatgaaacaatggaagacttttggaggaaagccaggtggctgcagaatctgatttcaaggggatgaatgaccaatgaatttgatttgaaaattagagagaaaaaatacataataatgcaagttgcttccagggcccaagcaagtttatgaacccaatttacatagatcagcattaatgctgcacagttctaataatttggatgctgccaattcaaggtttgtgattattcagtgaagtaaaatttacctttttcatattactgaagggttcagctggtccaaactttgtctaaataaagttatatatgtagcttaaaatatttaagagaagatgtctagtacattagaagtaggacatatacatgcaaacagataccatattgattaagagttcttgtttatttcatgaagcaggacttttccaacttaaactgaaaaaaaaataaaaaggaagaggaatatctttgaaggatgctcaggagaaaaaggaactctgagttctatgagtacttagaaatgaagtaacgaagatctgcttcttctcagacattcattttctcttacccttcattggttttatttggttaggccagattgcttctagtctacttctttcctactccaaaacccaaaaccccaaactcctttactacaagatccaaaaaggtaaacatcctagatataactcttattggccaggtttggataacataccaacctctagaccaatcagtataagagatttgggaattgtgattgaccaatcttcagtgacatgaccacagagaggcaaggtgaagattttggcagcccacacaaccgcaactagtgaagaagagtacaccaaggagacagcagtgctgcaggtgcaaaaaccaaatggttgtttgctacatcttattaaatgaagctgtgacataaaaacattttctattcctatatttcccaccaattccaattattcttcacctgtttgtttgtccaagttagagaggttttaagatcattctctttcatatgttctttaccattgaaagattacatttgcattgttttgttttaagccaagagtagggccctggatatagctaggctcactgtggttttgcaaactttatattgggatgaatgcaagttttcactgaataaaaagctggtcctcctacttcaacctgtatcacaatatgatgttataaatgtttctttcagtttatcccaagagtatgtgctagtattttcaagtgtatcgacatatagaaaaaatctgaaaccctgatgtcattcattgtttaagtgtaaaataaaaaaaaaacagaaaaaaacctgctttgtcttttactacattcaacatgtgacaaaagaaaactttatcacctaaactttatctatttgtctttttgcagaatagtaaaataaaacacaaaatgcccttgcaagtgaataatctttggaaaacaccttcataaataccatgtattagttaaaatggaataatcatgatcaaactaatgaggtcaaacgaattggtcttgttcctaagtggctaataatgaacatttccatgagcctgttccatgatagcaacaaagggcaacaattccataaacagagaaaagccacatgccaaacatacatgcacgtggcacgtattatcttacacatttttattatccgccacaaaagagtccatgttcattgtttaatacaggcaattgcatcctctagagatcagcacaacaaatgaaggatcaaaacaccccatgttcctcattacaactgtaaattgaacatatgccttcatacaacttaggcagtgaccccagctatagaataaccaactacagtgaggtcttacccctccgaaagtttggttttaattaccttatacacatcttaaatgcctaaatcatcttacggttttctaaattatttagttattatctctgtggtcaatttaagctgctgacaatgcaaatattcccagcgaggtctttcaaggggaagtaaattaaaactagtgtttcatgaggtattacaatttttaaaagactgctttttatggttacaagaagtattagggttggggtcactagtcgaatcaactcagcattaaaaagattttaacatcaggtatataaacactaaatgtcttgatagccatttttttcagtgacataatcaatatgttcagatatcaatggtgtttaagtcaatacctataaaatgttacaagaaaaatatctgttttagggggctttcccactaaggaagacaaaagagaaacactgaaagatggtatgcatgtaagtaaagatacaaacaatatcttatttgctttcctgacaaatcagatactgggcatgaaatgcattttacaattggtgtttatactcatgcagcaaaacatgaaactaaatgctattttcaagtcagtataagcaatcatttctcctcatcttataaagttctgcatttcatcctccagtatctcctaagaaatagtcaaatcagtacatttcaactgcaacaattagcttatctttctctttctcctcattttcaatgccaggttatattaaacagctatgtgatatgtattcccttattagactcacaagaaaatgatagactttatttagacaaatcatctacttcagctgcttcaagtgagtagactccatagtaatgttcgtagagatttttggaggcaattagtattcagaacctggaagtattgttacattctccacatttttaaacatttctgtttctctccacacatataagtattctctcatgataaaattaattatccctaatcatttaaattaattaaacctagtattggaaaaaaactaaacataaggactattatgggttgaagtcctaattcccagtaccttccaaagcggctttatttagaaacagggtcgatgcagatgcaattagttaatatgagatcaggctagaatagggtggacctctaatgtgactctaatctgacctctaatctttatgaaaaggggaaatttagatgcttgcacacaggtagaactgtcttagtccattcaagctgctataacaatattattataaatatagtggtttttataaacaatagaaatttatttcttataattctggaagtctgagacaagggtgccagcttggctgaattctggtaagaacctgcttcctggttcatagatgactgccttctcactgtatcctcagatgacagaagggaggaggaggcttccaggatctccattataaaggcactaatctaatttaagaaggctctcctctcatcacctaatcacctccgaaggccccctccacctcttactaccatggcattggggattcggtttcaacatagaaattttggggagacaaacattcagtctgtagcaagaacaccaggtgaacatgaaggcagagattagggtgagtcttcaagcccaggaacaccaaagcttgccagtaaaccaccagaaactgggagagaggtgtggcacagattctccctcaggaagaaccaactgtgccaacactttgatttcagacttctagccctcaaaactgtgaggtaataaatttctgttgttcaatccatccagtctgtgacactttgttatggaaatcctaggaaactaatatagggcacgtaacttaagaccacagaacttatagttaggaattggtctttcacacctggaatcataagtcaatttaagaattgtttgctccaaccttcatattaacaaaaaatccttaactagctcctaaggcatgcatgtacagttttgcccagtaaatctttacttaatcaacccatagatttttttttggaatattcccatagtcatggggatgccatctgactatggtacacttttcccttaaagtttttgtatggttgtccaaatggccctacacataataggttcgaataactacatttgacttatatctcaatatgcaaattaggtgagtttggtgtaggccagaaaatgcagtgtgaaatagacatgctattgagggttgtgatttttaaaaatacttgaccttctctgtttactagagaaataataaaaaaacataatcagaccattacatacaatataaatctattcatggcagcctccactaacttctgataatttacaacagtttatatggagtaacaccgctcttaatgattttttacacaaaaatgtttgaaattacatgatcaaggagacatgactacaaagtaattgaattggccaacatatcaaaatttatatattcaaataaatatttcccacttcagattagaacattagaagactatttatattactagtcttcatcttagaaatcagatgctctcttaactcttacgccctgccaatgcatgtgtttgatcccagtgactttgtatcctatccatggaagtttatacccagggtcccacaatcatttacagtcctagcttctgtcttttttagccttccttttcccagtataattgcagaattaacttttgagtccaaatgcattactaaattggttcctttcctatgttcctactgtatgcaactataagacaggtaaataataagggtccccttctctgaacaatttagtaaatccatctggaacaaacaatgaataaaacaaaggaatgcttgtgttacgtagccaaaagctacaaggatcttttgtaaatacagtcacatttgccaaatcttctctcttaattatcttatttcttaaaaatgttattgaaccattaacatctacccaggtttaagcaccataattctttaatcaccacctaatgtttcacagactttctaatctatcattcctctttgataaacacaaaaatctcaaactgtcctttaatgttataggaaagtaaaaataaatttaagatcttgactgaaaatctaaacctttgggccaagaacctttgttttcaaattatacttgacccataagagagtctatattcatgattttctctgttaaagacagttcagggcacaacctctccgctattgatattttacactggactgccctgtactttgtagcagggatccttagcagcatccctggcctctactaattagatgccggtaatgctctatcagttgtgacagccaaaaatgtcattaatttggggtaaataaacatttgtataatattgaattttctccaaccacgtacttaatttttcttttcctcaagccttgttatatggtctgcacatttctcattaggtttattgctacgtattttataatcttttccattttgatttttgttttggttgtgtgatctccgttcattatatatttagactaaccatgagtttatgtaattttaagttcacatgggaagatgtattgtctagtgggtacttgggggaaaaatccatccttcgctgataatttactggtgaagccaatcatatctaaaaggttgacagtgctttgtatcttatcctcctgtcttcaccatgtgaaattctatctccattgtgctgttagtagttaaacaagcaaggagctatcagacctacaacaaaatagacctctgtaaaggaaatacaattatggtgggataacccaatgctaggtgattatagaagcactcaacattcaaaataccataaatagactttaagacacaacacagtcctattaccagaaaacttgtttaaaatttgggtgctatatcaaatgcagcacattacttgaaatgtttatctctatccttctattttatttattttattttattttattttattttattttattttattttattttattttattttatttatttattgttttgagactgagttttgctctgtctccaaggctggagtgcagtgggacagctcagctcactgcaacctcctcttcctaggtttcaagcaattctcctgcctcagactcccgagtagctgggattaccggcgtgtgccaccatgcctgggtaatttttgtatttttagtagagacagggtttcactatgttggccaggctgatctcgaactcctgaccttgtaatctgtctgcctcggcctcccaaagtgctgggattacaggcatgagccaccgagcccagcctatccttctactttaatatcttaatcttataagtgagaaaattgaagttcattttacttcccagagcttactgctagataatgaagctggtatcctgactaaaatcactcttcttcccattatatgtgtactttccaaaaaataaaacaaatcagaatgatattctttatagcccaatgttcaatttttcagaaatgcaattctaagaataatgaaagtttttcactttaatgacacatctcacattgtggatactttttgggaggaatagcatgtacttttcaatcagagaaacataacttttaatcccaactctgccaatttctagaagtaaacttagaaaagttacctcattgaaggtaaaaaaagaatgaacaaaaatcttggataatcattcctaacacttgggacagtcattagcattgaatgttatcgta

SEQ ID NO: 47 - DNA, 627 bp, Homo sapiens
atgtggaaatggatactgacacattgtgcctcagcctttccccacctgcccggctgctgctgctgctgctttttgttgctgttcttggtgtcttccgtccctgtcacctgccaagcccttggtcaggacatggtgtcaccagaggccaccaactcttcttcctcctccttctcctctccttccagcgcgggaaggcatgtgcggagctacaatcaccttcaaggagatgtccgctggagaaagctattctctttcaccaagtactttctcaagattgagaagaacgggaaggtcagcgggaccaagaaggagaactgcccgtacagcatcctggagataacatcagtagaaatcggagttgttgccgtcaaagccattaacagcaactattacttagccatgaacaagaaggggaaactctatggctcaaaagaatttaacaatgactgtaagctgaaggagaggatagaggaaaatggatacaatacctatgcatcatttaactggcagcataatgggaggcaaatgtatgtggcattgaatggaaaaggagctccaaggagaggacagaaaacacgaaggaaaaacacctctgctcactttcttccaatggtggtacactcatag

SEQ ID NO: 48 - protein, 208 aa, Homo sapiens
MWKWILTHCASAFPHLPGCCCCCFLLLFLVSSVPVTCQALGQDMVSPEATNSSSSSFSSPSSAGRHVRSYNHLQGDVRWRKLFSFTKYFLKIEKNGKVSGTKKENCPYSILEITSVEIGVVAVKAINSNYYLAMNKKGKLYGSKEFNNDCKLKERIEENGYNTYASFNWQHNGRQMYVALNGKGAPRRGQKTRRKNTSAHFLPMVVHS

SEQ ID NO: 49 - DNA, 177049 bp, Mus musculus
  misc_feature (1)...(177049): n = A,T,C or G
tgtatgtgcatctgccaaccccctgaaggatgtagactgtaccttggccatgtttggatctgcctaggatggaggaggtacccagaaagtattgttgacttaaaccaaaagagggggtctgagcagtttaggcagtgcctttgaagatcttggtaaagaagtgggatgctaccagttgtgggatgtacctaccaccaaaggaacccagagtccttttccccagtgatcagatcagagagacatgacaagtgagaagctttgcacacttgcccaagtgtagagagtatagggacccaggatggaagaccttgaggtggtaaatttggaaagctttaccgtgtgacctagagatagatagtggctggcagatcccacaggtcttctgtacaggggtccttcattgattctgtgtgccagaagatgttttcagtggagtcttttcttggtaaatgaactgttactggcagtctttgtgcatagctagagcttttctatgtacatttgaccccaagccaacccaaacttgcttttataattgcagaatatttggatgtcggtttctgatttcaggttacacgtgattggtagtgggggccagtggctaattctgtctgaatttgtgtgtctgacttgcctttgtccccatgttttggctaaaccttctttggcggtggcttttttttttttttttttttacagcctttgaaagttaagtcagccaacttcttatctattgctgaagtgcaaatcctaggattagtgctgagtgggccctgatggtgtgggtgggacctctgcctgccctgagccaaccgcccagctcccatgccaactcctatagttcttggaatgagagctagggatgcagtaggtcctggaaaacaggtaggacactgtcacctaggggttttgctggatgacagtgactccaataacctactgcatctagaatgactgctctctgcctgttggtaaagtgttcctnnnnnnnnnnnnnnnnnnnngttggtaagtgttcctcgccccccccacctccccacccccccaccactcgcacctcccctccccccgtacctgctgattcaggagactgctctatcagcctcctctactcctggctatgaggtttctcagagaccagatgtctttaaggttaccctgctgacctctccatttgtcacttttgggcatattggggacagcttcctaaggcagacttctctctacctggtggttatagggtctctggactaccaaggggtctcaggacaaagcattgcagaggctcctggagggactgcgtccattcgtatcataatagagaggggcattgtttcacctttgcccctcagggcagcatgtgaccctgacagtatagcaggttagatatagagtgacttatctagttaaggggacagagaatcaggagaggtgaataagcagataccaggattgggctccagggacacaaatgtcatgtaaaatttgtacttttaaacacacacacacacacacacacacacacacacacacacacacacacacacacacgggggcaaggacacactgattattggagccattctttccttgtaaatgctccattaaactacccatgggggacctttaagtgcatactccattggagtctgcaggggaccaaattagccttccctgcagccatctagtttggaacagaggccacctgccagtgcttcacccagtagcgttttactggggttgcactgggttatcaaaagggagcaagcgcatccagtggtacccaggggtcacctttccccatttactatgggacatctcagcatacttatcccacacatgccctgtgacctcaggtgacccagcgacttggagaaacagtagctacttttagttcttgctaccctgtaatgtctgttttggggggtctctgggacctaccagaagctccctgtgaaacccatgtttgaattttgccttgcttaccaggtaacttgtagttatctggctggaagagactatctaattctttctgccctttttccctgtgagaaaaggaggccaaaccaggtcacatgcatgtgaggtctatcataatagccatctgtccctctgtcttggcctctttctcctgtcctcaggcattgtgcccctgcctctgaggacacctgccaccatttgtgcatattctattcaacatcagtagcctggaaccttggccccaccacaaggcacaggtagtggttgatcaagtggccccactcaaacgcaagtttccttcaactgggcaaaaaccaaaaagaccatattagcagggaaggatacataatgctacttagtaaaaatatataatttgtccacttattctcttatagatttgggtgtttagcccactttttcatttacagctattgagtgtttagtaatgggatcagccttgggaatctaatgatgcgtgaagcagaaatgaccccaggccctatacacgtggccagcttttgagagagacagtattagagaggtaatttttaaaccttattttaggctggtaagtattataaatatctatgatgtacaacatgttttagtatatagagacattgtagaatgaaggacttaagctaattaacatacccatatttgcctatatacttttttatggcaaaaacatttagaatctcctcttagcaagttcctaccctattctgctttgttgttactcatgctgttctatggttgttatccttggcttcctcctatccaacagaagtctaatttccttccaaccacgactctctttgcttatttctttgcctttttgtagatgtcacatgctggtgaagtcatgagtatttgtttgactttctgtgcttagcttatttcactggacattatatcctccaggttcacccacatgttgcaagtgatggcattttcttcttgcagagtattttcatttatctgtgcatctccgatggatacatagggtagccctacatgttgaccgatgtgtgcagtactgctgtgtgcttggtagcacccgtctgtcttcaaccttctaatttcattgtctttggtcatttccatcttggagaattgttatatcaaatagtagttccattttaaagtcttggttggatctcattctatttcacatatgaacatactagtttataatctcaccaactatattcaaggattctgtttctccatgtttaccaacacttaatctttccacttttgtctgatagccattgccatcaggtataaagtgctatttagttaggtgcaattccatttgtgtaatttttgtatgtgattatattgtagctgtcttcagacgcaccagaagagggcatcagatcccattacagatggttgtgagccaccatgtggttgctggaaattgaactcaggtcctctggaaaagcagtcagtgctcttaactgctgagccatttttgttgcctttgtttttggggtcatagtcaagaaatctttattcagagtcaaatgtaaagaaaatttactgtttataaaaattaacaatttgagtattttttccagatggttattggtaattcttatgtcatacacacacacacacacacacacatatatacatacatacatatgtatgtatatgtatatgtattgcctacttgtatccttggggggaattttttaaaaatattatattcttgctaatgatttaagttccctatatattttggatgctaaccatttttcagctgtatagcttgcaattattttctttcattttgttagttgtctattattgacacattttctgtgcataagctttctagtttggtgcaattccatttatatattttttgcttttgttgcctgtgcttttggtgtcctatttaaaaagtcttggctcagatcaaatggaaagaaattttactctgttttctcccagtaattctacttagtattttaatgtttaagtctttgatccaatttgtttggctgtgtatgtgttgtaagataaagagcatatttcctgcttttgcctatggatgcccagttttaccaggaacaattttttaaagatactgttctttccccattgtgtgttattggcacctttgtcaaagatcagttggttgtgaatgtataggtttatttctataatctttggtagaggggtaactttttaatgaattggcagtatgaattctaatagaatttggtaggatataacagtgggctccagttttgtctgggaagtcaataaaggttttgctgagaaagtattatttaagttgagccttgaaggataggtaaaacttatctgttaaaatggagtggaaagatgctatatgaagaagaaatacatgtgaatggttgcactctggtccagggtcatgcatggcatgaattggtgactgagtgcaggctaggagacaacagctatgataggtgtgtgctctatgcttccccactctacagcacaaggcttgttttctatcctcgtgtcatgaagctgtagcttcactctaaagagggaagagtttatatttggaggcaagaacattgggttcagtggagcaaacgaggcaaagacatggtgcatgcatgtgtgagtgaaataacagaccggtgtggtgcagagtagagggttctcatagataggaagcaggaaagttggagagacaaactgtaaggtagagagatataaggatgactttaaccctgggctgcagagaagctaaaatttgaggaccagttatttattaattctagtactgtgaacagacatcatgaccaaggcaacccttatcagagaaaacatttaaatgggggcttactgatagattcagaaattgagttcattgtcatcatggtagggatcatggcagtgtccacgcaggtgttggaacagtagctgagagctacatattgatctatagtcagagagagaaagaaagccactgagcctggggtaggcttttgaaatctcaaagacttcccccactctagtgatacatttcctctaagaaggccatgcctcctaatccttccaatcctttcaaatagtgccactcactgggcccagtggggtcagtcgtattcaaattatcacaaggtaagatggaggcagcctttatatcagggagttgactgttttactttagactttgttttagaaagaatttataataacttagatccttgttgatacatatcctaggatcaaaaattgttgtgttttagttttctttatgtttgatcgcattactttattcttcacctttttccttcactgtttttctagtagcacccatgagtattttatgcatgctgtgtgtggtggtaggtcttagagttatacggacaataaggaatgatattcaaaaacagggagctagtacctgcacacacacacacacaggcatgaatgggatagcttccttctcacaagcaaggaaaaccttctcaaagacatgggcatgtgggtggatgagcaaagccaaggggcgagtgctcttggcctctgtagatctcttgagggctctaaggttagttactgaattttgctaaggaggaactagctcaggatggatgaatagatggatgcatgcatggacaggtgggtgggcatgtgatagacatatgaatgttgatgcaacaacacacagtaaaagaatcctgaagaaaagaaccaagtattctggaatctttcagcccctgctagatgacagtttttggtttcttaaaggccttttgtagggtgaagtggttagacactgaaaataagttcagaaaatgttgacttagagactgtcccaatgttcagatcactgtttaaaaagatagaccattagattttaggactgggggaatggctaataggtaagagcttgtaagtgggtaagggtaagtaagtataagcagggaaacccaagtttgatccccagaaccaatgtggaaaatctaggcaatttgatatgcactcgtgttcctaggaattggtaggtaggtagagatagctggattcctggtgctctgtagctagcaagtcccttgatatgttctaaaacataaaacaaggtgaacagctcttaagaaagagtaacacttgagattggtctctgacttccacatgtgtgtgtgtgtgtgtgtgtgtgtgtgtgtgtgtgtgtgtgtgtgtacactgcacccatatgtacatgcatccacaacaaacccacagccatactacaaagaagaactagatttgagcctatatttccctgatagtttaaagtgtcataggagacttggaccttatataaagtgcccttctaaagggaagtttgactggcattgctcaataaggtcctctgccagagaaaagaaagcactgctgggggcagacagagaggattggaatcatggagtcttcctgtttcacagggtgggtcacatttgtgatacagcttttgatctggctttgtgaagaaggattagctcatttcgaatctagaatgttctcacctgccccttccccaacttctcctgtctttcctttgctgtggcacagtcttggttttctcttctgtctctgctacaaacttctgtgctgcaagtcatttggcttctgtacctccaaactctttttggtgttttctggcttccttcttaccttccttttcaaattcattttttttttcttcaaataaacaatccatttgaagggggataattgtcatacttcctcaatttttatttgaccaaaataataataaccctcaatttgtttaatgtagaggtactcttgtctctcaggagtctttggcaatgtcagaattgaggaatgaatgtccctagtttataggacaactggtctaccaggttgtgcttgttcatttggcatttgacagaatttctgtaacaaccatttttatagcaagcttctcttttttataacgcattccatcaagtaattcattaaagattttggaaagagggaccaacattttttaaaaggagggtgaggtgaggaagggaggattataaaaataaacccagacccttcaaccattcagttacactaatgtccctcatattattgtggcacagttacttataaataaaaggcagagtgtgtttggtaggtgtactctctgttctttatcttgtttttctgctctgaagtatggtgctgtcttgacgtagggatggaactgctatgaatattgatggcatggcagccaaagcttttttcctgtctggcctagtaaataaagctgagaggatgaaagagaagaggaattttcaagacagtgtgctgtttttagattatcttgttcccttagaactaggagtcttgaaaacatattgatgatgtacatttggtggtaggggcagctctgagtaaagtaggtggatatttcagaaatgtgggcctctggtttaaagtcacagaataataattcctcctcctcctcctcctccttgtcctttgagttttttagagtttgtgctccttcttggatctctacacaccttccagtgaatcatcaaaccctgactctcactgtattaattgtattgtgaattgggtgctgggtggtgtgtcctcatgttcctatgaggacatccactcaaagatacagcaggaggaggataaagaacctgggttgtaaacacagcagcagccccgtgggtctgcatatgacctgtcaggtcatggtgcataggctgccttgggagcaccttcaaggcggcttagcccagaggatctgactgtgtgaggggaatgggggcaggggtgggaaggatgaccagatggtggagggaggggtacacaggatgagccagcagagaactgaatctgttcgaaggaccaggaggcaggaataggtagggattgggtatgagttagtgctttaacatcataagcatcctgattctggttaactcaaaagaaattcttagactgttgtgatgctcttccaaggattcacagagcactggatggcaggtttagaaattacaggagccagggctggctaggtgtctttgcaggtaggaatgcttgttgccgagaccaagacctgaattcaatctccttatcaaatacagtggaatgagagaactgatgccttcccatggtctccatatgtatatgtacatacacacacacagatgcacatgcatacacacacatatacacacatacacataaacatggatgaacatgcacacacacatggatgcacatgcacacacatacacacacatatacacacatgcacatacacatggatgaatatgcacacacacacacactgaatgttaagggcccagaatgttctagggttaaggtcggcaaaactgatctggcttttctataaccaggggggagtaaacaagatgggtgctgtcttggatgcacaggctgcagttggttattaccctggtggcccagagggacgatgctggtgacaagccatgagaaatctctaccctaggacagccagagacaggagccagctgtctagccgcagaggcctgcatcctagttgtagtgaagacaacacttccattgaaatgcagaagaggctgtagctactgcaagccaatgtgtgcgtagacatgttacatttttaggaaggcaggcctgttggagtcatcctgcaatgaatattttaaaagaggatttccaaaataagaagttcctatccagaagcatttccttttaacagcgtacatttccatttataaatccacatctacaatagtggtcacacagtgtctgccttcttttgtgtgaccatggggaaaagaaaggacccaggagctgtggccaagacccttggcttcagcacaagtaggggagtgctcttatgctaactctggattttagaggttctctctgtatgtgtttaaaactcctgtgaacccttccaggccattctttgcaaggatgggactggagttgggaagtttttaaatgctggttccttctggggtacctggcatatggaggaaaagctcactgtttcctgagccatagttactatagccttctgtagtagccatgttagtaagtgaagtccattagtctaccctaaggatgatagtagctgaggactctagagcccacagagaaaagttctcattcttgagattttgttttgttttgttaagtaaattaaagccagagaatgctggttggatactcatggccctgtccattgagtttctatcaaatttatagaaagagcctatgtgtttagacctgttgactggggcatccttgcttggggggtaatgtgggttggagttggagaggttctagccatcaggcaatgctgcagatggatgtggcaatcagatgggagcagacatgggaactgagataaaggcggagctgtatctccaggaggctggttaggagggagtccatcactggtgccagccaggaagaggagacaggccagtattaggcatctgagatccctgccctcttctctgtgctgagggcagtcagatcagaataagatgtcagaggaaaacccaagaaaaaaaaataagggtaaagtccattatgcatctgttctcccagacggtgtgttctgtgcagaaaccactgtcagaatgcttgtttcatcctggtgcttttctgggcctgatctggcaatcttggagaaaacatgctgtgttgtgcaaatgtgtgcaaatagaaaacatgcccatgatgtcccaggcaggctcactgctcatgcatcagggcaggtggcaaaatgcagtaatgcagcctggaatgacagtacttaacacttagctgcttatgagaaattcagcatcaaaattgaaatgttttcctggtccacatgcagggtagtgattctagttctcatgataacattgtctgttatcatgtctgtgcgtggtggggggggggtgcttctgtctctgagctattgattctgatcattgattctttctttctccacccttggtgtgttcctttctctttacaggaaaaagtagaatatgccttcctgattatttttacagtggagacatttctgaagattatagcgtatggactgttgctgcatcctaatgcttacgttaggaatggatggaatttactggattttgttatagtaattgtagggtaagtccttggtttgggaaaaacgtttatctgggaatggaggtgagggctggatggtaaagggaacacaagccttcttgggggaggtggttattcttatgcccgtgatggcatcaggatctagcaggggttcttttaatgctgacagggctgctgtcaatccctgggcagaggcctgggtgaagagctctcatgattggtgtgcttggggaagtcagtgacaggctgttagaggaagtctcagccgctaatgagagatgattcacctcacagggcctcaagtctccacaaatagacctgcctggttggtgggtggagtcagtggtgaatgcagctcctaaaagctagcaccctgctagttaaaaccatgtgtatcatacgagagagcctttcttgctgtgcggtgcgctgctgtttaacatcccttgagcagagctattatgtttttatgctgagttgtgggagaaaccttggcatgccactttcccattttaaataacaaaacaagcgtctgaataatgtcacatatctggcataaaataaaataaactggaaaatgcagagaagcaggtgttcttttaataccctcttgtgagaggaagacgctggtagatttagttaaaggagtatgttacaatgaaaaatagaggtctgtgttgccccattccttccacaccctgagttgttgccagcagaggaaacacaaatcaggtctttggagcaaacatccaccaagggagacaagatgtagccctgttttgggactccttacctgggctgttctgtaagttacccctaaaattaggaatactctcttatttccatcaagagagctcttaaaagatgtatttgtttttactttatgtatgtgattatttcacctgcacatatgtctgggtacttcatgcatgtctagcctccatgggatccagcagagggtgtcagatccctcaaactggaataccatgattttgagtcactgtgagggtgcagggaatcaaacccaagtcctctgtcagagtagcaggtgctcttcactgctgagtcctctctccagtttggagagagcttttaaaaccatctctctgccttcctctttgtggctttattcagttgctgtttgcaggtaacttgcagcttggttatcttctggattatctgtatcctgattgcactggtttttcattggagatgactttttctgtctgtttggagagtagcttacgtttggtggggtgtccttttaccccggggaatgaaaataaggaaggcccaaagtggtggcccactggatggttatacttaccaggaagaaagctagcttttataaaacctcccattgtacattggcacctatgtgtgtattgcagaaataatgtatccaaaatgaataggtggcagataggcgttaaggcagaagcctcctcttgtttggaacacctgtcacgggctggcaaactggagccgcagatgtctctttgttctgggagagtcttgtgctttcctgccactggacttttattagactagagaatggagatacatagcttcacttcttatgtccccatgtcaccttagctttttctctgctggaacattttgcccaactagaacagcacaggaagagggaacagagccaatatggcagtcttaccaagtttaagagataaaactccaggagacctgagtaacacaaaatgggaagggagagaactagttgagaactggagagaggagagccctgcacctgggccttgaggtccacaggagtctcagctgaaactgagctgtagtccacgaggccaagcaaagaagtgttaggggaaagagaaagacagggtgcaggaactataagataaataataaccagtttcctaagactaaggggtgtttgtgatccaaatacccagagtaaatcactgtattgaacattgtggactgttaataaactgaagggctttttgtagtagagtcagcctagatctagactatggcttgggaaaccatgagcaggggatcaaatcctagctcatctggcctgccactgatttttataaataaagttttattgtaacatagctgcactcatttgttgtcatcattgaatggagaagtccactgtcttggccctttattgaaaaactgtgctatcccttctgtagaataaagactctttgaaaacagtgttttgagaatgagcctgaaggagagagaactgataaacaagtaacttaattacatgtaaaaatgaacaaacaaacaaaaaccaaaaaacccctaaacttttcaaaggaaaaataaaatctaaatacttagatgatcattctaagtacctcacctgcactgaggtaatactagatataagagggagtgtgacccctaaaaggaggaaattctatgactagaaatagacccagaagttacagagacaatgcaaggaacttcacaggcatctaaaaacagcaattacgaatttgttcgtggatgtaagggaacataagactatagtggagaaagatggaacaataaaaaagggacacatgagacttgaaggactggaaggtgtgtctgaaacgaaaacattccttagatttgctcactagtacatcaggcagtgctaaagagaaacacatcaggggatgtgaagatgtggcagtaaataaataattaaggaaatgaataccacctcacggacttgtgaattaccaaatgttctaaagtgtgcatttggaatattaggaaagaaagactggagagatggctcagcagttaagagcactatctgctcttgcagagaacctgggtttggttcccagaacccatgaggtagctcacaaccatctataattccaagatccaggggattcatgctcttctggtgtctgtggatacctacacacacatggtgcacataaaacacatacaagtgtgtacatatacacacccaaatataccagtaaatcttgttttgaaaggaggagagagaaaaagaaagcccctgaggaaatggttctaaatgttccaaataggatggaaaatgaactcagaagttcacgatgcctggcaaagcttgatcagaaaccacagagaaaggcctatcacaaccacagtcaaaagtgcttaaaaacaaaacaaacaaacaaacaaacaaaaacaaaactcatgtcaggcctttcaagagctgtacaagccagaagacaatagacacaccctcagaggcctggggaaatgtcagcttagagtctcaaccagtgaaattccttccaaacccaagtcaagatggaaactgttatagacaaagcaaagtggaggctttatgactgacagacttcttgcacctctaaaaatgcttaaagacagcttttcaggttgaaataaaaatgacaccagatagaaatgaagagccacccaaaagaaatgaggtattccagactggatggatttaacgatatttattttcattttaaaatctcttttaaggtaattatctttaaaaaacaataaaataacatcaataacattgtgacatgtctaccttacagtagcacagaggacagagagagcattgtaaggctgtcgtacaatgtacatacagaacctagaatgttaagatgctgtatgaaggtaggtcatgcacaagtaaaagtacagattataaaccctggcacccagacttgcaaactacccactctccactccagagcctagagatggctctacaggaagccatttctccacactagcaaagtattttgacacctattttggcaactaaagttgtattgaaacccagctatacttgtatgtgtagctgtttgatctacttgacatttaatgaccaagttgatttgttagcccagaggtccagcagtctgcaaatccgaaaccacttcctctctcccttcacagaaggctgctgttgacacttttcctactgagcaactgggaacaaggaactttagttgttgatatcaagacaacaaaggagagagacacaacaagaacaaaaatcaagttaggaaaaagtaaagaaaaaacaaagtaaacagaaaacaaataacaagatagaatgtttaactcagcagagccctaattaatccatgagtttatcagattatcagatgtaaaaaaacaaaacaaaaaaacaaaaacaaaaaaacctttccagtgtctctttaaccttctctaatgcaaaagcaagtaatttgtgaatcaaagcacagaaaaggcagctagaggggccatatcaataaccaacaaagtagacgttagaaaaaaggagctacccagcatgcaaagtgagagatttcaaaaccataaagggtattttccaagaagatataagaatccttgttgttcaaatgtctgataacagagcttcaaagtgcttgaatgaaacactctcagaactgaaggaggagtggaaggccatctttatagctgtgtaccccagttctcagtgctggagtatggctagcacctgtcgatgggggacctgaaaaattccagcagtcaccctgacctttccaaaggattccctatcaataagagcagcatacatattcttttcacatgcatatgaagtgttcatcaagagagttgatattctgggccataaaataaatcatagtgaatttaagactaaaatcatacagaatcgagttttctgaatgaacctgacaatgtttctggataaaaaatctctataaaagcatagaaatgtctatatattagccacaggcagttagaaaacaaaacatttaaatgttactatttacagtgtcaccaaagctatgaaatatttaggtatggatagcttgctgaaatggggaagtcttcacgggagcaatcaaagaagagctgaagaaagagtatgacaccatgctcatgggttggaagaattaatgaccttaggtttctacttcttcccaaatcaaggtatagattgaatcctaatctaaatattgtcaagcttttgaaaaattcacaagacttttctagcatctgtatggaaattagagagactctaagttggccaaagaaatctttaagaacaaagctggagcctgatcttatggcatgctctagtgttattggagttgagataatattgatcttaggagttgacataaagatcaatggaatcaaatagggccatctagaaatagacccatgtgcatgccaccaattgattttagaaaaagatgccatgatgattcaatggcatgaggaaactttccagcaaacagcgtggaaacaaccatttgtcagtgtgaaagactagccttacctcagactgtatgttaccttcatccagatcatagacttatttacaatttaaaactataacatttcatggggcaaatactgtatacagcctgtaggcaggcaaagctttctaaggcataggtgctgtcagtgaactccttaaaattcccatacaagtggaggaggctcagaagatgttcagtcaagatgtagtgagttcgaggccagcttgggacatgtgtgatcctatctcaaagaacaaagaggcagaaaacagcacctatcaaagagaccatgaaaagattaaactctatcaaaacttaaatcttttcttcaaaaattagtgtgaaaaaaaatgaaaaaagcatttcccatagggcaaagagtaaggaaggaaggaagtcagttagttcttggtctaaaatatatatatatttggcatgcatacagacaaaactattcaagaatagaatatactaaaggatgggcaaaataactgagtggatcttcattttaaaaaaatggctgtccaacaaaaccctcaacattgttagtaattaaagaaatggtaattaaaaccacagtaacagcactgtgcctaccgggactgctggttgtaaagagaacagatatatcaaatgggagccaccatatggggaaattgaaactctcataaacctcttctaaaactggaagtgataacaccccttagaaagattcttgaggattcttccagtttctgtctgcaccaggagctgttcctgtgccacagcattctatacccaaataccatagcagggagagagcaaatctcccaggagtgctgacaagcctgtgagcacacattagaccaccgcttctgttcagatagacccaccaggagccctcaggacacatgaaccaaggaactgccggggacaggatacttccagtttctgtatgtgccaagagctgatcctgtgactcagcgctccatacccaaataccaccgggggaaagctggtctcccatgagtgccaaaacaactgtgagcacaggtaagaccaccacttctgctcaaattcctgccacaagagggacccacccagagccatcagaacacaggaaccaaggaacagccagggacaggatccttctgatttctgtctgcactccagagctgaccctgtgccacagctctccgtacccaaatacctccctaagacaactgatctcccagaagtactgactcacaggcttgcaggagggacaaggcacagtcagagacagcaagaccagctaacaccgcagataaccagatggcgagaggcaagggcaagaacctaagcaacagaaactaaggctactttgaatcatcagaaaccagttcttctaccactgcaagccctggataccccaatacaccagaaaagcaagactctgatttaaaaccacatctcatgatgatgatagaggactgtaagaaggacataaataactcccttaaagaaatacaggagaatacaggtaaacagctagaagcccttaaagaggaaacacaaaaatcccttaaagaattacaggaaaacacaaccaaacaggtgaaagaattgaacaaaaccacccaggatctaaaaatggaactagaaacaataaagaaatcataaagggagacaaccctggaaatagaaaacctagaaaagagatcaggagtcatagatgcaagcatctccaacagaatgcaagaattagaagagagaatctcaggtgcagaagataccatagaaaacattggcacaacagtcaaagaaaatacaaaatgcaaaaagctcttaacccaaaacatccaggaaatccaggacacaatgagaagaccaaacctaaggataataggtatagaagagagtgaagattcccaacttaaagggacagtaaatatcttcaacaaaattatagaagaaaaattccctaacctaaagaaagagatgcccataaacatacaagaagcctacagaaatccaaatagattgaaccagaaaagaaattccttctgttgtataatagtcaaaacaccaaaggcacaaaacaaaagaaagaatattaaaagcagtaaggggaaaaggtcaagtaacagaggcagacctatcagaattagacttctcaccagagactatgaaagttagaagatcctggggagatgttatacagactctaagagaacacaaatgccagtccaggctactatacccagaaaaactctcaattactatagatagagaaaccaagacattccatgacaaaaccaaatttacacaatatctttccacaaatctagccctacaaaggataatagatggaaaatgctaacacaagaagtgaaactacagcctagaaaaagcaagaaagtaatctttcaacaaacccaaaagaagatagacacacaaacataaaaataacaggaagcaacaattactattccttgaaatttcttaacatcaatggactcaattccccaataaaaagacatagactaacagactgggtatgtaaacaggatccattattttgctgcatacaggaaaggcagtgtcaaagacagacactacctcagagtaaagggctggaaaacaattttccaagcaaatggtcccaagaaacaagctggagtagccattctaatatcgaataaaatcaacattcaaacaaaagttatcaaaaaggataaaaaaggacacttcatactcatcaaaggaaaaaaaaatctaccaagaagaactctcaattctgaacacctatacttccaaatgtaagggaacccacattcataaaagaaactttactcaaagcacacattgaacctcacatgataaaagtgagaaaattcaacaccccattctcatcaatggacagataatagaaacacaaactaaacagagacacattgaaaataacagaaattatggaccgaatggatttatcatatatctatagaacatttcatccttaaaacaaaagaatataccttcttctcagcacctcatggtaccttcttcaaaattgaccgtataattggccacaaagtatgcctcaacagatacaagaagattgaaataatcccatgcatcctatcagatcaccacagactaaggatggtcttcaataggaacaaaaacaacaaaaagcccacacacacatggaagctgaacaacaccacactcaatgataacttggtcaaggaagaaataaagaaattaaagactttttagaattcaatgaaaatgaaggcacaacatacctaaacttgtgggacacaatgaaagcagtgctaagagggaaactcatagctctgagtgcctccaaaaagaaactggagagagcatacactagcagcttatcagcacacctgaaagctctagaacaaaaagaagcaaatatacccaagaggagtagaaggtaggaaataatcaaactcagggctgaaatcaaccaagtagaaacaaaaagaactgtacaatgaatcagcaaaaccaggagctggttctttgagaaaataatcaagatagataaacctttacccagactaaccagaggtcacagagatagcatctaaattaacaaaataagaaatgaaagggagatacaacaacagaaactgaggaaattaaaaaaattatcagatcctactacaaaggcctatactcaataaaactggaaaatcaggatgaaatggacaactttctagacagataccaaacaccaaagttaaatcaggatcagataaaccatctaaacagtcccataacccctaaagaaatagaagcagtcattaaaagtctcccaaccaaaaaaaaaaaaaaaaagcccaggactagatgggtttagtgcaaaattctatcagaccttcaaagaagaccgaataccaatactcttcaaactatttcacaaaatagaaacagaaggaacactaccatgaagtcacacagttacactgcgtattctcccttgaagatggaatagtttctgtctaatcaggaacctgtcacaatttcctttcatagaggacttcttaagagatttttttttttacttctaccatatttaatgttccaaatagatttttaagactggttgagtgcatattacttttagcttcagaagacatcatgtatatttaagaggcatttaactattataaattattttgatgacttaaaacaatgtcaatattgagtttgtttattaaaaaaagaaattaaaaaaaaaaaagaaaagaaagattctttcccccctttccttccagtattataaactagttttctggtacttatccaaggaaaaacatatttctatagaaaaattttattcaaaatagaggaaaaatgaaaatagcttaaaaccacagagcaggtaaattgataaaaccatcatggcatgcttaatttaatattttatttaacaataaaagaaactaataaatgtaacaacttggatgaatctcaaaaaaatatgacaagcaaaataagaatatggtgtggtttatttatatagtctttagaataggaaaatacctatgtagatgaatagcctgcccatcagtagcagccacattcagggaaggaagctgcacaggggtcctagagacagcagactcatctgtcttgacagtggttgtttgttgaatttcctattgttgctgtaactcagctaatttaaacattaagcaggtgtgttttgcatttgtaaaataaactgcagtgaaggtggttgtaagattaaagtagcaaggtagggctagagccaatggtatttctgttagtacaaaaagaaaccctcacattttatttatcaaaaatattaacctacttcctaccaccataaaagaaacatatgaagtaaaacttttagtaaagtatagttgttcatggcaagagcagaagaaaaattataaaagaaaaagatcaattacaatgtctttctttgaatctaattcccactcactaaagtttccatctatgatctgtttttctgtccaatgagttttccattctgagtccatagtgacctgttacttttgtcaaaattcccactaataaaaaagacattaagagagttgcatgtagcccttaatgtggacacacaaggaccaaggggtcttctcttctcaagtcgcttcctttaaagaaaagctggtctggatcaatcctacccctacccctatgggttcttagtaaggagatattttaggcattcaagattgtcacttaagctttggtaaagaagaatatggcgtccccattctggttcacctggcttcggtcagttggatctgtccttttcttctcttggggtcaagttttattaacagcctaggatcttccattgctgcttccttctcctgtctatatctgttcaggcactgaggtacatggtgctattattattattattattattattattatgaggaggaggaggaggaggaggaagaagaagaagagaaggagtgagagagaaatagaacataggatttgagattcttaattaaattttcttgctttactgagaaggaaactgagacctagagaagggaggcttccagcccacaccaccttgaagtggtggctagtttctcttcctgtctcagtctctcttgtagtggcagagacattatgcacctgctttcaatgaccctgctaaaggatggggcgtgagatgactgtgatccacattgcagaaccagcaatgcttgagagccatcttcagtcaccgcctgcagaagttgctttcctaaccctctgggttgaaaattcctgtggcctccacgtttgcagagttcgaagtttttcctttttcctttatttctctgaagctgtgaacttggttttgaggggagagacttttagcattagctatgctgcaggagtttacagtcatttttagaagccgacataataagaaacctgccatagccttgatatgtctccctagtcagagctcaagctagcccttagtagctttgtaaaggtggagatgcggcctattccccgttctgggtcttgttcattgctgggctgttattaaaacaaaggagtatctataaatgccctggagtgacagagttgtgcccaatcaggcccacaatcagaccaccctgtgttttatggacctagtgtcttggtgacccagaggcctgtctaaggggggtgcagaatttctgctttggctgctaattaaactttagaaaccttttctttgttgctgagccaaccattcccacaatctgatcggcccaagttgatgctatttgcaatgggcaaatttatatttactctttaaaaaacgagcaaccattccaaagaataaatatttatttaaaaaaaaaaaaaagcaaaagtaactgtcaaatgggcagaccgtccgaaaatagcgttattcggaaaaccttccaagagacggaaaaaacttgtcatcgtggccagatactactttactcacatttcagaagagaaaatggtgatattaatgcctccccttaggtaactttcagcctctgcacactgcagctctttggcacctgtgactcacgttgttttgcacatacctcaaagagggtgcaggtgggggctgtctgcctgcactggagtgctgtggcacattaaggtgtggaactttgaagccatccatctatttccgaatcaggacgtttcttgtgaactttgtgtgtgtgtcaggaactgtaaactaaaacagatgaacagaatggatgaaaactccctgtcctaacagacccttcagcctcatcagccacaacacccggaagcaagtttcagctctgccactggtggcctggctgagcagctgagcctcgcccattagctttgctttcacaagcatgtaaaggtcttgatgatgcagtaggagagtgcttttgagaagatgggcacagtgacagatgtgaggtccttactacatggctcagactcacaagccatgaccataaatatcactgtcatgaaggtagtagcctctgcccctaggatcctcagagggtccctgcttctggacactttgttggcatgaacagaggggtctgagcagcctctgtctgaggtcctgtcaggtagcagggcaggctggggttccatagcccggttctcagcctttgcttagctttcttttatttagttagcagccacccagaattagcccttgttcaaaaataactactattattatcctgttttgcttacctgggtgacagactaacatttgtttctctcttcctctttcagattgtttagtgtaattctggaacaattaaccaaagaaacagaaggcgggaaccactctagtggcaaatcaggaggctttgatgtcaaagccctccgtgccttccgagtgttaagaccacttcgacttgtatcaggagtgcccagtaagcacattttgcctcctacccctagaagtactgcctttcccccgttgggtgggtcctgggatcaggaaagagtcctctgggggaagttgccctgttccccagtaggggcccagtagcagcaggccttctttgatgctggaatactgaagcttgcaccattcatgtggatctctgattccagagtacaggtggtgtttattgtcatctgcttttcagctgaagagaggctgggtggcagttggagacctgggcttctagcctcctgtttcctgtttagttctgtgctctgatgatatccagtggttttcttccttctcccgagcctgcctcaccttgtagtggtagctgattggaagagggagggctgttgaataggagcaacagggtggctagactttggctctacagctagtgatgacacttttctgagaagggatgtacgtgtcagtttccatatgtcagccagtgcctggccctgcttgcctccagagtctgacctctggtcaagttgactctcacctgggctgggaaggaaggagcttgcttaagaagcctgcctggcctttgcttcgtgagctctgcccttggtaaaactatcttttctggggccgtcagagtgtggacacccttgcgttgtgcttctgaacaggtaggtactcagtactcagagctggagcaaggatggaggaccactgggtacacccactttccacagctcataaagccctcagaacaccgactcttttcctcccagaatgtcctcatgaagttttattaaaccttaggcactcagaacgcaccaaacccctctggaaaagaaaatactacgtttccaaatttaacatttaaaatgtaggaagtggtgttttaagtgtacttatttttccagatggttcatttattttcattgaaaaagatcagcgcaagtcaaaaaccacagaactgtctggaagcaatcaagagaaacagaaatacgttggcagtggctggcgccattaagtgtaacacgatgaaatggggagcttactgagcaaatatgctccttcagattgagttgtcacagcttataatctaatttcaaagtaatcacgacagcctttcccctaaagagcaaatgacaggacacctgactgtggcgtgtgctgcgtgcagacatgtggcacgtgctgcgtgcagacctggagctgcagcttatgcgtgcatgagtggccctggccagtgaaaactcttggaactggcctggccttggcttccttgggctgaggaggtttccaaagaagggttagtactccgtaaaccctgcagaacagctttctgctctttcctcctccaagacacaaggctgtttgagatctgtggtggtcagagagagaaatggcgctctgactgtaagcccatcttttaggtgatcctgtcaaggaacgtgcaggcttggggagaaaggaattgaggcttttgaggcatgctgtttttagctgcagacttggtgatttttttcctccggcacctgaaatcattgaaaatatccaggaatgtttgtctatacttataaagcattgtcttctcattccctgaagattgaggctattctatatgggaatatatatatacatacatacatacatacacacacacacatatatatatatatatatatacacacacaaatatatatatatacatatatttatacatatacagaaatacatatatttctccccaagcctgcacgttccttgacaggatcacctaaaagatgggcttacggtcagagcgccatttctctctgtgaccaccacagatcgatcgatctatatatatatatatatatatatatatatatatatatatatatatatagagagagagagagagagagagagagagagagagagagagagagaatatcactaagggaaaaacaactgcattccaaatcatgtagaattattttttaaaagttactattttttttagtttcgtacacacacacacacacacacacacacacacatacttgtgtgtattcaggagcatgtgtgccatggcacacattgcaaaggttaggaacaacttgcagaagtcattttttccctttcatcatagaagctcccagggatcactcaggtcaggcttagtagaaaacttatttacttgcagagccatctccctagaacagggcagtggtggcacacgcctttcatttcagcactcaggaggcagaagcagaggcaggaagatctctgtgaatttgaggccagcctggtctacagagtgagttctaggacagctagggctatatgataagagtcctgtctagaaaaacaagagcaaaaccaattaatattatttaaaattgtgtgtgtgtgtgtgtgtgtgtgtgtgtgtgtgtgtatgatttgtggactttggtgaatctttggtggcttatattctattacctggtaaaagtttatcagagtctaagagcaccaggcatgggggtttacattcttaaacccagcactctgtaggcagagacaggtggatctctgtgacgttgaagctagactggtctgcagagcaagttccagggcagccagggctatatagcgagaccctgtctcaaacaaaagaaagaacaaaactggaattcatgaccataaaactaggcaagagcatggtagaacgtgtggctagctctcactgtctctcagaggagttcagaaaggccaatgaggaggtcacaacttttgggctctcataactgaaggggagccacacagggtctccttccccctgcatggcaccctttcctgcctccatggcacgcgtgctgagtatgtcccaaggagcatagtgtaatgagagcatgtgtgttcagtttgagatgaaacttgacattctctcataagtttggccaatctgaaatacagtaggtacactaaacatcaatatattcctgagaccagtggtttactgcagtagagtttaactcttaggtgatttggaaaggcccattcatgtctaaaagaagaaaaataaaaaagaaaatatcaaaatagtagccaagaaaccctgtctgtgtatatgggagccagtgctttcccctcacgctcgctgcctgcaacggacaaaaaccatgaaaaatcgtctcatcagtcttgttttcaagagaaaccatttggacatttaaagacacatttaaagaagtctagccacacagaagctgtagggagacagtgtcatgctggccaggaatcttgccaggcctccctgctgcctgccccctgcctcttcccactagtgctcaccaagggaggcatgcccctgtagctgtgggggtttctttcccttctcttggctcatcccagctgctgctttgttttaactctagtatctcagcattgtgtgtcccttctttctctgaataaatgtcgggaaagttaggggaagaaagacaaaggactctgaggccatgagaggtggggatggagcttggtactaaccactgagcctggaagccccggttccagtgcaggctctgggcgccctcctttccttctattctaattcctcactgttctatgtgtctgcacctgccccacggtggctctgagtccctcgtgtctcaagatcacattttagctacaggacacctgcattctaatattacactgagcatccaaacccaaccttcctaagtcactcagccttctgctgcccctgcttgccgcctccatcctagagggaccgcctttagaaacacggagggatttttcttttggggtctgatgggggacagctgtaatttgtccctgaccctgggcaagatcactcaccctttcctaaggtactttcccttcatcccttcttgcagttgaagttgggtcccaggcttctctgaattccagcctctctagagcctcacctcttcccagtcctttgtccatgtttcacaatgattgctgtccacttgctttctctgaggcactttccctaatagactcaggtctgactccagacccaaattcaaacccagaactacatggatgtgaccttctctttgtaggtggcctttgtgactagctgtgatgaggctcaccaccaccccagctcacactgtgcactgcttctgtgatggttctctgcccaggtcttcctgtggtagtctgtctttaggctcagaggaatgggaaactacattcggtcctctgtccttatcctgtactgagacagtgttttcaatcctctttaattttctgttcgctgttgctcagagtgctagcatactacctgagagtaacatggtaaactctcatgttcccttctagactgtaacctctttgagagtgtccctttgtataattcatctttgtattgctcaaggcactaaaccccatgctttgcatgtagtaaatattcaggtgtgttttgttaaatggatacagaaattagtgcatatgtgaatgcatgattttaatgctgtctacacctctctgggtcttggtttttctatctgtctagtgaaggagttggactaaatgatatttaggagtccgtccttagatcatttcctattgagggttagtattaattaacagctttgaaatagctctaaattttattactgtatgtcataaacagagcaagcatcattaggaattatatttatggctcctttgaagtgtcattttaactcacaagtggatttttttttctctcctaggtttacaagttgttctgaactccattataaaagccatggtccccctccttcacatagcccttttggtattatttgtaattatcatctatgctattataggattggaactttttattggaaaaatgcacaaaacatgtttttttgctgactcaggtgagtagtgacagttttgtgctttgttctggaggaggtgttggtcccctgagcccttccctaccatcgatttcctcttcctgtgtgaattatgttgaggatggcttattctgattttccattccgatttcctatgggaaagtatactagccaataagacgggggccctgtacaaggnnnnnnnnnnnnnnnnnnnnnnnnnnnnnnnnnnnnnnnnnnnnnnnnnnnnnnnnnnnnnnnnnnnnnnnnnnnnnnnnnnnnnnnnnnnnnnnnnnnnnnnnnnnnnnnnnnnnnnnnnnnnnnnnnnnnnnnnnnnnnnnnnnnnnnnnnnnnnnnnnnnnnnnnnnnnnnnnnnnnnnnnnnnnnnnnnnnnnnnnnnnnnnnnnnnnnnnnnnnnnnnnnnnnnnnnnnnnnnnnnnnnnnnnnnnnnnnnnnnnnnnnnnnnnnnnnnnnnnnnnnnnnnnnnnnnnnnnnnnnnnnnnnnnnnnnnnnnnnnnnnnnnnnnnnnnnnnnnnnnnnnnnnnnnnnnnnnnnnnnnnnnnnnnnnnnnnnnnnnnnnnnnnnnnnnnnnnnnnnnnnnnnnnnnnnnnnnnnnnnnnnnnnnnnnnnnnnnnnnnnnnnnnnnnnnnnnnnnnnnnnnnnnnnnnnnnnnnnnnnnnnnnnnnnnnnnnnnnnnnnnnnnnnnnnnnnnnnnnnnnnnnnnnnnnnnnnnnnnnnnnnnnnnnnnnnnnnnnnnnnnnnnnnnnnnnnnnnnnnnnnnnnnnnnnnnnnnnnnnnnnnnnnnnnnnnnnnnnnnnnnnnnnnnnnnnnnnnnnnnnnnnnnnnnnnnnnnnnnnnnnnnnnnnnnnnnnnnnnnnnnnnnnnnnnnnnnnnnnnnnnnnnnnnnnnnnnnnnnnnnnnnnnnnnnnnnnnnnnnnnnnnnnnnnnnnnnnnnnnnnnnnnnnnnnnnnnnnnnnnnnnnnnnnnnnnnnnnnnnnnnnnnnnnnnnnnnnnnnnnnnnnnnnnnnnnnnnnnnnnnnnnnnnnnnnnnnnnnnnnnnnnnnnnnnnnnnnnnnnnnnnnnnnnnnnnnnnnnnnnnnnnnnnnnnnnnnnnnnnnnnnnccctcgttttaggcagccaaagagctcagcagagatggcagaaagccaaaaggccagggctggttgagcctccagcacgtggataacgtctggtgactagggtaggattcccttcatccctggcaaagccagacgggtttgctgtaaacaaagtacagcagccacccccctccccatgactttgtttataggtagaatttttttttttaaagcccacagaagtctcgacatcgaatcatttttatcccatagtaggagtttctgggaaatacaactagcatgtagattttgagcccaacttccagtggatcaaaccagtatccttacagagaattatttagcacagtggttctcaccctgtgggtcatgacccctttaggaactcagatgtcttcattatgattcgtaacatgagcaaaattacagttatgaagtagtaatgaaaataactttatagctgggggtcagcacaacatgagggactatgttcaagggtcgcagcattagcaaggttgagagccactggtttaaaggaaaccaatagcagttcttgagtaggcagcttctaggtaaaaggcttagaatggagacagagcttttgatagtttctaaatcctaaaggtgatgtctttggtgggggagttgggtttttttttttttttaatcactctctaccttcagagactgcaccaagccctgggtcttgcttcccttcactggtgaacactatgcttgtgagattgtgcgtgttcctgtccagccggccctccatatctacagaacctgcatccatgggtttaatcaacagttgactgaaccaaatgcagattgaaaataattcacacacacacacacacacacacacaaagtcatctgcattgaacatgtttggacttgttttgtaataattccctaaatgatacagtagaatgatgttaggaatgacaagtagtacagagacgacgtaaagtacatgtggatatgtggatccacgtcatgtgcagatattgcactgcttcatctaagggacctgagcagctttggctgtggctggtccccgcagatactgagggtcggctgcctatcctgataagtgaagaatgagcatcaccaacatgctgtagcttgtttgtccttcatccctatttctgattgttataggatcgtgtgtgatatgtgtggtgtgtgtgtgtgtgtgtgtgtgtgtgtgtgtgtgtgtggtgtttgtgtgatatgtgtgtgtgtggtgtttgtatgnnnnnnnnnnnnnnnnnnnntgtggtgtgtgtggtatgtgtgtgtggggtgtgtgtatgcacgcacgcgcatctgtggacactaatgttaattatagccacaaacaatcccttctcctggagaaggatgggtatcatcaggcatgcagctcccagcttgggtggagtgtccatttcacttgtgtctcctaagtcacagctcctgagccgagcagagcctccatttcagtcccccctcggaatggctgataactagagcatatcgtccacaaaagcccaaactctgcttttccctccctcaaacagtagggcagttttttcttgttttaaaacaagtgaactctgtgacttcctcagctctgtcttctccctatcgtcacggtgaactgccgcactctgatcccacatccttgacggatagacgattccctactttatcttacatttttgcacattgattttctcacaataatcttcctgttgtcgtgcagagacaatttcaggactgtgtggctacagaagagaaaacttcatgcactcagaaagaccagcttccacgtgcttttctgagaatgtttcagtgtcacccatgataatgaaatgctctactgttgccacgaccataacatagttaataatttagcacttgaattacatcctctatgaattgcataacacctctattatgatggagggtgcatgtaattcctcaacattacgctagtctctagtctctatcccttcatagatctgagatttgagatggagacagggatgtatgaagatgctgtgagcatcctcggggccctccagcaagtgtctctcgtccttgattggaggcaggcatatgtgaactttttaatgaagcttaacagtaaatgtgtttggccttgcagggatgtgatccccattccagccatcagttctgctcttgagcctggagccagccatggaggaagtgtaactggatgcttatggctctgtcttggctggatttcctttatggatcctgaactctgaattccctatggctttcatacatcataaagtgcttgcctttttaccttctcccaccccacaaccacctaaaaacatgaagcccatttttagcttttgagaatcatgtaaaagaaaaacagattgttcttcaaggtagctgagggactgctgtcatagacagtctcctaattattctctgacctgccagtagttaatggatccttgtacaacactagggggcagctgggcaacgccttccagagtgttctctaagaccttatggtatgaagcacgttgggatgggttttaatcaccgttgactacatttattagctcatcatagaaccaggcaggagccaaggagctaagctcttccagtattttatgggccacagtcagctggaagccactgtgctctaggacagaacatctcggcccagcacagagcctggcctggagcaggcgctcaacagatactcaccactagtgtccctcttcaacctgaccgagccttttgcctcgtcggtgtggataggctgtgtcagaggattttgatccactctcctgggacagaaaggagattcagttgtaaatatcaattgcaaacaaatttctcagtgtttaggtttttgtatacggtagacaaagtctttgcctctagacaagtttatatttagccagcattctcccaaaatgcctaggctgtaattctcaagtctctctggcaaatgtctggcagggtcttggaaagggatgtgcacaaaggcgcacctggagccgagctatttggagacgtggcaagttgggatcatgggcttggtggggaaatgtattgcagatttttcatcaagtgagcttcccaaacacatttaaagtgatgtttgcctcacacggatgccttgcccatggagatggcagtgctgtgcagagaaagagctggacaaggcaggttcttgggtcccctgggccttcatgcccttggctacaatatgcacagttagagggtcttttttccttcaacttagagggttttgtttgtttgtttgcttgtttgttttagaggagatgttttgaatgtaggaagttaatggcaaagggttggttttaggagagtgctgtttatctgagtggcaccctgtgttagcacccaactttttcttcagatgtacacagggctatgagcgtgcaggccgaccttagtctgaagtacttgtcatcacctgacagctcctctcagtcaaagcacctgggagggacattcttctgtgcccccacagccaaggctttccttccccacgggccatgctctgaggcactctagcagtttcccagggttaggaaagcaaaaggccttatgctttcccttgacctgagacatacatgggcacttagtcccttaaaataagagaaaattgaagtaacctaaattgtcttgggtgccaagtggccctctatgatgagacttaaaaaaaaaaaaagaatctaaatcgaaatgctttctctcgggctggtgcctccatcgttgtgaagagcatgcacacaaagccctgggcagagaatgtatgtttgatgtgggtatggggatcagcctagtaactgtgaggatgacctatgtgtatgcatagctttaaggactcagccttctgcttgctgtgcagggagaaagactggccctgagcacttaagttgcatctcttcgggcaaagagaagagatgctccagccagttgtgcttagctcccgcctcccctcagtcctctccagctgcccttctgggtggcagtgatttgagaatgtgcaagtccacagagcaccccgtcctaagaaattcaaataagatgttccctctgcagtggaacatacagctcttatcagagccctactctgaaacttgccaaggcctgagaagggcagatgagacagatggccaagccagcagactttgccagtctcaagagtaaggtgtctaatgggagccccgcactagggcactctctcctctgccacgtatacacccggctccagtggaggttagacatctctgtcacaggtattgatttaaggccaccgctctggccaccacaccaagcagcctgtttcttccctacatgtggattttgagatgggtttggcagtgtcgctgctctggaagactcgccctctgccttcctgctgaaattggcttatccaacttaattagatcaaccattggagctgtggccccggctcattcattcctccaattgctgatgtgaagatggagagggttctgttaagcacgtcagttttcatgtggccaaacaggtgttccgtaagggaggcaatgccctctggagagttcagcaacagatgttaggtctttttgtgtgtgtgtgtgtgtgtgttcccttttcctgtttggcttcagcatgaggcaaatattgtgaaatgcatgagcctttctgtaaagctaaaagctggaagcagaaaacgtgcaaaaaggcacagggcttaaaaccctgagggtttgcacctgctagacaagagcgatgggcttaccctgcagacccttgtctaactgaaaatccaggctactcctgcagaggagagaattttcctggagaagatctatgctgttacctggttggtccttaacacccccttcctccttaaggaagtgtttaatattcagttcatcccactgaacgctgacctgggctactggaaagtcccatccagctacgatccataaagcacttgtgtgcaggctgctcactcccagccattccccagggaagtctgacgaggacaccatgtctgaatgagcagttgagtcaggtgctcctctggctcggtcctgcttttttgaacagcttccaggtcagagttggagttcttttaatgggtacagctgagacaaacaaacaaacaaaacaacaattcccaatgttatccctgagcacatgtcagctagtggccttgggaacattttcttgcttttttagttgtactaagtattcattcatttattccatttttatctagtttgctggctgcagataatccaaacctacagaaggctaggctcccttgggtagatagttaggatgattatctccaaacagatggtgattattttagatttatttattttgagagtgagtctcactgtgtacctggctggcctgaattcggtgtagactaggctagccatgctggatcaaaggtgtgtgccaccatgtcaagctagtttttttggctttgttttgaagagcttatagagtcaaatgttgtaggttaggacttttccaccaagttttaaaaagcagttaggactgactgggacagagcatcagctcagaatcagagaagcaactggctccatcttctactgaggcttgccctggaaactgctcaccagtacagtggcctgagccagagccagatctcctttccctacctgggaccaggatttgctgtttggcctgaagcctctatgagtcttagtgtgtgtatgtgcaggcatgcttgtgtgcttgtgtgtatgtgtgtgcaggcatgcttgtatgactctgtgtgtgtgtgcctgtgtgtgtttggaatgcgtaatgaatgtctgctggctgctcttgtctccatctaagtaaatgtttaatccaatgtatagactgttctctctaatgtgaccctctcctcactggattcccctattaacccactcctatgagcccatcttatttcttacagatgaatgatgctatgggatttgaattgccctgggtgtattttgtcagtctcgtcatctttgggtcatttttcgtactaaatcttgtacttggtgtattgagcgggtaagctacatctctttcatcttgaaggcagagtcctgagatcagttgccaagaccacgcaggcttagagggaccggtgggtgggtaccagttccttcgtattgctttctcttctgctgaggcttccggaaccaagctgtttcctggaacctcaccagctactatgaaagaaagccactgagagattattgaccaggaattaattaatcagtattgttgcttgggatttaaatttcccttgcttggccttttgtctgtcctaaaatgagatacatttataattgctttcttggtctaaatccaaatacaatgctcattaattggcacaaaactgctgctaaatgagtggtctggactgactttggagagtctcttcctgaagatttcagcatcagggtttgccccgcctagaggaaaactgagcaagggtacaagctcattcaagccctttccttggagcgctgccctccacccaaagctctgcgtggtcctgcagctgcatccggggctctgttctttagtaaatggataactgataactgatctccttaccttttacaggttaatgatgcgataggatgggaatggccatgggtgtattttgttagtctgatcatccttggctcatttttcgtccttaacctggttcttggtgtccttagtgggtaagcagttggatccccgttgcacattattctcctgataccacatgggaggcagccctgcgtgtctctcagctgctccctggtggcctctctgcatgcctttggactctgatgtcccctctgtgtgttgcttttagattgaattgtgattctttctggctgtatctgtctgtgagattccgtgtttctgatgcttgccacgcactgttaacttaatgaaaatgtttcccttagaggtgaattacaagcaaataaaaggcttcctagcttaggtctcctccaggaagggagtttggtctcttgtgggttttattccattagtacatgacctggccctcattagtcactctcagagcattataaatagtggtgtttcagattttgtggtgaagcctagattggtacatgaatacccagcagtttcaagccctgccttcctgaggttgggatactgtattagcctggcttgtcactgtgtgagctatgcttccgattccacgttcagcttttccacacatgttctctatggccttattattccatcatttggtcaccagtttgaaaattcatcttgtttaatgcctatttctgggtataccctccgtctatcaggttcaggagagatgggattgggaagggccttgggccttgggctgtgccctacagtgatgggagatggtattctaaagcccgtgtgttgtgagcagatgtgaatctcagaacctctggcgtgctgcagaaagtggaggatccccatcagagtaggctggggctctctcaaaagcacttccataaatgggggcttaaacctgaaaaacactgtgggtctctcatcattagtctgtgatgttgtcttataactaggataaaatatttagttaaaaattgtattctattttaaatgaggttactaaaatgtcttgtcttaagaattcaatatgtaatgtttataatcggtacaattttaaaaattatggaataataatatagtcaacttttaactcaaaactaaagcaacacaacacatacacacagtcagtaccagcatacagtcactgctctgaatagcccagaagacacccatgcgccctcactttggccctagtcaccgcactgagactagacactcaggatatcacactgatggacttggtcccaagggaacttatcagctcactcgatttatcttgctctttccgaggttgtatctcagggacacgatgtcttcatgtatcctgggtcagtaaagtgagcttcatctcattttgtggagacgctgtcttttgcagagcagaatgcagagcctagccatccaccgtgagccccctgttcgccttcctccaaacctgccttgctgtgaattgagtgcagtcagccgtattccatgggacacacagtcatgaaagacccttatctagaagtggcccaggagcagtgcctgcctccctccctccagtgagagaagcagggagtgggcctctgtggcctgaatttagggtcaggatggttagagtggcagttatagttggagaaacttggccacaggaactacccatacaaggccagcacccgcaactgtgttgtgagttccttggcgccccatgtctccttaacccaactaaactgacggaggccatggaaaccactaattttaacagtgccagtgacgtgccttatcaccagttccccctccctgggcaggaactgttgcctccggcatgatgaagcagagatataagccagccaaatcctgaggcatttaaaaaagcagaagatgggggcagaagttcattataatgacagggcctcaatgtgaaacctaggaggaggacccctaagccagagggttaaaaaagcacagattctcacctagcagtttactgaaatatatcttgagaggaaataacgagtttttgaaaggcatttatttttacatcaaaagaaaactatgaaggagaaaccaaatggtacctgaatgttaaaaaagcaaacctaggacttgctggtgattttaactgtcagctcatgctgggccctgactcctcagaggtgcacactcctctcctccctcccacccccaagccacactggtaagaaatgctaaggcaggctccgggtagagtcagagctggatctgcaaaggtcttcgaccatgattctcccagttcctgatgaaggcttggctctgggccagaggccagggatgccaaggtggctaaggcacagactctaggctcaggcccaggttacagctggagctatacagccagtgcacagcgagtagagttgggggctctcaagggagactgcctgggcctgcagggcatgctctgcctctcagggttccctgcacctctcccactgcctgggtccttgtgcctccattcacagtttttgctgttattattaaagcaaacttaaaatcattactgtaatcttaagttcttcacaatattcatttttagagaacattagagatgttctaaatctaggacacaaagtgtcagaagacatttctgtggcatagcccttaagggactttcagactaacaggtacggtctccaagcatcctatcgtagggacttcagccaaaaccttgtgcattattaccttcaaatgaggactcactcagaaacagtgactgagacttgtgtctgagactgagcccttttcttatctctctctctctctctctgtgtgtgtgtgtgtgtgtgtgtgtgtgtgtgtgtgtgtgatagcctctcgctgctcagtctaacctgacatcaggacggtagctatcttcctgtcttagcctcaagagtgctagggtgatgaacatacaccactgtgtctggatgttaaccctttttaaacattggcttacacttcttcatttaagtatggctgtggcatcctgttgtattgtaatctacacagttattttggccttcgcacatttttaaggcatttgcaggctgagtctctgaaaatgctgtctgttttgttttgtttcctcctcaaggtgagactgaagctcatgaattgcatgctctgtgagcatgggtgtagatgacagcacctctgctcacggcgctctgtgggaagagctgcgacagacagctggtagctggtgctatggtttaacatttgattgtccttgctgatccctggtgatcctatgatggacaaagagctaaaaagactgcttcctttaggtctgaggtctaggtagctgatgcatgtcttgtcttctcatttgggtgttttaaaaatgtgggagccgttcgtttttaaagctgctcttttaaatcctggcactctcaaggtttgcctctgtgtataggcacataggagagcagtgcttatgtgtgttactatagggttctccaggggacagtagtcctcacgggtgggaacctgattctctacttcaggacccacctgccatctgccgcagctctgtgatgctgaggtttgagtggtcaagggagacctcccgggctcctgaagtcccaaggacgccctgacctggcccttccagcatcccaagttcacagtggtctcagtaatgctcatctttagtctcttcttccctaaacagatataaccttgtcttgttcccagcctcacagggtggcttgaaatcagccagtgaatgtagagctacgtggagaactattctaaggcattttgtcatctagtacattctctttttttggtttttcgagacagggtttctctgtgtagccctggctgtactggaactcactttgtagaccaggctgacctctaactcagaaatcctcctgcctctgcctccggagtgctgggattaaaggcgtgcaccaccaccacccagccatctagtacattcttaccttcaacctacagaccacactctactctcagccctccctggtgaagcgggacagtccatgggggctctgtggaaatctcaagaggagaaatttctgcatattttaggaagcaacttaagcagacatttgttatgcatacatacactatgcttgatgccaccaggagatggccatgggacatattgttctttgtcagttgtggaatattttgtctgtagactaaaatcattgcttttgcgttagacatagtgagggctctcttctcttttgtgacagtggcagggcgtgacgctcaagcatggcagctcaaacaaccgcagtgtgaatctgctctgcctttaccatctgtgtgactgggccaaggccacctctttgagatgactttcctcaggggtgtgtctgcctgtggaacctcatggagtccggggagccttcagagagctacagaatgtagacccttaagggagactgtcagaaaggttctagggagaatagatcagtgatctggaacaaagcagactggcctttctaagccagtgaatagcaattggccaagataggtttagactagtgagaaatcaaagctctacaatatgttgaaatggcttattatgtaagcatgtgaataatagaagccagttgtgtctaaaatgcattgctacatgggctccctcctgggcctgcttgatggaatagggtaaagtcatttgacattggtctgggaacgcaaggcttttgctaacatcttccaaaaaaatatttaaaatagctcgtctgaagcgagctttgtctgtttccaggcaataaacgttcttcataagccccctttcaggacataaaaccaaatgtaaactgagccaatgtgtctgtggtttcaaaaccagtcggctctgaattaattttgtgtttatgtgtctgtgcgtcctggtaagcctcaaatctaccaagtcacaaacttcttttaaactcactcactgagttttctactcttacgggcctgtattagtttcgtctcggtttgctgtgacaaaatacatggtagaggcgccattaacgaggaaagtttgcctaggctcgtggttttaggggatacagtccgtggtgatggggaaggtttgtcagtgaccatgaggcactctcattgcaactgtgtcaggaagcagaaagattcgaacgctgcactcagcttgcctttcccttttgtacccagtctgtgacccgagctcacacacagggtggcgtgaccttcattcaggatggatcttttctcctcagttaaacttttctgggaaaactgtcacagagttatgcctttggagcaatccaagtccagtcaagttgacaatggagattgaccatcaaccgggcccctttatcttaacttgaagagtttgggggcaaacagggtaaagcaaagcattgtattaaaaaaaaaaaaaaagcagaggcaattttcaaaacaatttgtctttctgaaacttacttcctagactccattctgaagacataaaacaccagacccagacagagatgaagcatggctgcttttgtgaagcctcagcttccgaaataaagatggatggttacagagaaagtggggcgggaaggtggtaacgtccctggagagacttaagaccacactttgtcagaattttgcagaatagagtcaggcttacagcatggggagtcggtccttggtccagttatagtcatggcattatgagctaggaaatctctgctgccttcttggatactggtttatggggcaaaacaccacattttcgggtattttctaagtgaagacatatgccatgggaatagtcattctacatgtttcatgatagtttaaatcttactaccaaaacctattgataaatagtgaacagcaggatttctacattcctgtatctacacctctgacatatctgcatcatagaaaagcagtcagtttgcagagttaagagggatagcacccaggtcctgagctgccatcagcccatcttggaaaacagaaatataatgtgctgaggtaatgagaacccatggcttgaacaacaaaacccttttggcaaatggaagtctagccttttccaggaatggtagcttacacctttaatatcagcactcaggaggcagaggtaggcagatctccgtaagggttcaagaccaacttggtctacgtagtgtgttaacatggcaaacagggctacatagagagagcttgcctgagagaagaggatggtggagagctccttacagaaccctcttacacttaggtgttttcttctgtatggaattactctctgagctcccagaatctcagagacacctctgagggtcactttaagcaaaagactccaaaatattgcataatttcactcgagttgaatgaggctgtctggaaagcctgtcctcataactgggtgtccttcttggactttggggtcatgttatgagtggaattgatgctgaggttggggtactgaaaagagccacagtcctctagggatgctctttggtttagctttggtaaagtatgaaattaagccccaatctgactttaaagagaaaaatacccaatttctcttttctaataaagaaccaagctaaacatgcatatatatctactctggacattaagctttcttgttgcgtagctgacagagaaaccccaagagctgcacgtaccaaagtcccagaagtgcgcaggctggtagccacacctgacatcaacaagtaagcgtgacctctctgctgctggctggcagctgctgtttccatagaaatggctgttggatcagtggaaacgaggtaagagaaagttttcgctgatgcttgttccttcaagctgacgcttgtttccttggcaacagcagtggacagcagccaggctctagaaacagattcagtagagcactcacttgtcagctgtggctatcatctgctcctgaccacactgtctttgatagcactgagcagaggcctctgaggacctggcaggctccgctggcctcatgtgccctcctgggcatccatcttgcccgtggcaaactgtgtccaaagcagaccgtcagcaatctcctccccacctgtgctcatcttgttacgcagctcagaaggcagaaggttgtcgagggcaatgatactgcagaggcgaccgtggagtgtgttggtctcaagtcctaggggagtagaattcattacagtgattttatgcacagactcagctcttctcaaagctggtgataccttaatagttgaaattaaagccataattttcatgcgttcctcatcctgctggtggccatcactgttgcctacaatgaaaagaatgtttatgagtttaataactcgacttcttgtaagaaacatattaatgacagtctctaagatgttactgccatcttctgccagatcctttccttctgctcagtgttcttatataggctagtaagattgcttccatgcctcaggtatcggctctgtagggcagcttggtatctatacaaagatagcatgtctaccatatgtgcaacttcttgttacagttcagtacctgcttcttcttggggttttgattttatttcggcaccttgcccgtgtgagacagcgtgcgtagggcccagcacacaaggcagaacgttgagagggtctgggtaagttatttgccctaaacgcctcaaagacacattttcgttaagaggattctttttctgaagaagaagggggttgggaggagggaagccatgcaaatcatagctgtctctttgagaaacagctgagatatgaacctgcggtgctggcagaatgtgggtttgggcatccagatgaactatgggaagctatgtactgtctcccttttctttagttttctggaacacggtgactttgtctggaggcagtgctgagcgactgactgacccgtaaaaagtctgtgccatctagttaggttcaaacaacagacaagacaaagtagtgtcttattcgactcctcttaattctctccccttctctcctatttaaaaaagaatggcttttcctttatctgatgagtaatgtttgagtgcccacacagaggagctgtatttacccagtgccacactagccaccgtggttactgtaacgagttcagagcagagacctgggcatggtaacatgggcctgcaattctagcacagggacataggcatgggagtcatgagttcaagaccaccctgagctatgtagaaaggtgatttttttttgtcattatgaaacatgcttaatcaagaaggtaaacttatggtgaaaaacctttacaaatgctctgagaataggagaggccatgtggtggcacagctatggtggaggtgtgtggcagtgtcccggggcactgaaggctgaagaaacatctgccatagacaggcatagtgcagagacagaaggcactgagcttctatcagggccggaccatgggaagaagcagaagacattggagaaactaaacaaagctgggaaggcagagactgaggacctgagggctctgggaggcagggacaaagggggagaactggctaacagagctgagatctcctgggtccttgtagagcctgtggtaagctttgatcatggctgaagagtagagaaatcacacacacacacacaaaaaaaaaaaggtcaagaattggtgtgatttaaaatttaattttataaaaattataatattcacatgtcttcagattacctttaaaaatgttccaggagtgagattgtattgttagtcatctagagagatgcatagagagatgataatggagatttagcagatgttatttgtggaatccagctggtaggcatattggtggcattcattctataatccattatgcttttatgagtatttgaattttctcttagtttaatgctggaaaatctgtatataaaagtcaccgtagctgcagtgatttgagtggacttagtataaagggagtatatagaaagccaacctaaggctgctgtgagtaccaatggtaccagcttggatatttcactataaagaagtatgaaatagcacgaaaaaaaacaatgtgactgttttcagaatatggacgtgggcttcgcagtgttgggactcatagctccagaagttcctgttttattgcctggaaatgctcttagaattgttgtggagggcagcaaaaactcagcagagaatgtcagtccatttgtgggggactcaaagagtggttcagggatgataagacatctgtagggcagaatggaggggagacatcgtcagagaaagggctccagaaatctaaataaagaaatctaaatctgacatcttgggccatgtgcatagctaattacatgctgtatcatactcaccaaagcctggcagaaaacagctactggagagcccagtgctgggctcagactgtagtgggtaagccttaaagactgtgtgtgggatttgaagtgagactttaggaaaggtaggcattagcaggaagccacattcactataaaaacaaactcccaaaggatcagaccaaatgcctaatacattagacttccaaaacaaaaaaacaatactcattaatgccaaagtgcagccattggcccaaatatttcatctcatgatcaaaacactgagaaaaggagcaatgaaacagcctcagtgggtggggacgcacgtcaagaggtgacaggagcgttgtactaggtgatcgggcttgaactgctttaacgctgttcaagaaattaaaggaaaggatttgcacagcacaaagagaagatagaaagctagtgtgtattaccatgggagtaaggccgtgtccaaaaactggttggaaagcaaaggggagaagttgagtgaaggtttacagatatacaggttagtaaaaggcaagctaatgaatgtaaagttggagtcacagagaaaaatagatgaggaaggaaaaaaaataaataaatgcaaataaataaaacaagtttaataaatggaagaaaaaaccacaatcctaggtgcatcaaaggcagatagccaaaagttaaggataatatgttaaaggaaattaaatggggagaattgaccccaatgatgtcctttggcctccacactcatgtatacacacaaccaacatacacacacacatacttaggtgggtgaagtacaatacattctacaatacgatagaattcattggcttggattttggacatagtaaaaagaagccacagtccaatggactctgatttttttgaagaactgaaagaatttgggggcatagctcagcactagagtgtttgcctgatataagaaaggcccaaggttcaaaccccagttctgaaaaagatgaggaaaaatggttaaggagctgaaggaaactctctggagcacaaatatctcctcaaaaaggtgaaatgacataggacagcagtgcatgcctttaatcccagcactctggaagcagaggcaggtgaatctctgtgggttcaaggccagcctggtctacacagtgaattccaggacagcctgggctacacagagaaaccctgtctcaaaacaaaacaaaataaaacaaaaacaaaattttaaaaatctgggtttttttttttttaaagttaagtgacacaaagaagatttcaaataaaagccaagaaaattgatcaacaaatctacactataagaaatggtaaacgaaactcttcatgctaaaagaaaaataattttaggtagaaacaaatacatattttagaaataagcaccaaaaaaaccccacaaatgtaaagatcgaggtgctccccccacacttctaaatttcttgaaatgatgtcatttaatttaaaaagtagtgtcaagcttccacagagagtgtcatgggcttatagggacccacagcagggacagggaaggttgggatggactaaggggagccttcctgttgtaaagtccttaaaataggtttgccatgctaatgtaaggatgcatgacaaccttaatattttaaaaatgaaacacaataatgccacaaaccataaagagattaaacaggatcagtgccccagaataagtcaggagagcaggaagggcagatgaagcacgtgcagtatagaaaaataaatatataaagcgcacagcacttggtgtggtggctcatgcttgatgttctgacattggaaggctgaggcaagcagattataagttcaaggccagcctgagctatatagtaagaattcaacgcaagaaaaacaatagaacaggtaaaatagcaagatggcagacagctgtaagcttcatcaaggactgaattcactgaaagtgactgtgccagtttaattaggcagaaattgttatactggataaaaatgcaaggtgacataaaatttgacacagactccaaacgaaggaacatggttaatattaaatgtcacccccccccccaaaatggacttcaagaagcagttttagaaatagggtagagagaggtggggcagagaggcacatgcagagaggagaggcaaatggaagcagagagagagagagagagagagagagagagagagagagagagagagagagatcctgcagtaaccagggctatttcatcaagatgcagcgactctgcatgcttgttgctagtaacagatacaatgtgcttaaagccagacctgtccaaattaagtaaaacactggtgagcccacacacgtagatggaaatgtttgtgatgtcttgtcagtaattgacagagtaaggagattaagaaaaaacagcaagtatccagagtatagctaggttaatagctatcaaataactgcctgattgactttatcagaacaccgtgtactgttcttttcaagagcaaacagaacagccacatcatgactattaaaaaaaaaatcattgagtctcaaagcagagctggagggatggctctgtggttaagagtattgggtgctcttccggaggacctgggttcaattcccagcatgatagctcataactgtctgcaccccagttccaggggatctaacaccctcttccgatctccatggcaccagtaatgcatatggtgctcagacatgcatgtaggcaaaacactcatacatgtaaagtaagatttaaaacaactctgaaggtggactctctgtggtggtttgaataggtttggcccctatagactcatgggtttgaatgcttggcccacagggaatgccactattaggaattaaagtcctgttggaataagtgtggccttgttggaggaagtctgtcactgtggggtgggcttcttattgctcaagctctgcctagtatggaggcagcctacagaagacagtctcctcctggctgccttgggatcaagatgtagaactcttggttcctccagcactattttggtctgtatgcttccatgtttcctatcatgatgacaatggactaaacctctgaaactgtaacccagccccaattaaatgttgtcctttataagtgttgtcttggtcatggggtctcttcacagcaacaaaaccccaactaagacactctttaaaagcatgcttttttctagagtctgaagatgacatagcaggcacttgtcaccaagactgacaacctgagttggatccccaggactcctatagtgaaaagagagaactgacatcgatcgacaagttgtcctctgacctccacatgcccacagtgggatacactctaacataaacagcaaacagatggaatttttagaaattaaaaacaaacaataatgaaaaggtatgcttttctagcttttacgactttaagagagaaatcaatgataacctatttataaaatctcttaaatattttgtaattaataaatctctatgatgactcaaaccaccacaagcatttaaaagtactttgaatgatactgagtccagtgtctctgcatttatacagtccatctaaggcagtgttttgggggaagcttgctgttgcatccataaggaagtgtttatgtgactcccagtaagttcagaaagctccacagaccatttttttctggatgcattgttaattcttaacaaatgagagctgctcaaggactttcacaatctggcaaccgtgctctactgcagtgggttctcaacctgtgggttgctacccattgagggtctcatagcaaatatcctgcatgtcagatatttacattacaattcataacagcagaaaatttacattatgaagtagcaatgaaataattttctctttgggggggggtcagcacaacatgagaaactgtattaaagcagcattaaggaggttgagaaccattgctctacagcaacctatagctgacatcatggttaatgtttgaagactaatgactcttcctaagactagtagcaagctgtagatacatctatcagttcatttattcaacattgaattgataatactaagcagtgcattaaggcaaaaaagagataaaatacagaaaggctgagaagaaagaaaaaaatgtatttgtattgatagtcagcatgcttgcttatatggactaaataaagaggctaaaaccttattggaattaaaaccagcatagagcaaggacaggacaccatgtcagacatgtgagttaattttattcctatctaaaaaaaaaaaaaaaaaaaaaaaaactataggaactgtccaaagggttgagcagcaggcatcaaggcatgtttgtggtcccctaaaaatagactgaaggttcaggagaggttgccacactggggcagcatcccagagggctccgaaagggccatagagttgaagagaagacagagttggtgccaaagcaagctcagagggaacagagatgatggggcatatggggagcaggaagcaagggcagagaaagtgaggaggccatgtgataggtgtgggtctaagaagctcctgtctcagcacatacaacccggaatgctggctctctgcactgaattctccacacccctcatctggtttatgatttctacgctggtctggggtgcaggggtgtgtttgtcagcttctcctattgtatggggtgggcaggacatcagaagtcaaaagtcctgactccactccatcccacactttccagagatgtgacttgggccatcacagttcactactctgtacctaggttctttcgtccttgaaatgagacaacctcatatcctgcatgttctgagaacaaaagagattaacggaagggacttgaaagcctcaacgccctgtccacatgtgagggtgtcatgtgtgtctgactgtgctcttccaggagaggaaaaccattatccagggtctgagctgttgcgcaacacggtcagattcttctcaacaactttattgcaggaacacctcaatgctacgggaaccctgggaacccagggaggactccttatatacaccccagcacagggaaaagctttgtgtcctcctgggattggtcagtctgccagcaccttaatttgcatgcacctgatagggaggggttggcgccagatttgttgtttacagccacggtgtaccagaaaccggcaccatcttttaggcataggctgcctacactgaaccttcacttgctagtgtttctctgcagggttccatgactcaaggataaaatattaattcactcagaactccatcattccttttgttgtacaaactttttaatcttaatccaggctttctaccctgcctttgaccatttacttcgtggataaaagacacacacagccttcatatttacaacaagccttgatcagcacaggatctgggtagatatctaccctctatgctattataatctgcttttctatagataactctcagttattcctactatgtctcatctgggctgctcctaactcatggcatctcccttctcctcaccttcttctcttactcatggttctcactcaaccccccccccccaggcctgggatccctaaaatccacctatgtctcttctatccagctattggctgtcagcatctttatttatcaatcagaaataacttgggggcaaggtcacatagcatcacttacgtctatgtgcagactcatctctggggcaaccaggtcttgagggcctgcacttagcattgcagtatacaataagagaccaaaccttagcacctttaaagttctgcttcaaaatcaatcttggtttaagttgtctactggcatcttctgagtctgcaagcatttggggctttcaagtccttgagccttggggacttttgcatcatctataggactttaaagtagtgggaggcaaaccccacctgtctgtcacctttttcccagaagggctcccgtcaggaatttttaactgcttattcataatttttacttatgaacagactagcagacataccagagaattagggctgcaccttatctcttattggcaatgattcaacatcagatttgtgcctaagagggtgatgggaaactaggctctgactgagtgttgatatatggacagagttcataaggatggtaaagaaaggaaagtgttgtctagctcctcgggcctgtcagagagctagagtgtgaggatgagacttcgggggagctccaagcttgctgcacagtagtggtgcaggagagtgaatgtgcagtgggggccctgctgaagacgcacaatctctcctctgagctgtggatactgtacaagtatttaatggttctgaactccatctgaactataaaactgagacagggtgaggagaaccctggagcaggcaatggttttaggagtggctatggagatgaaggtacagacttgggacatcctgcggccagtgcctctctgatgagaaatgagatctgtgtggttcagtcctcaagctggggtggagctatgtgaggccaggcatagacctgttgctcatatccttgttatatggcaaccgggattagacccagccaccaggctgtattcttcattccatttgttgttccattggatcctctgtgatcctttggtacaataagaggtctttgcctctgttttatagatgattaaggctcaaaagattcatatagataaatcaagacccagagagatccctcagtttccttaaagtgacacagcttgaagaggcaacactcataattaaatagaaactgtgattccagagcccaagctgctctctcactggccagaagctctctctgtgcctaaccagaggtattcctgtggctcagccggtacctcctaagaagcttggttcttcatgctctgtcaggctgagtctcttcccaagtctaattacccaaagcagagtgaatagcagattgtcttctaagaacttgggcccgccaccatgtgcttcgtaagtctactgtgaacaagtccctgtggctcttattcttttaaggactgctaactggggagcacatctcagctccttctcctctgtaatacaatacccttgcctatattttcttaccattatgcttttcattgggggactcctcctgagaggggtgcctggctcctttgatgtagcttaccagatggtttgccatttacacaaacatggtaggatttgagttggagttcctagctatttccctaggaatgtgtagatgggttagctagctatttccttaggaaaatgcggatggctgtaggaacgtgcggatggatgggttaagccccccttgggtctttgctgctcatctatattcggatgccttctaccccctgcctccccacccccgtgttgcttatctggctattagtctgtggcaggcagtccaactgggcctttcatacaatatcctgttttggtttataaaaaagatgtgccctgagaccacgagtacctttagatgtgtttatatgttacagaactgccacctgcccatgtcactcttcaggcacacacaacaaacaaaaactacccgacaagtctattgaggtatatatttttaatttaattaatttatttattcactttacatcctgatcacactcccccctctgcacagtcccaacctcacaggtttctccccctactccctcccttctcacagaaggggaagtaccacttgggtaccaccctaccctgggacatcagttgcagcaggactaagcacatcctttcccactgaggcccaaccaggcaatccagttaggaaaaggggatcttatagcaggtaacaannnnnnnnnnnnnnnnnnnncatatgaagactaagctgtacatttgctacaaatgtggctctttggttggtggctcaggctcttgaaagcccatgggcccaggttagttgacactgtagatagtctctctggctccctcaattctatccccctccccttccacaagactcttcaaacagcacttgatgtttggctgtgggtctctgcatccgtttccattcactgctgaatgaagcctgtcagcagacagttatgctaggctcctgtctgcaagcatagcagagtatcgttaatggtgacagagattagctttcttacatggggtgggtctcaggttgggcaagtcattggttgacctctccctcagtctctgctccatctttaggcaggacatcttgtaggcaggacaaattttgagttgaaggttttgttggtggatcaatgtctccctcccgccattggaaatctcacctggctataggaggtggccactttagtctccatatccccactgataggagtctcagctacagtcaccctgctagactccctagaacctcccccatcccaggtcttcagcttctcccagagatgcccccataaattgctgttctcgctcccagcctctcccacccagctccctccctccctccccccacctccaatgactattttgtttcctcctctgagtgagattcacgcgtcctcccttgagaactcctcattccttggtttcttcgggtctgtggattgtagcatggttatactgtacttataagtgagcacataccgtgtgtgtctgtctgggtttggcttacattgtaagtagaagtatttaaaggattcataaaatacgtggtgatactagtttgactcatctggtcatgtgatggctttcattcaaagaaagctacgtccaacggggagcttgtgttgttgaagagtgtttaaaaacacctcttaaacttgcctttgaaagtctttagcttttaccttcacacagagactctacagagactcttaggagctctctagaaaaaaataccaaacaatttccccagctttggggtgactttggtagctatggagaccaaccctttgaagagagagaagtccttccatcgtcaaagaaggaaatgcagtaaatgcgtttcatgatttgttctaagatgtctgcgatactttgctgctgtgcctatatattttaaacttaactagaaatcttacttcaaatttttaatgatgttgtggggtgtagtttcaagtggtggaaagttccatggacacttgtgaccagatcatccaacacagagtcccagtatccatgtctgtgatagcaatgtcatcaagttgatatccttactttcagaaacacctgcttattgatctgattcttattggctggtccggccctgtgataggatctagcccctcctttatagagtttacaggctggtgtgtgaaaaagtgttaaatcaccaacttcatcgctgtgaaatgagttctacaaatgcaggactctaacccaggggtaccagatgtcagagaaatggcctcacatctgccctagcctaagacatggtcttaagaacactgctgccatggaagaccactgaggcttgagggaagcgagtgattttagggtgaccgaagatcatttcaaggaagcaggggttagaaatgaggcaggacagccgggacattagcacacacactgttataacccggggaactgcccagggcggcacgtcatgagaagttcctgagcgcttcccgttgaacgtatatatgctgactgcagggttttctgtatagcagttaatgtaacctagtcaccaagagcagtagacgcctgcttccaaaatggtttgtcctccccgatgacgacggaaatggtttcccatttaaatcatcttcacagactgttatgtccgtgaaagcatgaaagccttgaagagaagaggccatttcgagataagctcacaccacacaccacaggaaaaccccagaaaacacagtgccacgaagcaccgaagccctagattcatcatggactttgtttcagtcaaggttccttgaagggcagctatgtttccttgttagcccccgccctcccccaacacacacacacacacacacacaggtaccccatatacccgaccctgtgttttcactggttcctttggcggggcagaattcctgacccacttgctgatattccatgcctcacagtggccaatgaaatgccctgttacagtagcccctccacccgataccgtctacactggagcagctccccagggagagggaggggtcctgagctcctaccctgccctgaactgttcaccagatgcagagagaccatgctgttgaggttataggcttctcatggtgacaggcttctcgaggtggaggggctcatggaggaagcatactgcttctgatgaactttgacctgaacaactgtgattgataagattcctttgccttctgggaaacatcacatttccccgttaactctttacataagtgttttcttgaacaaagcctgaacttttatgctctccaaaatgttagttgcaagtgcaagaatattctttgaatgccttaactcacccctccttctgtccttcctttccttcctccccccctcccgcaccccctctctccattacttccttgcttcctctcattctgtttgaggcaggttctctcgtggcccaggctgaccttggatttggtatgttgccaaggctgatcttgaagccctaatcctcctgcctctacctcctacatgttagtgttgggctgtaggtgtacacggccttttcattctctgactttccctttttgtctgtatatgggtgtgatttaggtctaaggaaggttgttctctaccggcagaaaaaacaactttctacttcccccttgcctttgctttcataaatgttgcttttggttttggacgagtttctgagtcctttattctactagaaatcagcatcttagagggtctgttggcttttcttctcttaggactagtgaatgaatgcatgtgtggatataaggtggttccatttgcttgtctttaatttatgcaagtctggttaaaaacaagcaagaacaagccctgtctctaaattaagacaattcccagtggcccatttattttagagggcatttgagaaaggaaacttcccagagcagactgcatgtcagccttctacatttggggcagtcacatttgctctgctcctgtgtttgagtgcagtggtccgctgcaggctactgttctctccctgggattttgagctaatcaaggggttctataattcaccattaggctctggaaagtctagatagatcagagtttgggggactctgagactatggggtgtgtactcaggacctgagactccttccaggttcctgggtctgaaatggtgcctcctaggagacatgagagacagccatagggaaatatgcaggaaggggccgtcattttactccagagttgggactctggaggaaaaccaaatagtgtgaaacacagaaaagcattttctactatgctggtgctttcctggttcattgggtgtcctttgtgttcccacccctgtgttagcaagaagcggggtcagtaggacttggttcaaagccttgctgctagcccagctatgaactgggcatgtgacaggaccttgttggtccttagtattggcctttgtgagatgaacaagaacacctgtgccctgcctgtgtcactgtgagatgtgagtagcagtggctataaagacactggagattctaaatacaaatgccagcaagcctgagcttttactgttgtgtgttgtggggggaaggggaggggcacagcatagactcggcccctcctgcagaagcccagccgctttccctgatgcatgttctgattctgctgaagctgctcttgcatcctgttgcacttgtccttggggccttgaggatggaggagtggcataccaccatttctgctaaactcgtgcgccccttcatcttgtctagtgttgatgcttccagacatcctgtctaccaggtctaggagggagccagactgctgcattgggagaggagccaaatgacagaggagacctgttcatagcaggtggtcctcctgctttcccttctaggtcatggatgaggccgaggagatgagaactaccattcacatttgttagggtgctccctagggtgctcgctagggtgcacgcagagtgtctgtgggcctggagaagacagatgttattgcagactgtactggctggtgttgtgtcaacttgacacaggctggagttatcatagagaaaggagcttcagttgaggaaatgcctccatgagatccagctgtggggcattttctcaattagtgatcaagggggaaaggccccttttgggtggtgccatccctggactggtagtcttggttctataagaaagcaggctgagcaagccaggtgaaggcaagccagtaaagaacatccctccatggcctctgcatcagctcctgcttcctgacctgcttgagttccagtcctgacttccttggtgatgaacagcagtatggaagtgtaagctgaataaaccctttcctccccaacctgcttcttggtcatgatgtttgtgcaggaatagaaaccctgactaagacacagaccgtgttaagtatccattcatttcaacctgtctgtgccccttcggagaagttgctgcttcccaaggtagcccatttcctttgtggggaacctgggctctcaggagttgtactggaatctgctgttttctttttgtttgtttggtttggtttttggtttttcgaaccccattggtctctggggacccagcctatctgtctcctttcccactgtggcctttcggagaatgagtaccagctccccacatccactcaccctgtcactccttcctaaaagcaagggacatttgagtggcaggtggcaggtgaagcatcccctgggctaggaagaaaggtctacagtgggtgaatgatcacactggtgtgtctgacctcacggattagcataaacaaggcagaggtagtagcgacctcagggtaagggtggttgtgtcagcaaggacaagtcccttgggccccttttcaaattatagtgtaagaaaatggaggccttagaaactggtatttttaccacattcctataacgctaaagctagccggtcatctgcgtttacagaatgctctggctgctccaccatcattttctccctgcctggttcggtgcttcacacatgacacccaaaaagccaagttagtagtgactttccaatttctgccattcctgttgcctatgaggatacaatgcagagccaggggttgggattctgtcagcccagcaggcacaagttaaagggcagtctgagcctgagcgtcgtagcaagactatcaatgttctgccctacagaaaggaagtgacttatgactctttgtttagaatttggtggtcttgaggattacacctaggacctgggcatcctaggcaggtggtctaccattgactatatataggtggtcacctatatgcctgcccctctgagctattttgattctcgtccctctaagcacctgctccctgcccttgctccctatgtgtccacaatgagctactgaggagaggcattcagcagcgagatgggcttgtgtgcctggcctcacagagtctcagtaccctccctcacagtgagcatgccttagtgagaatgccaaagcctgttgaaggcatctctctaagggaggggacaggaacatacctgggtcttggttgtcaatgacaaagtgcctccatgactcagagacttactgagcctgtgtagaagtgggaactagggattgctcagcacaaatacagcagctgttatagcagatgaggtgcacatagacgggacagtctaagactcacagtagttctgttggaccgtgagggggatttcttgttgagtgatagctccctaaagaggaaataaaatggatggctttctaaccagccagccatgaaaaaatccaccgcatgaggcctgtgttcacacagggaatggcaggctgccggtggaggctgatccagatggcacgtctgggctgggacacatgatcccagtagttgaaggctttctttcccgtagggatgtattctggtgcatgtgtttatacttagccttcttgcattcctgtttgaagtggacattccgggagagaaagacttaaaatacccgaagaaaattgacaacagtcagtcaactctcattaggagcgtacgttctaactagcgggctggactgggctggcagcagcatacatttgcaattgactagaacagttacagggtctttcatggtttgctttttatggtcaggatctcatactatagcccaggctggcccgaggctcactatgctcttcagattggctttgcacgtgggcagtcctctgtctcagtgcttcctcattcaaagggtgggatgacatttggcctttttatgcccttgagtgaggaatattctgagaaatggagatgtgggcgcccagtgttcttatactaactagggagactgttgttaggcccttgcagcagatgggactggaacttaaatttctacttgtattaatttgttgtcgcatatattccatcctgaccacagtttccacacctcctcctccatgccccccacttcctccctccctatccactcctcctccagttcccttgagaaaagaacaggcctcctggggatagcaaccatacatggcacattaagttgcagtaagactagacatctcccctcgtattaaggctgaacccagtaggaggacaatggcccccaaagcaggcaaaagcatcagaaatagtcccctcccttttaggagtcccacaaaacacccacctacacaactataacacatttgcagagggcctaggttagactcactactggtcggttcagtctctgtgagccctatgagaccaggttagttggttctgtcgaccatattcttgtggtgtccttgacccctcatgctcctacaatccttcctccctcaggattcccaaaactctgctgactgtttggctgtgtgtctctgcatctgtttttatcagttgctgggcgaagcctctctgatgataaatgagttagaatagaattagggagaagttcattgactttttttcccccgtcttattttgttcttttgtgtgtgaatctctgggctatccagcctctggttcctggtcctccaggcagtgtcaggcatggacatggatctcaagctagaccagtcattggttggccactcccacaatttctgtgccacctttaccacagaacatcttggtggcagaacaaattatatatagggtgaaggttttgtggctgggttggggacacatacatttgtgtacacacacacacacacacacacacacacacacacacacacagagagagagagagacagacagacagacagacagagaagcgtgtgcttagacatcagcatcttttaaacagctagacactggcctttagagcaaactatttaggcatcctaaatttacagctgtaccagttccaattacagggtacactgctgtaatctcagcactcacaagttcacttttctcaaccccctcagccctctgagcctctgaaaattccatgaattggaataatctggtccctcagaaggttcctcctagtcctctccagccccacctttgctgttctccactgtgagagctccagcatcaacactgctcatgccaaatcctgccctgcttctaaagtagtttcagaatcattcatactcaacacacacacacacacatgaccacacacacacacacacacacacacaacccccccccacacacatacacacacacacatgcacacacacacatacatacacacacacatacacatacacacacatacacatacacacacacatacacacacacacatacacacacacacacatacacacacacatacacacacacacatacacacacacacatacacacacacatacacacacatacacacacacatacacacacacacatacaccacacacatacacacacattacacacacatacacacatacacacacatacacacacacacacacacacacacacacacgaccattcatgcatgcacacccacccaaatccagaaaacaatcctctgtaaccaaaagcatttctgtattccttccctttgccccagacctgccaggactgatggtctgtgagctgcttatatttacgtccttcagaacggttctgggatttatctgcagcacaagcagatgaacttgttttgatcaacttccaatgtgcggacatttttgttccactctatagttgatttgtttttaaaaaaatctctaatgtaaagaacattttgttccaaaagtcaaaactgtacaaagtgattcacttgggaaaaacactctgtcctttattacttcttcccccttcattcctgtccattgtttccctctgtttttaagtgcatgcacaagagagggcaggaaagaggattgtatgcctctgtgcataggcaggtaccgtgtgtgcacgcagagccagagccagttgacccctctaaaaatccccatctttttcttttcttttctttttttttggacagggtctcttgttggacctggagcttgccattttggctagtctggctacttactaagtcctagaatccattcgtccccgttcccctagcactgtggttataggcttgtaaccacacatgcctggctttcctccttgaatgcatgccatccaaacttgggacctcattcaagcactgaacccaccaggctctgtcctcagacttccaaccttgtgctctgctctttcagatgcaccagatagaagcatgtctgtttttctatttctcttccttcataggcaaaggacaacaacgtattaaatgcacatttttttatacaaacactgttatattttctcttgttcacgcagcacaaaattctggacccagacaagtgggctcctggaatgtaactgttttcagactttccggtcactttcaaaaatcttatcatttctaccagtaactttattcaaataaacgttttcaatagggactatcatttaacttcttggtaatgagcactttagaaaatgatagaattctacttaaaatggagtaaccctttttgtcatcgcctgaagttgatcccaggtacagtagactggaggtgagactggggacaggacgtggtggtggttgtggtgggaaaccttgctttcctatgaaaggtatttccatacaggcattagcagaattattctgagaagtcgtcatcacagaagggttttacacatgcttgcttatctatactccactacaatgggcaaaagacctgagaggcaggcctatagttctagtgtaaactggtagatgtgatgttacagtaaaattttactttctgacattcttagctgcacagggtaacatttagctaacttatgtcatcattttttaaggtacttgaatcatgtatgaatccagaagaatgttgttagtaagtgataatctacatttggcgtggtaagaccagaaacaaaacatgacaaaggtctgtcccagggtcctttttgataaataatggaattgaagacctatttaatcttcatgtttaagaaaccattggctcctgcggcttcccatgcgtatacttcatgccggtcttctgagttttacttaaggatgtggctctggattgagtttaactcttggagttgagactgactttgggattatcccaggctaagctgtcatttgcttatgctttgggaagctctgctggtctagaaacctcatctgtcctctgcatctggttatgttagtagcagggtgcccttcaagtctcttttgcattatccttgagagtgctttgggccagaggtcagaggatatgtcctgctcaccctacaaccctacctaacttcatcttgtgtgataagcctggaacctcccacaactttgcttctcggtcctcttcagagggcaaaatggagataggatggccctaccagggcaaaggatagtcctagagtctgaatagtaaagagaatcaggggcagtgaacgggagcctttcttgagagtagagagaagtccctgggcaaagattccagttttgctgggtgcttaggaacccattcagcccccaaaaggcctggagctgagggaggggcaggaggagagcaagtaggggttggcttgatgaaagtagctcatctcctcccaccagagttagtgaaagggagccatgctggctttgcattggctagtaggtgggtgggacactgcagtctctgtgatggggtgctggggtctgtgtgcagaagcctctctgcctgtaagggtacccgcttcctagcagctctcgttgtgcgccccaggcccataattcacatagcttggctcctgttagcagttaacatttggacatgcagatggtccttgtatgtaaaacctgggcagtcatgcacctgactctcaggcatgcctgagcaggtgtggggttttgtgtatgtgtatagagacagggttatggggttgcagtcaagggaagcagagaagacaacaaatagtcggggacacttgtgtatctgccaaaaccttcgcagcgcaggtcttcctataattgggcagagggttgctctacctctctgccttctgcagggcaggctgggagagatcacagccagaggcaaagatcaagacaaacatgagtactttcccaggactggaggtcctgccgcagtagggagacctgggctataaaataggttcattggatccctgcccactgctctgggtgttctctctgacctcagcttggatcacttggtacccttccttgtgaagtgggtggccaggtatcacagtgagtggagagagtaaaaactcccacaatgacagcccaggatgctttaggtgtgggcttctctagatcggtcccgaggggagtgtactttctagcaaatcatgcatgtgtgtcagtgtggtcttcacaactctgatgcccacactgctgctttagggggacactgtcttctgttctgtgcacgtgtgtggctccgcagctgtgctcctgtcactgtactcaaaactgtgtgtgctaccgtaagactactgcacagccgggcaccggcacccatggatgtcctaacgggtcctttgtcctctctgcctctctcagagaattctccaaggaaagagagaaggctaaagctcgtggagatttccagaagcttcgggaaaaacagcagctggaagaggacctcaagggctacctggactggatcacccaggcagaagacatcgatcccgagaacgaggaggagggtggcgaggaaggcaaacgaaacagtaggtgctgcccttccttcccttgagcagacagacttgctgtgtgattgaggtgctgcagtgtgtcccccatgccctgagcctctaccccggggctgtgagtaaaagacaccttcccagttcccccgtcctgtctgcctgttgacatcgcagagagaatagtgcatctgtgcacactctgagtctccacctgaggcgtgggctctagggggcgtaggtaagatggctttttagctgagagggttgccatttgcattgtgggccttgggagctcagacccatttttctgtgggccaagggtagaagaagatacatctcagcttagggctatagggagggcatggtttctctcctctcggtgagttactacttcacctgcacaaggatctgagaagcaggtctcttccacctctgtgctctgtggagtggctccctctggtatcctccacacagagctgagtgcttaggccatcaggctagcaaggacccagctgattgtagtaggcagcagttaagaggcctgagagtgagtcagtgcttgctggtttgtagcccacctgcctgggcttcacactgtgacatcaggcacccttaagtgctttccgcaggaggcaaggcccaataatcagtcaaccactggaattaattgtttgtgccgatcacagagtctcacttacaacacacttttcccacagctgtgctcttagtcatcctgggagcacttgggtcttgggtaagggtaggaattgaaacctaacggcacatttgactacgatgcttccatttagtttccattctggaatagttgatagcaaagatggagaacacgtttcaagaacaatgtccctcgaaaggcctgggaaaccaaggctcgcctaccgtgtagaagatattgagtaagctcttgctgaacagagcccttgagagtcagggttgcttcctccttagctacattcacaaatgactacagccagcgcttgagatcccacaaaggacagtggataccccaggagctgtggtgaagagctaggatgggtggggccatatggcgtggtctggaaggttggtgtctgtggaagagcagttgagtttgaggagaaagcttccatactgagactaccatgagtgagcaaaggccatgttccgggactctgttgggttgagcacagtgggttcgaaggcagagtgagccacagtgggcaggtcagaagagatttatttcagctgactgcttatagtccatgcaagagggacgtcagagcagaggaacataaggtaggaacctagaggcagtaagtgaagccaaggacatggggaatatggttgctccttcctcctgatttgctcagtttgttttctaatagaccccaggaccactgtccagggatgatagtactgtccactgtgggcaggacccttcctcaccaatcaagaaaatgtcccccaaagacttgcctatcggccagactgatggaggcgattcctcagctgagtctgtcactgatggaggcgattcctcagctgagtctgtctcttccctggtgactccagcttgtgtcaagttgacaaaaactagccagttcagagcattatccagccttttcttcatttgcagcattgacccgtggaagccccgcttcaccctcagaagcctaagacagtgtgccgcgtataatctggagaaaggatggtctcctgttctcagccgggcaccttctttcctgcttttaaggtgtcactcagatggccccttgcatgccattggcttgtcatgtccttgttgctccaccgtgagatctagactgtactcagcctcttgggtcgctactgtccatcgaggtagaggtttttgttttcataaatgacctgtgctatgaagcatggtttttcctggacttggtgtcttctgatggtcctaacaggatcactgtttatgtgaggttggcctcacctgtgtcctgtcactttctataaagaacatgactatgagatgaccagtctctgaagctgttgctgtattgacagaccaacgggctactcttagaggccaggaggtcccagcaatgctggagtgcaagagtgaacttgcaagggaggctttgtggagctccacttctgggttcttgggcttgctgtcagggagccgattgaagtcaggcactctgggaagtgctccgattttctgatctctggtctacaagtcatggctgagtgtccaaccctgactgtactttacaatctacctgagggtctcatctctttcactccctggctcagaggtcctagttgtttaagcagatggcaggggacctctctttgtgtgctcctgggagttagtcccagggagccctagttaggaatctctgagtcttgacctgtgtcagtggctgaatctctcatgggtctaagaattgtctggagggccctatcctaggtatctgatgctgatgacagggaagtctcctgtgagcattcttgggctatttaagatatccacagtgtaaacttgctattagaaagctgctgcgccacaattaattgaatagacaaaattatctcagaaggtagctcctgagcatttggggaattttcaaggataatttatttaactttttgctgagcttcaaatttctttaagaaaccctgccaagtctgtggggcgtgtgtgtgtgtgtgtgtgtgtgtgtgtgtgtgtgattttttttttggacacttacagctgcttcttcatgaacaatggtgttattctagggctattaaaatctggaagcctaaaattctattttaatctcttctcattgtcatggttaatttttttaaaaaaattttaaaataatgaaaccattttaaaagggagcccattctaaaattctgaccaaatgaatcagggcagccttattgtggggactcttagggaccagtaattcctctaagtagtaataattgatacccaaagaaaggaggagcgggtacctgctgcccccattgcccacaagagtacctgactgtagcctgcttccttgttggtcccagagtggtggccactgcccacccacctctcattgcttcttctaccatgggcctcagtgcagaaggtcaccctggctgcctgcctggccagtgctacctgatttttgtttgtctgtttggtttcctgcattggtttgtttcaggggtcagcagagagtcacaggtggcatagctgtttgtaaataaacaccatggtgctttgctgaccttgttttgaaagactgtatttgaggaatgcagctcagttggtaaagtgcttgcctgacatgcacaaagccttgtgtttggtccccagctccttataaactggacatggtatgccataatctcagcactggagaagaagagacagtgtgatacaaagttcaaggttacccttggagaccaggctccaggatgtgtaaaattctatctcaaataaaacaaacaaaaaaaaaaaaaaaagaaaagaaaagaaaaagaaaatcacatttcttttttttcttttaatttataagacagctttttaatcacaaagtatcccaaagaagtttagaaatgaaaatattctaccaaaaaccatagaagaaacagcagcagtaggtaggtggctcacgataaatatgagtccaggtcacctaccctctctggaggagcagctggcagtgctatgactggggagactgatgggagggccagccctggggtcagaggttggatgcagtgcccactgtcatctgccctggcctgctctcccctgggacgattaaatcagcacatgccgtgtggctttcatcacaagcttaagcagtctggtatttatttactcaaaggtcatggggcggcaattagcatttatctggcatttcgtgtgtatcagatgctgttcctggggctatgggcacatgagttcttattcttcacactgctctatgagacaggaacttgatggatgaggaaatcagagtgtgccagccttacatagcctcccgaggctgcgcagtcgtgaagcgctgcactggagttggaacccaccactgttggcgctcagggtagcagcgtgaacctgggagagtggggcctaaaaaaacaaggtggagtaaagtcccatgcaatagccagctttattcagagcatcagacagtttatactctgggggttaacaagagtcacctgagaaaagtgtacagtcaggaggacaagacacacatggcaaaaccatgcttttccttggaggagtaaacaagtaacaatagccagttgtaatgaatagtctgaagtgagctcactcctattcactactacacccaggaaggggacataagcgcattccaaaaacaacccacatcctgttgcaccgaggttataagacctcttgtcttagttacttagagttttctcacaaggtctcagagatctcacacagctttgttcatgggctatgttccaactcatgggtattggaacatttgtgccatgttcttcagggttaggttggggagggggaacttgcagtgtggagagagcatgccctttgtagaaatgcagtagtcccactaaggtgtaggcccgtgttcctatgcttttgcaggccccaatatggccccctatactgcctgtgcactcccatttctgagcatgcacatgtagactctactttagaggttagctggatggcttggcacgagttcagaaatgcagcactgctagatgtcagagagtctgtgactgtctcccttgtgacccgatgaccattaggggctttagtaacaaggatgctaacagttatgggtggtcatgtgtcgctggagtgaagcacatcgcttctcttaccttggttctcatttacttcttctccagcaactcattagcaatggcccagtccttgctaatatctcacgagtaagcaacactaggtaaccaatccatgttcatacagcagtgggaggtacagttgtcagagtccagagcccaccttcttcactgccacctgccctgccccagagaccagtcctgattggcatcacactcccaattcatacccagagcctctgactccctgaagggcactttccttaagcactttcttagatgcaaggacaaacataggagacctgtgtcacaaactagatagtagattgcgcattcagaataggttctctgggacaggttgacaaatgccctcaacccttcagatcctgagctatagattcctagctaggaggagtgggtggcaaaagtggattggagacatgccgacatgcctcaggcctccgctgttccacactggaccagctgttgctgccctttctgcccgcctgcttgcctgcctgcctgcctgctaggctgccctgtttgtattgctcttgctgccctctactgtctggtaatggaattgcctgtgttcaacctgaaggggtcacggtggctgatctgctaagagaggataagaagaaaaggaagttttgctgctttcgacaacgcagggctaaagatcacggtaacttgctgaggtgttcttgctctgtggaggctccttgcctgacgtttctggtttcctctccctgtgcataggcattgcgtgagctgcatgcgctgtgtggaaagtgcctatgttttaatcgcttggtttctctgatgcttggtcatgcttggtcttttggccttttccctcaaacgtgtggcatcactgagatggcacctttccgtttgcactgtgcctatgaagaagcctctgagccaactgagggagctcgtttgattcagtgtgaatattcttagcctggaagacacgcttggaaatgcttttccttgaatgatgcttttaagtttaaactgtttagaaattccaataatgttatttggctgatttttttttccaggctacatgtttcaaattgcttcttgggcgtcgctggctcatttacccaaggccatgctaaagctagtaatctcagcttcaagagtaagggaggtagcccccccccaaaaaaaaaaaccaaccaaaaacagaacaaaagccatctgggggcactcagttctcttcaatgagaatagccttatttgggaagtataaagttaaatataaagttttgtcctaaatactgttgaccgcacccttaccccgtccccaaccacttgacaaagcatccaggatcattaacatagagatgtgtataccaagaacagcttgcccagctgtctgtgggtcactgctgtagctgggaggcagtgcacgctttgcttggataccttggcatggacagcttagtgctgacaccaagatggaccccagtcagaaagaggaaaaaatctttgagaagacatggactgcagaggcagatagccagctgcgcgccagccgctcacccagaagagagatacacggcatggttttgttgcagtgtgagaatgctgagctcagaggttaagtggggttgtctgtgttagaatcctagcctcctcagaaggcctgaagaggaaaggcatcaggggatagtcagatggaaagcatttggctcacagggccctaaaagctcgagaaggaagaactctgtaaagcttgcacaccaatataggccaaggatgaagccgacctgcttgggtttagtatttacaacatgctgatgagtgccttggggcctctgtcaagagaggtaacccctcctgggggccactcacctcagtagcagcgtggcctctggggtggtttgacgatgtgagagagaggaagccatcttatctctttgaggaagctggcttcctggagtgaggaatggccgttctattgctgggaacacagaccgactctgctggcgatggtggggcaggaacctcggttgctgtgccacctttcccacagtaccacctttctctttctctaacaaagagagtagtttttctgggcacaactccaggtcttgattcagacctggaggcctcagtctgaccttgacccacatttcccaaggtgaatgtggctgcgtcatagaaatccctcgctctgtgtgagcaacacgcattagcacaagcatgtagcggtgccttcaggggccacctgggactttggggtttagccgtgttgtcacagcacgacgctgctcatgcttgccatgaaaatgatgcaaggacagaagagcttggggtcagacccctgttcctggggaaggagcacagtcctgccactgatgcgttatccagccttacctcttgcccccatcccttgggaagcttagcagcatcaggaagtactaaaagaaatccccaagtgtgggcgagagcttgtgctgagaaggggagatataaggctctgtgataagctgagtgcacacactgctcttacaggggtgggaagtttagtgtggggcaccagcactgtataggtcacaggcacctgtaactccggctccagggcatctaatgccctcttctggccacctgcatgcgtgtggcttacgtttacacttaacatagatacaaacatttttcagaaggtaaaataattttaaaagcaagccactcagagtcccaggacatctatgcaagcagctgctgtcgtgacagctttcagaaggactgcagaagagctcagtgtggcgtattgaaaagccttcttccgggctgctgtggctggagggtcagggggctcctggggctgacttaggctcttgaggagccgctcaaatgctgtgttctatctcctggatattaggcccggagaggacttggattcaggttcttctgggcaggccgcagggctcctaactcctgagtgggtggtgggcagtggcttcccagtgctgctcaggtcctggtctccttgaagggctgggaaaatgtcgggagacttcagtcctcaagggccagtagtgaaaccagacagctatgggtgtttctgttcctcctgagagctggtcaaaggtaactggatcttggaggagatactggcctgcggctcaggtaacacagacacaacaaacgcatgccctagttatgcgatgatgaggccaggctccccgactgctcctctgagtctttgacctcactgaaagaaatgacctggtgaattggtatatgccactccgaggtgctgcccagttgcatagactcatgtgtgtgtgtgtacgtgcgcatatgtgtgtgcaaatgcatttgtgtatgcctgcctctgaatttgtacagctgacaagtatggttgtgaaacacgtagtttatagagtgaaagttgatgaggaaatatctgtgcgttggttaaggatactaggtattgtgctagcttgagaaatgtccatcatttggttattttgtgaagtatagttcagagtggaagccaggcctggtactcctccatgttaaagaaaaaaacagtgacctgcctcctcagggagtggctccaggtagcgcctcgcctaggctgtctatgccaccaaggatgagctaggcagctttccaacatccccctacctgcagcggcacccaggttcctcccagctcctccccgccccccagcttctagtgctctccccagaggtccaacacctgaagtagaaacagacttgtaactcctccctatgcagatggccctagtgtgttcctgtagggggtgactggcatctgcaaacagcaggaggttctgagaggtctgcctaaaccctagcaaagccccagcactgactcctgctggggaaagaagggtagttactccataagatgccatggaggccttaggagaaatgcacctgtccccgggtttatcacatgaatttttgtaatccttcctgctttgacttttatagagttgcaatagtcaccagtacagcttgttactatctccaggaactgggcttgtctgctgggtgtagtgtgtagacatgggaatactcagtagcatttaagcttgttccaaccctgtggtatatcagcctacttaagcatctctactgaaactgtgggtatggtgtgccacacaggggtgcatcctgagtgggatgggagtgagctgactacccctgtggcaagccagctgcttggtcatctgggcactcacgtcctttgctgtgtacttccaggagcctcttccaacactgatggattcttctgtcttggtcgtttttaaagtgtagatgagaacctttgagggctaagtgcaggaaggaggctctactcagtcactagcatgaaagtaaatgtgcggtgtgtagccatggaggataaaatgcttaatgtggaagctgggcccacagccccgccccagccaggcccacagccctaccccagccagacctctgcagggggtgggtggagctgaacaccgggctacccagctctgcagagcttcggccccttgctcaaactgagggacctgatcaaggttcaagcacacaatgtcttcatcctctcccttccagagccctgatgacatcattctggaatagacaccacactcctggggaccctgtaaatgatggtgactgcagggttgctgtccctacaacatgctaaattagacagtaactcctcttaagtcaaaaaaaaaaaaatacacagagtggtagcccacactaactcagaagtatagttggctgttcacactagatgctcctggacagcaacgagaggggcctgggcaaaatgaccacaaattggagtgctttgctttcagagatcctccggagagtttttctgataccattggcagggtctgtgcttggacaccttgcccatgacctggagccaggactgacacccagtgtgcctcatcctgttcagtcctgactgacacccagtgtgcctacagcctgttcagtcctgactgacacccagtgtgtctacagccctgaggcagatgctcttaaccatatagatgaagacatggaggcagagagaagccaggccacaagtgggagttagatttaggactgataagcacatgatactctctggtactgtcctaccaccccagaggatgagtgggagagtctgaggcagggaggcctcctcatcctctgtgtagcctggcctcagggctccacagttcccagtgttggttgccattcacagtgtggggtttgtttcctgcctttctgcctgcacagccttgggaagcagctaagagtggcactctaagcactcagtaagagtggctcactaataattagcatagatccagagatgcagagtgatgtggccccttggtcacaggccggccgtcacctacctgcccccatcagattgtaaaatgaagctatagggatgaagagccacatcctgcactgacgatggcatgcatgagacctccagagtgcaaaagccacaagacttcttctgttcagaagtttacctttgaaaactagtaatgtttcaatatgacaaataagagaattgtgggggcacttaatatggacagaaatggccctgaatgtgtggttcacactgccattttatcactaggaaattgaagttcaaagagaggcagatgttctcatgaagagtggggcagatcagggcctggagattcccccaaatgcacagcacatgttatgctacctcagcctcagaaaccagcagctatcccaggtcacaaagagagggactcctggtgggatctgaaaagagtttccagtgtggtcttccgcacctgtcagtacaaggggcaacttgcaacaagctgctacaatgatattacagcctagtcttacagatgggagcatagaacagacaggagaagggggctgtgtgtgtgtgtgtgtgtgtgtgtgtgtgtgtgtgtgtacgcgagtgcatgggtcttaatggagtacttgctgaaggatattcctgtgtcagatgatgagacttcctaatttgtttctttccctgtgtcccgccccctccccccaccatgggttccaaagtgaatggaggtttgtagttggttgctttgaattcaaggaaaaggaacaggagagtcccaggagtgtaatcagttggtgttcatttggcctctgcttctgaaacctgggcctggatgtagctgctaagcctcccgcagcgacaagctcagcttcttgtgtgttcacaaagggctcagggacttccctttgtgcccttgggagacagggctctctgacctctgggtctatgagtcaggtcccactttctccttgcagtgagctttctctctctctcctcagcagggatggaagccacacagtcagtagagnnnnnnnnnnnnnnnnnnnnnnnnnnnnnnnnnnnnnnnnnnnnnnnnnnnnnnnnnnnnnnnnnnnnttcgtgcgggtagtgtaaggttctgaacactgggggctctgcctcaggaaagagatgtccatgagcctaggtagcttccccagcttcagtttgggcttcctccccctctcagctccactctgtctcccagcataatcaggcatctttcccaagggcatcttgcacagactcctgaggtagctccattcagggacatctgcccctcaccttccaggtgaccacatgtcagacgttggctctgggggatccagggacctccaagcactagtaggcccgttttacatctcttccccttcttctaaggatcctgacatggacctaggtctcagagacatcagacctgggactgaagttggccctgccctgctcgatgattggcaagagccctcacctgctctctgctccaaggctttccttctgctttcatagcgctccagtgctggcttattcaggaagtaccttccctatgctggccgtacactctcggtggagcttagacatccaatcaactgccacagactgagtggagctcctgacatttgaaaaacgtttatgcacgtgtctctatgcactgcctcctccaactgtaatagcttgtctttggtgtgctgtaaagacctctccatgagccgtgaactctgcagaaggggccagtggaagcattcccatactgagatatttgtataccttctctgtagtgctgtgatagagagaacaggcctgtgccaggcctgccggctccattcactgtgacaccatggcttcttttcttgggaagcatttgggtcaccagaattgtctcttgcaggtgatattggctttctctgcagccactgaaagcgtaggctcagcctggcacgcctgatagccctccttccggcatcctgagagtctgcacctggcccaccgcctggcatgtcatgccacagcacgctgtctaaagcacttttcttctccccacagctagcatgcccaccagcgagactgaatctgtcaacacagagaacgtaagtggtgaaggcgagacccagggatgctgtggaactctctggtgagtgtggaggctgctcagcctccctttaccccactttggagatgctagcgctgagagggtacccccagaggacagtggagtccttgggctctggaaggagatcagctgtgctccaacaggctgcctccagccctttggtacccctcctcctataccaggtctgctggggcatctcagcatcttgcctgcctctgctgtgacgttgtctgcctaaggcagggcatgggaagtgtgctttttaacccagccacctgctctgttcattaggtgctggtggaaaagaagaggcgcggccaagaccgggccctctgggtgtcggcggtgggggtaaaggctgatttctcctcccacttgggtttggtatctgtgctttgaaggaagagcttgaatggcagagttgctggctagaatgtgccacatacttaaatcttccttcacccatgggaccttccaaccccatcccggcagctggatccggaggtcccgccctccactgctcaaggccccgtgttttggagctgtgtttgcactgccctttcctgaccacgtggggcgctatccccttgagggttcccaggcttttctctagataactgggctgcagtagcagggttggggcagcaatgcagaatgtgccaagaactgcctgctttggggagcccggtgctgatttgacttgtttgcttcttgcctgcatcgtttacatcttattcctccaaaggacgggtgtcatctttaagagaactcaacctcatttggggcagaggttcataaatatgacacacacactattgggaggtatggcgatggctcatggagcgattcacccctgttctcctgctctgccctctctatgacgtgaagtgggctgggaatggatttgctgtccccattttacagatgagaacactgagctttgcaaggcatgctgtgtccccacccttacccttgctgtgatcgcaggagccaggcaggagcaacagttgctactgttgagactggggttgcaggccacagtggcccagcaaactggcttccgctagagggagggaaaggagaaggaccctgcaccggtccatggccagtccggaaatctgagccttctcttgtgcctgggcccttgggggtgctcctggcacaccgttagcaccttgacatctgctctggccttaaccaactggccagctattaagaatcagccacggggaaccagagtcctggcttctgtgcatggctttagccatctctacttcagtgatgggcacttgagctgaaccttccgcatgggagtcttaacactgttttcttccctttcagtcaggccatctcgaaatccaaactcaggtcagttctttcaacttgctttccctccctccctcnnnnnnnnnnnnnnnnnnnnnnnnnnnnnnnnnnnnnnnnnnnnnnnnnnnnnnnnnnnnnnnnnnnnnnnnnnnnnnnnnnnnnnnnnnnnnnnnnnnnnnnnnnnnnnnnnnnnnntccctccctccctccccccctctcgcccctccccctctctcgcccctccctccctctctcccctcctttccttcctttttttccccctcagagcttgcattacggtttttatgttatgttttaaattctgacttttatgtagaattggtctagacttgagtttaaacatggattcccagatttcagtcagtctttaagtcttacagcactgcctcggggagcaggacggagcatcagcttttaggcaggagcacatttgcctctttagcaaccctccagtcacttctcagaaagattctccacaaaagaaggtacaggagtctaaggcacctagtagtgttcagtttccagccctggatgcaggctgtgtgttcatcttgtaagtccccacatgcattttgtgttctcttcttatgtgttcttttcaattaaagacatttccctgctgtatgcaaacagtagtcataaaactaagaaataaaacctcaccctgtagaaactccgaaagaaaacgggagagaaagcactgtgaccacaggttagacaaagacttcttaaagatcattgcccaggacatgatccatatgagagaaaaatgatagattgatccccataagaattaaagcatctaactttattttattataaaatcaaaagaataagccacagacctgatcaaaatatttgcaagtcatatttgataaaaggctagatctaatatgtaatctaatatgtgatctaatatgtgaagaaaataatatgtagagagacagtattaatggcaaacagccctataaaagtggaaagaaggttccagcacacagttcacaagaagaaagctgcatggtatataagcaaagaaatgaggaggacattgctgggtgttttgggcagtgctggcaggcatgttatatgacacaatcattttgaaaaagcctttagtagtcgcttataaagctacagtaatgatatgacctagcaattctaattatacggtatctatgtaagagaaagaaacttacactaaaagtatatgtgtttgtagtgggtttattcataattattttaaagtagaaataacccaatgtccatcaaatggtacagtgagcagatcagttgtgatttatccatgtggtacagtacttctcagtgacagggagaagggagtgttactgagagggccactaagagggcttagtgggaaaggtgcttgctgtgcaagccaagcgacctgagttctagcgccagaacccacataaagatggaggagaagcaactcaaccaagctgtccccaacttccatgtgcatgtgcaccctacacaagacacacatatgtgcacatgcacacacacaacattaggttgttttgttttgttttttaattactgataatgttagcaatactgatgaatctcaaaaacattttggggtgaggaaaatgaagcctcgaaatgacacatatgatgattctggttagtaaacagcagtgagcagagaagacagaccagtagtcctgagctggggatggggcatgaatggactcacatgactgatggaagtggtctgtattccgactaagcatagacctcaaaaagaataaacctgctgcaagtaattttatctcaacctgagtctgaataaaacttaatgagtttgtcttagtcagggtttctattcctgcacaaacatcatgaccaagaagcaagttggggaggaaagggtttattcggcttacacttccatactgctgttcatcaccaaggaagtcaggactggaactcaagcaggtcagaaagcaggagctgatgcagaggccatggagggatgttctttactggcttgcttcccctggcttgctcagcctgctctctcatagaaccaagactaccagcccagagatggtcccacccacaaggggcctttcgcccttgatcactaattgagaaaatgccttacagttggatctcatggaggcatttcctcaactgaagctcctttctctgtgataactccagctgtgtcaagttgacacaaaactagccagtacagagttgttttgtgggtctctgttacaaaagaccacagccctgtttcctagtttagcatctgcctctcatcccctgcctcagcctttaacattcctctggactcctcccctgctctgtagccattctggactgacctgtcctcataggtgtcttgccttggtgccttcgtctccagggtctttggcctggagtgtcctccgtgaagactttcaattgcctcaggaaatctcttaatcattgaggtccagcccttctcttaaagctgggactagacttggtgtaaattttgcagttgtcatttgtccaccacccttcatgcctgtcaaggccaccaaccctggaactgtaccatatgcatctccagttaccggcaccagacacctacatagccagtgttcaggagtgcagactttcataccacccacacataatcgagcccaggagagtcaggctggtggtgttacacatttccaggggatacagcactgaggtcttcgatgttgaagtcacatgtagcttatcactgctgtacaaggtagacccaccaagcatagcattttgggaccaccttacttatgtgtatgggatcatgtatcccaggaaactcagctgtgagctattaagagtcctcagtagagttatctgtgccatttgtcccattgaaaactgcagagcagaataaaaacaaggcacaacttgctggatccagatctactcaaagcctgtcctttgcagccttcctgggttctatgtgtttgacatagcaacacagccaagtcagccggggctacaatgtagccagctggggctacattgaggcagcttagattttcctcctaagtcatacctagaggaagtgccctcctcccagacactgaggcaagcaaggccaggagaaaagggactttgcagcctggctggttcgttcctggattctaggtctgtggtccgtaactgtcctcttgtggcaaggagatggagaatgttttccacaaggagacaggcagagggagaaaatgtcttcctctaattacaaacagagacgggaaggtgggcggggacatgtcacatgtctgtttggttctgctcattttatttttatgaaaacacgactcaatattggatgttctcctaaaggtatattttgagcattgctagttaggaagggcacctggtgactcagcacgaagacacatgtcccactcagctttgacacctacgaggcgccagaggaacggcagagacctgagaaaggattaaaggcttccctaaacagaaagctatggccacggactgtttttctctgtcaaatcgtttctctgtaacgactaagctgctacacaagacacatatactaagctgagtggtcctgccccaccgacctccacagatcacaagctacacggtgcctacaagagcttcgtgtgtgtaccggtgcagccttgaatctgctcgtgagtctgtggatgtctgggttctctaacccacttgcaggctgcatatgtcagaccctgcagttatttatagccagcggaggggaagtgagagcacgattccttcacaattatactttttagagctatatgttcagaccagcagtttacatcatggggcctcttcttcacttctgtgctgctgggtcctgtctttcctgcctacgctatagagtcagcctttattactcagtaaagttggtcggcctctgagatgccatactcacccatggtctagggagcaacgtttgcttgtttttcagccgtcgatggcgtcgctggaaccggttcaatcgcaggaggtgcagggctgccgtgaagtctgtcacgttttactggctggtgattgtcctggtgtttctcaacactttaactatttcctctgagcattacaatcagccagactggctgacacagattcaaggtatggccggaaggtgttcttctgttctgaatttgagatgcttgtcagtagctaactgctaactgctggtcagtatccagctgtggtagaataagttagtaggactaactgagatggtaaagaaccattcagactcaagcaagccctgggacagatgtacagctcacaccatgcagtgtccgctaacttaggccccaaacttgagatagcccaggaccaaggaattttggaattgagaggcacttctccctgccatattggaagagttaccctcactttagtatatttggtcagtaattttgattctgctactttaagtgactagaacaggggtacatagaggccatctccaaaagagcccgttctagaccggacagtttagaattcttgagctgtccttctgtatattcgcttctgctactctcagcctgtgggacatcattttttgttacacacacacacgtgcacacacacacacacacacacacacactttggaactttggagatgactgggtaagcagagtaactgctgtgtaagcatgaagggctgacttcaggtccgcagaacacccgtgtgaaaagctaggcctggcaatgtatgtctggaaccccagctccttggggtagagaggatcactaggactagcttgggttcagggagagggtatctcgggggaatatggcagagatggatacagcagaacatgcaacatcttatctggcgccagcatatggtcacccctacatgcatgtgttcatcatacacacatacacagtcccccatacaggtagcaaaaataaataaaaactaaaacctgaccctagggtgctataagaggttactcatcaatgttggtttcaattgtttatctatttatttattttgtctttgtgtatgaggaagtatgtatggagataggagtgttaaaaaagcatagtatgatcttaatgcaaaatcttcaaagagtttagtggtgagaagtccagaaattcacatagtgagcacttctaccattttatagtcggtgaaattgagttgtaggaaaaaaaagcagaatacttgtacagactcatagctggggtgtgcccaacaacaaggatgttccccgttgctggtgcagcaaggagacaggataaggccatctacatctgccgtgggcactgataaagggaaggtgaaggaagacggagagccagagggagactcaaaatacaccggccccttgcctttccagacatcgcaaacaaagtcctcttggctctgttcacctgtgagatgctggtgaagatgtacagcctgggcctccaggcttactttgtctccctcttcaaccgcttcgattgctttgtggtgtgtgggggcatcaccgaaaccatcctggtggaactggagctcatgtctcccctgggggtctccgtgttccggtgtgtgcgcctcctgagaatcttcaaagtgaccaggtaaaggcgtgggtgcgctggcgtttgctcggctgtcccctccctcacaggaccctggccttaccccccttctcttgactcttaggcactggacctccctgagcaacttggtggcatccttgttaaactccatgaagtccatcgcctctctgctgttactcctcttcctcttcatcatcatcttctccttgctggggatgcagttgtttggtgggaagtttaattttgacgagactcaaaccaagcgaagcacctttgacaactttccgcaagcactcctgacggtgttccaggtgagccctcttcccacgctctggaggcactggctgcgagcggaagccagagagccttcttgggtctgtccagagcttagcaaggcacaaagattccatcttatcggtcacttcagcctcgtgcccctttggccgattttgtgtcatgtaagttatttgttttacagcgtcctccagccacctatgtgatatgacaagaagacaaaccagaacactttttgtttgattttgtgagcgctttgggagatagactgtaacatcttcctgctattcactagtttgtttgtttgttctcttaattcatgaggcatgtttgccatcctagttacaagagactcaagccaagaagtgaattttgaaacagcagtgaggctgtcctggtgtgtagtcagaggagtctgggtggtagaggttgtacctgcctctgccctttgccttgagtgagggtactggctctgaagctgattgcactgtggggccttggacaatgtctcataggggtcctgatgctggagaagtggtacacgagacacagtgctgcccatcagctggggtacactgagccctcctcccgtgcttggaagaacctggcagattggtttacagtggtactcaccttcccctccccctccctgttttcatgtgcaatcagcaaacatccagtagggctgcagaggcagggagcattgtgcaaagggcaagacatagtaggttatcacagtagcttttcctgtcctcgctgttgtgactttgatagatcacttatctttttctgaagggacagagcttagagagaatgatctcaaaggtatgtcacactatcatttgagatgcatagaattattgctataggccagggctgcttaaacattttgctgcttgcaaactttttttttaccccccaaaaatgttataatgttttatatatgtgtgtgtgtgtgtgtatgcacatgcatttttttatatataaatcaaacatttactggtaatgaattataaagattaaaaaaacttagtgcctaaacacacacatattttctctctgtgcctctgtctctgtctctctctgtctctctctctctctctctccctccctctctctctctctctctctctctctctcacacacacacacacacacacacaaagtaaaaataaaaaaataaaaagaaatcttaaaatcttgaaagtcttggggctgggagggttggtaagcacctgccacacatgaggacccaggcttggttccccagtccccacataaggagctgggtgtggcagtgcagttttgtaatcccagccctggagaggatagcagagcagaaacaacctaaccaaatcagtgagctccagccaggtccactgagagactccatcacaaaacacacagggaagagtgattggggaaggcgcccatcactgatgataactcacctacactggaatgcacaccatgtgaatggtatagacacataacacatgcacacacacacacacacatgtgcacattcacacatacacatgtgtgcacgtgcacacacacacacacatttgagtcttggctgaactctaaaagatgctgagcgcattcataatttttcaggttatcaatactttgaatttgcaattctcactcctagattcccacttttcataagtatgtacaaaacagcagaagtgtgtttaaggcctttagaaattattagaaattctgttccaatcccaaactgtaatttattttgcaagtttgtttaagcacaatccagtccaaagatgcagaaatctgactggtctctcccgaggagctatatatgataggtaagcagtgcaaggcattgccctgtgtgattaagtccatgtgtctcataagtgcagaagacttagtgtgtgaggtgaaatcactgctgctcacagcctgcagtagtctgcagcccaagccaagggagtctaggcagggcctgttggcatagaatggtgtgggagcatgcacagtgctaagtaggtatgctgagaattcctacctaaggctgcagggacattgtgtagtgcaccatgggccagtgctgccacaatctcaggctcattaaaggtttgatttgaaataaatttttgcttgctgcatgttctgaaatctcctacttttgccaggacttttctaaccccatgatcaatttagcaaccccagtgaaatcataccccatggtttgaaacccctgatagactatagtcttactttaaaatcatggcttctggtttgttactggttttccttatttctttcaggaaactcttacgcaggttttcttgtaatgttttcatatgacacaaaatttaaatgttataaaaagataccaactggcagtcctcccacccagccactaatcacttcctccgggtgggaacgggtatcccagtttcctgaacggtgttagataggtttttgttcacaggcgagagtcatcttacctgctcgcctatggtgattccacacatagagtggccaagtccacacgctgtctggcatcttgctttagtttgttttcatctgtaagaaatgggctcccctacttggttcacaaaaggttacacccttcttccaaacacatcatagtctgtaggtgtgttttggggggctgctactttattgggttcttatatataccacccttccaacccttattccaccctaatcccttcttccaacccccttctgtggtgtaggtcgctgatgtttctgtgaccagtccctcactgatgagtgttgaactattgcctgctcttgcgtatataaacagtgctccagagggtggaactgaatgtacaggatgcactggcacgtgttggagactaaatgtgtcagacatgctctccacgtggagctgctgggaaaagggcctggcttactcttgggacttctcacaatgtcctgcttctagtgggatctattcactctcaggcagcagtgtggagaccaccgtgcctcttccctttgttgagctaggtgtttgtagttcatgattgcttctagcctgacaggtaaaatggtgtctcttcatagttttattaggaataaagtcaagaaagagctcttttctaattatctgccagttgctgtttgatttgtctggacagaaaataaagaaactctcttcccagggggtagcattttttaaaaactgctgtctatatttatctggttggatttcggaatggattggattaccaggtatcatcaatagagaagatttcctttgaaactgatcatatctgttcttgaggtagtttatacacttgcacatgaccgaatgccctggttctgagaatgcacagagagattccctgtctctgcagtacatcagctatgtggaatactacgtatggagtaaaatgagcaagaaaaacctacttagtcagcgtctccaggaacatcactgaataggaaaaaagccagttgtagaaatatggtctacttcatgcttaaaaagatcagagaatatactagcggcctgtttctctaggtgtttatgtgtttgtcgattttaatctatagaggaaggtgccagacagacaggtatcaaggtcagttgctgtctagagagaggatagaaactagaagaaacactcttacttgaaagatcaagcaatctatagaaggtttaataggataacagatcagtttcattgtgagctgggctgagaaaggccttgaggggggacttagcagtgaccgaggaactcaggcagcacagccgtggtcgggagcttctgcctgttgtctgactccacccttctcttctcagatcctgacaggtgaagactggaatgcggtgatgtatgacggcatcatggcctatggaggcccttcctcttccgggatgattgtctgtatctacttcatcatccttttcatctgtggtaactgtatcctttggagccactggaactatgtggtcaccatcactgtctcgtttcttctgactttctctgtggttgtggtggtgacggtagcagctgtagggctaagggagacaaatgcctttccctggctagctccatgccagctttttatccatgtggcagatgggagccatgtagtatgagttactctcggggatacaagtgctcacaccggtgccagtagataatgagtgtagtgtcaggtctgcatacaggacaagcagggaagcctgaagattatgttgtcatcactgggaggctaggcctacatccctgtcgccccacgagcagtgaggagccactgatggtttgtcctggtcttgctttgctcactgctctctaccatgctgtgcaactttcctctgatgtgtttgattcctcttccctgatgagattcctgcagatggctgctgggggccattttgttcactgccaccagccccttcagggtctcgtaatgtttgccagttgtgtctgttttaactccttcgtgcctagcataagacctaccatgcgaagagtctttgtatcataattgtggctaatgagcatgtgtacagacatgatgacctcatgctcccgatttaaaaagtcctactgtgagtggctccctaatggtccagacctctggagctcattgctcccagtcttctttagtgcttatggtgaactttcttcagtgtagaaagcctagtgctagcccatcctgctgtctttaggggcagtgtttaatgctgtgagatttctggggaaactctctctgagtccttgggctcagttctagtaccctggcctccagagatatcctcaacccttttcttcctagttagagatgagctcactgacctctgactccccctcagattttatccatgtctgttggctatgtgtagagtcattgtccactggaactgtggtggatgccccctactgcaaccatccccaaccagatgacagcttcatgggccaggagtctccttttctgtgtttgcatgtttcctggtaagacagtgtggagtgtcccgtgaggacatttgtcaaatagatggtttttcttttctgttctcctcctgactgactgtagtcgcactgggtgctaggtttgagactgcagactgctccctgccattcctctccagctccatggtgaagctctctgtaacataggccaccatatgaaagccttcaggagctgcttgtgttggctgtctcttgctggaagctatactccattgtgtcctgtgtcctcccatatccccagtgcccagcagggcctggcctgcccagggtgctctgtagaatttctgaatgaatccacagaacacccctgttcaagaagtctgagccatgcctctgagtgcaggtggcaaactgatccggatttagatttgactcagcttcccacagatttactgtcattgcagagatgggattatttcctcctggggtcccttgagagagagacatgcttgacacagctgtccccagtgctgagagctgcccaagtcactgttgcaaaggctctcagtggagcttctaggtttcccatgttgtcagatggtttttccaagagttggtgtaacccacccaggtgtcttccctttttgaatgtcttgactagaattagacagcttcttgttgtgttcccctcacaatagtcttgctgttaggcctttggtagctttcaatgatggatgtgtatggcagcccacatggaagtttctaatatacagggccacagtctgctgcctgcctccctccttgcctgcctccnnnnnnnnnnnnnnnnnnnnnnnnnnnnnnnnnnnnnnnnnnnnnnnnnnnnnnnnnnnnnnnnnnnnnnnnnnnnnnnnnnnnnnnnnnnnnnnnnnnnnnnnnnnnncctccctccctccctccctccctccctgcctccttccctgcctccttccctgcctccttccctgcctcctcctacctcccttgtccctgctgtaggcttagggaaacagctataacgcacgtggattcccctcagacccgggcttcctggtattcataaatagtgaataaggaagtaaaccacttctcttgacttgatactcttgttaagaaaacattttttaaaaaaaaattctagaaaacatcacaagcaatgctatcattctgaaaacataaacgcttattcacccaatacattgccacttacaaaaacggtgttcagccatagtctagccacagtggggcccttcggaacatagcctattcttctctggcgggagatctagcttgccatttatagcaggtatctgcagagcaaagagcaggctctagcagccatgttagaggacgaagcctcctaatatattggacaatgagatcatcaggtcgatcccaagtggcctttgaaggcatctggtttgccatggaatccctcgagtgtgtatgttataacatgaactttcaaagagaaggaaaaacagtgtgctttgtgagcgtacagcggaattcaaacaaggggccgatgagatcgggtttccctggctctctggatgctcaggagaccctgcagagttttccgagcttttcacttggtttttaaagtgggattttaccaagttctccagttgtaccacgtgagtgttacccactcccagcctatgtgagcagcagagcgtggcactgccattatcaactacatgtagttgcatttaaaacacgttgtacccttaaagatttccaaattagatatcctgctgaatgtcttcttggccatcgctgtggacaatttggctgatgctgaaagtctgaacactgctcagaaagaggaagctgaagaaaaagaaaggaaaaagattgccaggtaaccttgtgttcaggaggcatttgcccagggatgctagggatgtccagccatatgtcctgatgggtctggggacacagacgtgcttcccaggagctggggccccttattgctgctttgcagtgattatggcgaccatgtgataccatctaaagagaagggactcctggataggagccaagccatcctctgagcaggaatggaagccacatatccctgtgtttaaagaatcactgcagtcaattttggtgtcataaattaagtgatgcattcaatgctgattagctcttggctgggaattttaatgaggtgatccgtgcaaaggctccgttgcatgagatgaacaggaagccctgagttagggttgtgctgtactcttggcatcatggtttcctgttgaatcttggtccttcatctatcacggtccggtcagaaccctggttagccctttaaggcataacattggtttcttgtcttcttttctctatagaaaagaaagcctagaaaacaaaaagaacaacaaaccagaagtcaaccagatagccaacagtgacaacaaggtattttttccaaaataacttctctgtgtttcaaaccgattctcttgcagtgtctccatcactataccgcttataccatgagagtgtcttaagtgtgatatttttttgtgtgaaatgtagaccctaccttatagaccccggattctgacaaagagctgactcactaacaagtcaccataagacgtggctattggagccatggactacttgttttgagttgcagttatgtggtcgggcataacccatggccacagctatgttagtatctccttagtgggtgtttaagtcagggtttttagcagacgactgttcccagagatgactgaagaagagtccaggtggtctaggaggcttcagggctgcaccagcaggcttcatcacacctgggacagcgctggatatttctgtgatgtgcttgttcattgaattgataaatgctgagtgacagttgcatggcaaacactaaactatctccatggagttcacagtctagctgagaggcaagaacctaaatgtggttatcacacagtgtatgtgcctaccaaaggatagagccatgtacagtgcccgctgaccatgacctgagtggcctatctcctgccttctggatgaaggagaatctccatttactatctctgcatggatgcgcacgtgtgtgcatgtgagcatacatacacgtgcatgtgtgtaagagccctcatgctgctgactggcaggctggtcctctggctttagccctctgaagtagatgaagtcttctccggtctctgttaccctaggttacaattgatgattatcaggaagatgctgaagacaaggacccttacccgccctgtgatgtgccaggtattatatgcggcagagaggcccagaagggctttcagtttggtatggaggggagggtgtcacacaactgaggccaccaaggcctcatgatcttcagagagcagttgactctgtgcttccctaaagtcagcggcagcacaggtgaatgcaattccaggaggcagaggaggaggacggacagacagacagacagacagacggacggacagacagacagacagacatagcttctgccagaacaatggctatgggatgtagaagcccaaaggcaagcgtgtctgtgactcaaaatccaagtttttcagcctaaaactgagcaagggggtgtagggaaacagccagacgctggggagtggcagtgagaatgtctgactgtggccttgttgtgccccggagggtgcctccttccacaggagcatgtccccacccccatacacatgcagcccttattctgaatgaaaagagaggctgttttagccacagaagcaggagttattgttaaattttaagccccattttaatgcaaagttgagaacaataacttaaacccatgtgcaatctttcacacctataaaaactgttccatttaaagtaggtgaagaggaagaggaggaggaagaggatgagcccgaagttcctgctggtccccgccctcgcagaatctcagagttgaacatgaaggagaagattgcgcccatcccagaaggaagcgccttcttcattcttagcaagaccaacccgtaaatactcccttcctagtcccttcaccactatctctctccaggtgactcttaaaagtgctgggtctggagtaaagaaaagtagttcccgccccccttctgatctctgaatgtacagggccccttaaggtcccctcctcctccttacctgtgtcaaccattcagccgcggggaagtgtcctgttcctttgggggtacaacagagtgctgggaggagcctgctctagaattcctgccctcacagcctgcatgggaacaactacaggagcctgcctagctcagtaagaccttctgggagggcctgtggctctcctgttgtgtacacgggcacactggccactctaggaccctttctgaacacatggatcttgttttaagatgctgtatggattgagaactctgcaggcaggttctgcacaacgtcttcattttcaggtcccatttaggagctcttttcccccctgttgagttttatggtattgctcatcacgctttatatgctatgagcagttgacttagcactctgatactgtgcttaaaatagcatttctcatagtaaaatgataaggtgcttaccaggaacgtggtaatgactcacagactgcgtgaggaagaagtctatttactagctggtttctaggtttaaatcatctgggattaagtgagctgccagggggagaggtggctcctggaaaggcttctagaggaactgcagaagtagttcttggccgtcaaggaggaacactgtgtagttcacaggcccagaggaggctcaggtgggaagcaaggcaggctggaggccttgaaacgtgacagtttcatgatcttttacaagattaatatgtcggtgttctgtgcagatgacaggaggacacatgtgccaccgtgcatcgaggggctagaagccactttatggatttggttattgattctggaattgtcaggcttcatacaaatctttacctgctgactgatctggcccacaccgatgatttttgtatagttcctcactgaacatccttaaaacaaacaaacaaacaaacaagcaaacaaaacccaaaatggcggctgtgaactgttactgatgcctgcagttcattgcatgtttatgtgtgtgggaggaatgggtccattttcccagaagtcaggagcatccctgcccccaggcctagctttggcagtgcgcaagtctttcaggaagtgcacagcacagagcagccacaatgggagacctgcactgaggggccaccatcatataaagtgattcttagttttggaaatgaaaagttacttgtccaagggcaaagcccatccatgttctttagtccacgccacagcagcagctgaccaaagaaaacgctgtaaatctgaatatcgagagggaggaggttgtaacccagccctgtgggacctcagtggagcaggagaggttctgataggccccgagagctgttgagaaagaattggatctggttgaaaggcacagcggtccttctcgattcccagggttgcaggattcagtaagaaacctaccatgtgacacaatgagatcctcacacgtaagcaaatgacaaggcaagttttgctctgccttctaaggactgcttgttgtggatcagctattgactaaaaaggtgacctttatgggcccctgagacggctcagtgggtaaaggtgcttgccaccaagcttggcagcttaagtgtgatcctttcagatgggcccatgtgaaaggagagagctaactcccaaaagttgtcttttgcatacacacacacacacacacacacacacacacaggagggagagtgagaaagacaaagaataaataaaagtcataaagtgagctaagaataggacatttataacaaactttccagacagcaggagacatcactaagtctcacttattacaggtcatatttgtaaaacagctgccctgtggacaaagatgggagtgtgtcccactctttgtgttaaaatatccttgagaagattaaattggacagcgtttagtgaagcacagaatgattcacagaggagcagccccgagagcagaaggcaagccattccaggagctgcggtgtggcgagagaatcatgggcagaacactgggatgagggggaagcagctcatctggccataacaccactgggccttactggagtgtggtctggttggttggcagcctgtgattggctgaggctcagctgtttgttaccgcagtgtcttcctaagttaggcctccagttagtagctgggttgtagttggttgtgtaggtagttactctagggacttcatttgctcagtttcctttcataagtcaggcttcatgctgtggtaggaaaaactaggggtagacatgcttggatctgaaatctacctctgcttctcagtagattcgttaccttaacattcttccatagccataaacctcagatgcctcatatttttaaactatttttatgtctgtgagtgttttgcttacatctatgtgtctgtactacatgtgtgtaatgcccacagaggccagaagagggcgttgcatcccctgggactggagttatggagggtttgtgagtccttgtatgggtgctgggaactgagctcaggtcctcttaaagagcagccagtgttcttagccattgagccatctctccatccccacttctggctcccatcttttggagggatagtaaccccatgtgcaaagactagatgcagtgccctctgtagctctcccagcacaaaacttctcacaccaaagtctgcctgtaggctccgtgggacaaattgtgggccatattgttcaccatgggtggaaaacaagagcaacatagacgccggccagcctcctcctgttctctcctgaaaaagcctcacaccttggaggaccccagcaggctccggcccttgtctgctccttggtccatgcggtgcttttctccacaggatacgtgtgggttgccacaagctcattaaccaccacatcttcaccaaccttatcctggtcttcatcatgctgagcagcgctgccctggctgcagaggaccccatccgtagccactcattccgcaacacggtaagcctctgagagaggagatgagggtgggaccaccctgggggtcagccccagcctgcctgtgtcaggcaccatccagacagcaggcccaagtgtgggaggcttggactagagcttcctgtgctcgctgtgtgtggtgccaggggttgctttctctggacgaagtgagtggagatgctcgattacaaagaagcctctataatattgctcgtgtcttcagggacttcttcattcctttcttcttactatggggtttcccgttccttactagaggcacactgatagctcattagagtcctaaggggaggagataaacttgaaaccaccctgagtaggttcaggaactctgaccttggctagtgaaagccctctcttatgtgaatttacctaaagctgcgcagctaccccactggtgagagacacagatcagggagaagacgtgagaccaagttgaaaggggcaacaggcggtagttacatctttgattattcacccagcgtcatagcttaaggatacacttctcattcaattttccctatcaggctgcccagagcctttaaaaaccaattccccttctcccccaaaaatgtaaaattcaaaggaagctaatgctggagaagtcagtgtatttgttgctattgttggatttgattttgtctcccaatggagctattttgagtatgaatatgttgcaaaagatcaccaatatctgagactattaatgatactatgttatacttgcagataggaacacgttgtcccctgaaagtctccacccagcagctgactcagatacagacatccacagcaaaacagggatagggcttggcactgatgtatctgtgttagaagatacttgtttctacattagtctttgcttcaggatctcttccctagcagttcatctaactcagcactgagcaaaggccaaagactcgttcagacagccatgggcccgttggccatcgcatctggatcttgaaaggcagtgtctgatgctgccgaggtactgcccgggagaggcagcataagcacagcctacctcttatgccagcagctcagtgccaggctttgtctcagtaaccacgccttcacgttatagctccccattccagttcctggcaaacctattggtgatgaaaggatgctctcaggagaatacggaagggacatttcccagtggctcagggagcatccctataaagatgaaggcagtgagcctgcctcaggccatcctcacagactcagctttgatttgagatcccccaagccatcttcatttagcatttaaacggagtggacacacacccctctgtccttgagctccatcataaaaatggagcacagggcaggagggtgtttagagactaatcatgatgtcacagggcaggggctagtgcaggttaagtgtgtcatcgtctctttcccagtattcagttccttggttttccttgtctttcgggtgtgtgctgctgttataacactacagagtttcattttagcaatagctgagtttctagtgacaaggggagtagaggccacatgaagaaagtacttaagtctaagaactgggattggcccctgggtaccacattagtgtggctgccaggtactttcagtgtgggaagagaggatgagggaaaggtgggggcagggggctgatagttgactagaaaatacacagttaggcaaagttgctctagcattgcctagtagtgcagaaatgggaagtttgggacagggttacctctgaggagagctcccctacttccatggaagagacgcacagctcccccttctgtggaggagaggtattgcatgctccagcggtgactcctataaaggagataacaaagccctcagactctggactacacccaccaacctctttgcctgtgactggctttgtggcctgagcagatgtccctgccctaggccaaatggtctctacagtccttccaacaccaatatcttcagttctttcaaaaccatagatgggctgctaagacaggtcagtagcaaagggcacttgtcaccatgcctggccacctgagatcacttcccgggactcagatggtagaagaaaagaactgatagctaaaagttgtcctctgacctttatacatatactgtggcatatgcatgtgtcacagacaataggtagatagatagacagacagatgcaataaagccacagcacacatatccatgagatcagcacccaggacaagcttgtgtactggcagttttgcctgatatctttccagttgagagtcatggggtcctcagcacactatgagtaagcttgttgcggtggttggacttcttgttcctggcccacttgccctgattctgagtcttagtggctctaaaaaaaatcaagaaccttgcgtcaggagctcagaagattttatagataataggtgacattttcaggaatgccaatagagcagcctatactaaaaattggaatgctacgtcagtatagtctttgcatggacccagaaaggccagagtcagccttgaaagaaagcagagtttacagagcgtggcaggaggaagacactaagtacaaatcatggtcacagactgagccatcccagcatatgtgggtgggttcaggacattacttgatgattacattgtccggggtggacaggaacacgtgaaattttctgacttcatttgatgcaattagcatttttacttatgctttttataattaaaaacagtagccatatggtgctgggaatagatccccggggccttgtgcttggttggcacccttgactccttcactgacattgtatttcttcaccaatatgaggcacagctagatagcagagcatttcattcaagttcaaaactgccaaaggtgtgtgagtctcatttatcaggtgctacaacccactgggagcccatgcagagggaagtttattaacacaagactttcagaaacaagtccctttgggtcacaataggagcctgggaagccagtcagccgaagtgggtaaaggaagccaggctccccaacattccttggtggttgcaaagacgagctatgggtgggcgagaggggtccttctgagtgtctcagccttcccatgggagcagcaggttgtcctgcctggagaagggcctctggacagaagctggcggttctgctcttgggcatgaatctggcatccttgggctgactgctgtgtgttgtgccttgcagatactgggctactttgactatgccttcacagccatctttacggttgaaatcctgttaaaggtaatacatttctccttgaccctcctctatgcagccacagcagtaatggttgcgttctttgcctcccttccagatactaggttatgcggactacgtcttcacgggtacttttgcttttgagatcattttaaaggtaacaggccggccagctcctctgacctcggcccctcctgtgcttcaagcacaggagagatgcgtgaagtgctttgagctttttttttttcttctgtgatcaagctgaacttttttaaactataggatttttttttcacctgtggccattccaacgtgtttttgcagtttttctttaactttgagtgcatgtagaagctatgttggcttcacattctagttggaattgcattttgttctttaaaaaaaaaaatcctctgaatttggttcactaataatggatatagcactctgtgtgaacgtccttctccccttcctgacatcagagtgagaagaaaagcacctgtgaggtggcaggagacactgtccccttgctcctgggactacatggtggcttctgtgtccttgaatagtaactcactactctcttgcaatgggtcttgcaagctatgctgggtctacttgtgtggagatgttctgtgtctctttcaatgggacgggcttacatttgcacagagcaaaggtgtatctgaatgaactgcccgtgcatggcctaccaggtggtgtcactgcgtgtgttgtgtcccgactgtgagtaccccatgggggagttccttcctgagacacagcagaggtctaggagcctccagaagctaagccttcagatgctgttgttacagccaactccttatgaggagaagctgggaaatgaagttactacagttgcctttgaagtattttgaggtttatgtgtgtgcatctaaaacaagttctttatgttgggcaactagggactgggctcctcacaaaagcttccactgacaaaaccccaattaaggaacacagggagttgccctgttgtggcactgatgttgccaatgcgttcaaaaccaccctttccaaatatgttcaaatcttataaaagttagggttttcttgcctaactgtaggtcagtgggtttggttttcgtttcctctacactggggctgagcagagcagtggccaaggcttacgtggtaaaaaaaccagcacaaaatgcgccaagtccctgctccaggttcttggtttttgccatttgctgcctctccctcaagctgaattagggaatgtgttccatagagccattagcctggttgattgagtttctgcttttctgtctgcctgtttgaactgttactcactctgggctttggcaaataaaagcctgggctatttaccactgttttggttttttttgttttgttttgttttgtttttttgttttgtttttttatggcttttcaagacagggtttctctgtatagctctggctgtcctggaactcactttgtagaccaggctggcctcgaactcagaaatccacctgcctctgcctcccgagtgctgggattaaaggcgtgtgccaccacgcccagcccactgtatttttcccaccagagaacttccttgttgagctcttcctatcatcagtagaaacctcactatgtgtgttgttgctaaacaaggtgttcagtgggaccaagactagcttggccgtaatgtcacccaacagcctgcttgctgtagccaatgcttagagagtaaccagagctgggagtgtgaaagccactaaggctggaaagtacatcaggagttctggctcccaccgagaaggttcaatgaaactcgtttgtgctctgtggccttagagccgtcagaccagcactgtataggtaagctcgggtgtgaagcagtgaaggccttcccacaaacatagtcaggagcagtccctccctacacaggctttttggacgtgccagagttctgttcctatttgaataaactctgaattggtctctttacaaatgtgcctacacttggctgcctctttccatctctgctgaaggaagttacacagtcactcagccctgctggtgtgcatctgtcttccttgtgtgcagccattaatgaggtcatacttctgccaagagtttgggaagagcccaggtttttgctcggttggttttgaaccctggaggggaggagagagaataaacgccacgcgattctgtttacagatgacaacttttggagccttcttgcacaaaggggctttctgcaggaactacttcaatttgctggacatgctggttgttggggtgtcgctggtgtcctttgggattcagtaagtatttatgtgtccgtagagtgagtttacatagggaacttagacctaatttgctcaggctgggcactgtctgctgattacagccagaacggcttaatttgccctgggccagaaagagctggggccatttgtattttcctatttctgttttccttttctgttttcttttttttttttttctttttccttatgcctactgctaggttgagtttatgattctcttcagaattagctttcaacagcagatgaaagaaagacagtttgactagtagaggacaaatagggttcttctcaggcctggtccaagacttcgagcatcctttctcagggtggcagttttccttcactgcaggcaaagcttggccttggtggtctcttgggatcccttcctctccctgtgcttgcaggatagacagctgcggtgaccttggggacacttaagagtctctggtgaagctgaacactgcctttttaccctgtgcagtacccggggcagtcacccgagtttgtgtcttctgtggcctcatttcactttctgctggcctgtgagcttctgtgctcccgagctgtcccatgtgtgcacacgtgtacacagccccttagctctaggaacctgaagagaaatgtaagccaggcactgggaaaccacagaactaggccactctgtgggaagaaagacagtttatttgggaatcaaactcctaggctgtatctgaggtggtcagggggtcaggccgaggggcagagaacatcgggctgcaggaaaagccttgtcagctttgtggggacaggtagtgataggagggtgggttcgggcaaggacagcctgagagttagcaaggggctttgttctgttataggctggtcaggtaagtcagcagctacatgcccattgtctgttgaccatggggacagataaaggaagtagcagcttttcctgactgactaaagcccgctcctgaggagtgctaagtttagggttttgtttatctgatgccagtccttctgtttacccagtcagagtccagcctgacattgtccctctggccgatgcctgggaacctaagctctgagctcatttcccggtagaaactccagactagtctcttcacggctctgagctgtccacactctttctggcttctcttctttgcacactcccccatccccaaggcctgtgctccagccacacccctacatctggggtgctgaggctcagctgcctcagtatgcactgctgctgcccccctctgtcagctaactctctgctcccttgggactcacttggcaccacctccctgagaggccttctcatctgcccctgtggtcacaccatatcttccccaccttggaggagcatactgcaattccccacccccacccccaggtgtgcgtgctcacccctcctaccggatgtagctacttgaaggccagaaaagctctggtaccaaagcacggttccccagacttaaacacgaaaatctagaagtcaggaacctagtgtttacatgaacataacaaagtttgaaaatttctccaaaaaggcaactgtaagcctaaaataggggctctgtcaggtcccacaggaggcaggaggcccgctttatggcataaaggagtagagagactccacacagttgtgaagtgtctttaagagatgatcacattaagcaactgctctccgggctcctaaccagctgtaactcagccgcttgcttgctttgtccctccttaggtccagcgccatctccgttgtgaagattctgagggttttgagggtcttgcggcctctcagagcaatcaacagagcaaagggacttaaggtattgaccctctctgttgagtggggctgtcttgggttggggatggctgcagttactaactgttcttgtctggaggtgaactgaggcctgctgggtttcagagtggaacaattccaccaaaagaaaaaccaaaaaggctgcttctgccacataccatcattctaaagatgaaagacaaaagactcagtaggtaagaacacttgctgagccttagcgcgagcacgagcatttgttcggagctgagtcagctcccagagcctgtgtaaaaagccatgcgtgttctcacacactggaaaacccagcactatgtgtgaggtgcctgagacaggaaggtgcttcctggtggctgttcttgctctgggttccgtgagagtctccatcttaagagtctaaagtcaagactgatataggaggacatgcaatatcctcttctgctttcctcaaagaacaggtgtgtttgtgggagcatgtacccacataacatgtactgctacacacacacacacacacacacacacacacacacatacacacacacacacacaccagaaattacttttttttgttaattggagatattagtttttataattacagtaattattgggtacttctttctcaatactttttcttgtgtttaagttgtaaatgttctcatgtggagtacacaccaggctggaaggtttacatttctgtaaagtctttctgggatggggagcctatgagcaggaggggtttctttcaactaaaccaacttctttggaggaagcccaagaaaggtgttttgggggctcagcaggttaaggcgcttgccactaagcctcacgacctgagtccagtccatggacctcgtgtggaagagagcagcagcttctggatgtcctctggttccacactcacccgtgcacagtgcacacacatggagtggataggtgcaatacaagattgataaaaacgtgcacgtccaattgaccacaattctcgcaccgtggattaccaggaaaacagagcatgaggttaggacagttagaaattcagctcaaagtgcgtcttgacgtagaggccctggcctggtgttaactcacctcacggctaaaaccaggggagagaatagcagccccccatcctctgtgtgtgttccttccccagcacgtggtccagtgtgtctttgtggccatccgaaccattggcaacatcatgatcgtcacgaccctgctccagttcatgtttgcatgcattggggtccagctgttcaaggtaggtgtgtgtctcgcccagggcgggagttgggttccgtaaggagagcctgtattgacgttctgtctgcttggtatctaggggaagttctaccgttgcacagatgaagccaaaagtaaccctgaggagtgcaggtgggtttcccaagagcagcctagggaattggatccagtcagcttagcatttcagaggtttctgtcaaggcctatcccctgagctcaggcctggaaggatggcgcttggtcttctgtcatttgtttatattttcaagtctaggcaaaactcaagtaaagtaaaaatcacgtctattcagtgtggtcagtcattgtttagtcagggcctctctcaaggtttgaaacatttttatcatcccaaaagaatgtaggtggctctaactccttagtatggagcctgtctgctgggggaaggagccctgaaataagtgactgagggccacccagtatctgaggaacgtgaacggtactctcccaagtcaaacttgcagctccactcccagggctcaggagtgggctgccctcttctggaagacttggcagtctttgctccctggtcctattttgattcttacccatattatggcacatttctcttcacaaccgtcaacaaaggagaagcagcaagaaatgtttgcatatcataattcaagatgctcggcaaacgtggaattttcccagtccatgcatacgttacccagagcttatggccacagaaactcatgtccttgacctttagagttacatcctgcaggggtctagctgcctgccccgtgtgctttggtttgggcttccttgaataaatgacgtggctgtggggtgtcaggtacagtttgtctttgactacatacatcttcaaagatgctatcagccccgggcagggggatgcagagcaccacacaagttgattagtgcagccacagtgtggctatgcaggtccttccctctagctgcctgttgttaggaaatgacagtaacgggctttatctctgggctccatccacaagtacagttctgtaagaaatggtgtgtgacagcagttacagaattgttttggaaggaaaattggtaatatcaatggtatgtaaaggaagagatttgttgaaactagattgtggacaagcagataccccagcttgcttctcaagagtttatggaattctccatggccaaagtattgatttttccacatgtgttcccagcctgtcttatgtgagaaacaagttaccatttggtcagagctaattgccaacgggtccacactgtttgtctagctgttcctgccccagagagcctactttacactagacaatactagggatttatttgagctatagagcagattaaatgtgggaaaagcaggggagaaactccacctggcctgtgctcaggtacatggcctggctgagactacatgtaatgttctagcgtgggactaatactgtcatgcgtgaagccaggatgactctaatgcctttcctctacagggggcttttcattctttataaggacggcgatgttgacagtcctgtggtccgtgagaggatctggcaaaatagtgatttcaattttgacaatgtcctttcggctatgatggcgctgttcacagtctcaacttttgagggctggcccgcgtgagtatagagaatgttctatttcccacaaggtccgtatctgctccttagcaactccatgctgtcttccttccttgagcaggtgcgacttttgctcttcacagctagtgagctagcctgtgactaacgctgggcaaattgtcatcatttcttgcccatcatggctcctccatctgaacaggcaggtgttaaacatctgcgtctttcttctgggaagtacctgggcagcatctctgggtgtggttaaagaggtcctaagagacatttgttgtataaacttctgttggtagctgcccttctgatgctcttaaagaggatttgacagcatccaaactgccattcactcttccactcatcttgatacagaatgagtattcatgtgtgtgccagccatgggcagttgccacttttctttcatggaggtgcttatacattcattcataaattacgcctttgttgtaaaccccatgcaatatgctgtgctagacaatgtggaagatctcgaatgtttgaggcactgtgcttgctctgagccctgagcccagagctagtagaaatgtttcatagacatacttagtacagaagagaatctggatgcgtggctgggatctggctgagtgtggatcccagaacataaaaaagaaagaaaagaaagggcaagaaggaacctcggatatccttctacctttcttcacatgccccatgcccagaggagcttgaggaggggagtgcccaggctggttcttgctggctgccagggttcagttagccactgaggcagctgacaggatgtgaaccagcctggggctcagagctacagggccagagcctagccctggactctgctgctgagcattggtgaccttgtgaccttggcactcagatgcctttctgaccctcgataaaaagggagtggtggtgatatctgccctgctagagagaagtaaagatgaaaggagaggatgtgaatgcctttttaccatgggctggggtcctgggctgcattcgagtgggctagtctaagttggggtgttttatggtggtgcccttctccagagttctgccgtatgttggaactttctgtttgggtgcagggtatctgtcagttcacacacaattttcagttccttcagtatgtcaatgtgattcactttatctcttatctcttcgtgggaggttgcattgctgactgtttgtgaaattcttttgatttctcagttctccagatattctttgaatgattctatctgggtaacctctcatcaacataccagctgtctgcgcctgaggcctaaggcctcagtgacccagctgtgttcagaggccttcatgtccctcccccaacacacacagtgactgtgcagatgaattctgggagcatcaggcagtgcagtgggctgagctacttggactgtggggttgtggggctcttacctagttttcctgtcctccaggttgctgtacaaagctattgattcaaacggtgagaacgttggtcctgtctacaactaccgtgtggagatctccatcttcttcatcatctacatcatcatcgttgccttcttcatgatgaacatctttgtgggcttcgtcatcgtcaccttccaggaacagggagaaaaagagtataagaactgtgagctggacaaaaatcaggttaatgtcatacactgtttgtgcttctgtccctcatgcaagagcagagcacctcctccctcagtggccttctctacccagaggagagggctcaggccctgttcagagcacactgtcagccacgttgagtctctgtagagttagtcaccagacacagactagactattactggggaaaacaatccccacgcttgtgatgagtaattagagaatgctgagggtataacccatgatggtggctgaccggtgatggtttagactcttgtgtagtaggtaatgtggctcagagcaggagttcactcatgtaagcttccacagtcccctatggagaggctcttcagcatatactcgctataaactttcttcatctttgtgttcttcatatagcgagctgctcatttgcatttgtgcttccaaagcgcaactgtagggcaggaagcaaaatccgggtcccctacccactcaacacactggaatctatttcctccagtagggaaagaaaatattcccagagattgcaaggtgtcttttagggaccacaattgccttcaactgaaataggctgtcacttgataggaagagtcagaaactttgaatacggcactaaagttgttggcttcatttccccttcttgtcttagctgatctggtagaagtaggagccttggctctgactatgataaagccaggaacctgggagcctgttctctggccctgctctgctctacctgctctgtgacgttaggtgcagctctgctcctagggtcttgtccccttagcttgtttagaaataatttatgatggaaagaaagaggtgcccctagacattcttttgaacctttagcatatgagattggaagtctcttctgagagactccccactgtcttttgtaaggggcatctctgcttttatggtaactagatgattgaggttggtctgggagtgcatgcttattaaagaggtggccatggccttaggaggtatctctgcccaagtggtacctgggaatgtgaagatgggtgagttgacacagtttgtggaagaacttttcctatgccagtgtgtccttgtatacactaccagtgataatctgggggaaatctggcttatctctttgcctacccaagtgagggtatagccaagtgaactatgcaggggtggtggtgtctttgagaaccccaagtcccaaatagtcttgaatatggtgtctctggagtcagagtgacactgagtcacaaacacagaaaacttgtctgaagcctgctgtgtctagagcacagatgtgggggagcagggcagggatacgccttgagatcaactggaggctccctcagggccggctccagacagagactagtgtccgtccctgagtgagtagaaggacagtgttctgtttagagccaacctcagttcgacctacccttcattactaaccattctctggagatgctcaattgagtgcagtaagctcccattcccgtaagcctggacaggcatcttctgtggatctgctagagtatccagagagcctccaacctcaggaagtaaactcagcctcgaaggctcttgaagatttcatgcctgccactaggtggcttcctcttgtggacgacctggtatcaccacctgctgacagagaggaaaggtcctaacaagacttgcttgatctaagtccccccaacacccacccctaagagaccctgcagagcctcagcaaaatttgcctgagttgtgtctacaggtcccagccagtacagtggctgctccacttacttctgaagtcaccgtgaggcaaatgctagattctcctcaagaccccatggggcttcttcactgctgctcatggtcacttcctggaaggccagagtgagctcttcttggaagatgccactatgtgctccttccctggaagctctcaaaaccccctcggttttttttatcatccttttctacctttgcagcgtcagtgtgttgaatatgccttgaaagcacgccccttaaggagatacatccccaaaaacccataccagtacaagttctggtatgtggtgaactcctcgcctttcgaatacatgatgttcgtcctcatcatgctcaacacgctctgcctggccatgcaggtaagaacggagatcatggcgggagccaggtctaggtgtgccccacgtcccctctaccccagagcccgacagcagcatgctgcacctcctaggagaaggggtctgactttctgataatcctggaccagtgtggccagaggtctgctctgcctgactgttgtcacggcagacacataaggtcacgtttctccgcctgggcagatggctgtgggtattgctcccatggaacctatgtgtgctattcagtatggatcgtgggacccaagagcaactgagtaccaaagccccgatgccatgcagacctcagcttctgccctggctctatccttaccagctggtggtcatgagagccttacttcacgccacactgtctttatgagtaacatgggagacctgccacatctacctcagggcaaaggattccgctgaattcttcgagtctggcactttgaaattaattttagatattttaatttaattttacgtgtgtgagtgtttgctgccatgtacgtatgggcaccatgtgtgagcctggtgcccacagaagtcagaagagggcttctggaactggagttatgggtaacggtgagccatcgtgtaggcgccgggaaccgaacccaggttctctgtaagaacaagtgctcctaaccttcaagctgtctctctagccctaaagtctgacactttggtctaaacctgccccagcggcactaaatattgaaaaggaaaaccgaaattacattcctgactttaggggctcctggtgcggtagtgcgtgatttcctagtttttgcaatattgccctgaattacagcaacttcttgctgatcctgaccaagtcagattgcagagcagtgatgacagtgaacctttaagaagttattgtctgatagatatgacactaggtcaggaagccaggaccaaggtctacaaccagattctgtccaggcttgaagaacttaagcaattcaaaccctccgtttctcagtagaagccaggcccatagtcaagcaacattttcagacactgttttacactttataatgaaaaggtctgtgtgctgatctgggggagagtgtgaagcccagtaatactccctttaatgagacataaacctaaatagtataagatttatcactactcaaactctacctttacccatcatatctgcagtgtgttagacaaggacctgagagatattcccaacagagaaagggtggcttccccttatcctgaactgaaagaatgggcatttatttcctccatcatcggaacatcctcattgtgtcatgaaccaccaccaccccccacaacctccccatgtttaggggaagttcaccatatgacctttgcagtgtactggcttgaatgttggcagaagatgctgtacaagagggtgggaaatgaccctggggtgcaaatgtcaggggatctcccattgcacagatgagatcgtgaggttttgacatcagtacctctgccttcatccacagcactatgagcagtccaagatgttcaatgatgccatggacattctgaacatggtcttcacaggggtcttcactgttgagatggttttgaaagtcattgctttcaagcccaaggtaagttgctggccctgctttacaaaaaagaagggcctgcttcctttcagcctcatgttactgaattatgctaactcttctgctagctaagtaggctaccatctgagaacatcaagatctgattaggacgtctgtatacatgtgggaaaataaatgcgcaaaaacccaaaacccttatgaaaacagttctgagaaaaagagagaagagaattaaggatctgtaagctgatgatcattgtaaaacctggttttctgtgtctagaatggtatgtcatgctgtctcaggaaagcgtagctcattatctgagcactgaggggttgtctgataatcatcagaaacaattgaccctgatttcactctgagatctctagcaggaagacagcttctatttgttgctgtctgcggcatcctttttttttttttttttttttttaaccgcgtatggaaagttctagtacctcttactcgtccaccatattttgttgttgttgttgttggatttagaaaagtttcccttgcttgtaagaaaatgaggcatgacccatgctacactatgttgaaggaatgcgcgaattgcgtcttctttgggagggatcagttctgtcccacgaagcctgaaggctgtgatgtaacaaaccatatagctcggcatcaaagagcataattgtgaggcatctgagataagattctgctggtttaaatgagttacttcaccgcccttttagctttctctctgttctatgaggatatccatagtccaggtgtaggggccgttacataccgtattgaaagggtgcctgctatgttgtgctgtactggagaccattgctgccacagttacaccgtcaccaccatcttcaagcaatggtatgccttcagtctaaagccctagactgaggagctgagctgagctgactagtggggtctccttcctcgaatagaccatgactctcagaagagagaatgacagagcctggtcctaggtgttttcaatctgtgtggaggtagccaacaaacacggcttcagaaatggttggtttcacgtacgctatagttatacagaatttgaactccatcctgggcctttctttaatttgaagtaaatcttaggcaatctttaatcggatctttgtggaccgaaaagaaaggacattttgtaagtgattaattgcagtgattgcagtggggtcaaatttggcaccttacgcatggctagatgttacgtactgtgacttgtccatacataaacattccctccttttccaagtccatcagatcctccttggagacttgggtttgcttctctctctcctattcttctttgaacaatatttgtctgaactgatggaagaggttgcagagcgagaatgtggaaggttcttgagaaatgtacatgagacattcccatggaacatttcccatcaaccctgtacctggcaataaagctctgcaaggtttgagagcttgtccaggttgaggagaacacacacacatcccacagcatgtgagcatgtaagagtgtgtatttatttgggtgcatatgtgtgtgagtatgtgagagcgtgcttatatgcacatagccttgaaggctactacatcagtggcttggcccttttatccttggtccagtgagtctctaagcctgggaagagcactcagggtcacgtgaatggatgagcaatactgttggaccatagaagctaatatgcagtcagtactaaaagaccagagtttttatcaggtggttcctccagcaagtgcactgctttgagttttgcttaacaagatatcttcatggcctcatatgacctcagattgtaatccagagaacctttaaaataacagcagcacccttgctcttggtgagcagtgtttcaatgatgacttatattgctttgtgcatgacaacggaaggagaacggagtcgccaagacatcgctctccctaaagtcccccctggcctttaatacactcagtgcttaccagccaagcccagtgagaggtgctctcacaaagcagccagtaggggtacctctgtcctagttagtcaggtctgaaggctacctctctacacttagacagtccaggactcggtggcagccatgtccagggtaggctttcccacttcagttggcccagttaagaaaattgcttgaagacttgctaacaggacaacagaatccagagactttctcattaagatcctcttcaccactgagtctaggttatatctgattgataattaaaattaactagtgatctacagactgagttacgggccagccagaactatgcagggaaatcctgacttgagaaaaaccaaccaaacaaactaaaaactagctagcatactaacctaagtgtcagattcaggaatatttctgaatattattataagctgttgcatgaggctaactcactcttttcaagcagttagagataaagaaaggaaggcagacagaaagacaagacagaaggaaggaaagaagaaagaaaggaagggagggaaggagggaggagggaggaagtgaggaactggcttcagagttcagttatagaggagtgtgtccttcagctaggagggtgggtggggatggacgctgtgtgacaaaccatggtgtctttgatgcatgacgggtcgaggagctgagtcatgctaccaaggtagtgatttcaagagataggaggctgctaaacagggaagcactgtgtgggaagaaggggtggctggcatttctgccccccctggctcctatcagtgccacctggcccaagcctctgacaccagccacttgtaccacgaaacctcctgtggtgtagatgagagactatcaacctgtagtctgtgaactcttaaggatctgggcaccattttgaaactgtgaaaggttttcttagtctatcagatttccaaaaagttcccagcaagtgtcaaatccttatcttgctgatttgaagggattgtatcccccacactgggccaggaaaggcttcatgaagaacacagacaggactggcccatggtgggaactctgatcatagtggagacaaaaaggagctacaagaggaggtgctgcgcaaggccccgaggcaggtggctcccttcttgcagatctgtcaggcaagatgagagaaacagagcttgtaatatagggccagtcaggaagtgagggaagggggcttaatctttgaagctccatgagtgtttttgtagtcttagcattgagttgaggaacagaacacactccactctgcaggagaatctgtgaggaaaaaagaacaaagcaaaacaaaacagagaaggacatgtccatcagcatagtctgcagtgatgctgccagttacagaactttttggtactcgcttgcaaccgtataatctaagagtattctgtgatgctggaggtgtaccatgtgacccagctgccctgtgtgtcagaagactaccttgggagcggagcagaaaactctcttgcattctagactagctccttatcttgcctctgaccacatgttttacatcacaaatccatacctcagggatgcctggtttccctctattgggaagctaagaaggtgtgacctgttcttctgagcaaacattcctgctgggtttgatgcaggacaattttgactatccttgaacttcagagaagtgtttgagtgccagccactgagggagcaagtgtgagagacaccatggatgtaaaggagaaagagagtagatcagaagtcactgaagttgaggctgggagtctcattgtcagtagtaacaaagggaacagtaagagcagtaagcctcagtcagagtgaatgccatcctgctgccaaaggatgggagcgctgttagtagtaaacagaaagaaccccactctggggttaggcgtcaacacgtctaccctttccacagtgcaataaaacgctgtgggtctgcagagacttcctctagccctgcagttgttcataggttccaggcctcaacacgtcaaactgaacgcttaattcagctgtgaggatattcactgtacctgtgctgggcccctcttttctagaattcagacctagatctttattcttaaaacatgtgctgcctattcaagatacttatagacagaccttggcaggacagccctggcagcggtgagcctgtggctctgtacagactgtacccacctccttcagtgtggcttcccaggggtgtcaggagtcaacaggtgccagctaggcatgtagtgcgaagagcctagaaaacataaatacacatctgaacttgtaagtcacaagtatattagaactgatacaagatactaagacctaaaaactgataaccaggaaaaactaggatacagatttgtggagaaggatgtgaccatggtctgggtgactgacagggttgacagaggtgataacagagtaggctatgttgtcctcatcctgggaagctttggtgtggtggaccttctggatgaaggaagatgtgatctgggaaaatcccatgaaagactggcacttgtctgaccttagaagaggaagtagatctgagctgattgtggtcagaggggttgcacaggtgtcaggagatgggaaagagccagagaagttgttgggggaatttagaggagttcgcttagcctggaagagggaaagaacatagaaaaccagggagggtagaaggcagccattagccattagctgactgggatccctgacgctccctcttcacccccagaactctttctcccacagaacctgccttggcttgtctttagtccacaatggagagtttctctgctgcggggctctactttgaagcccggtgcatctctgtacctgtctctctataggctgtgacctttagacgagcccctttgtgtcctttaagccaagagctcttaggaatgctgctgcacctcatagcctgatatctttgctggactagtgaggagggagggagactgctgacctggtggcttcaagtgggaaaagggacaagaggggagcttagagactctgggaagtatatgagagtcttactcttccatcagctcatgagggtttggggtggatgccaggacaagtttaccatctatctacccagggccataggtctcgtgtgtgtgtgtgtgtgtgtgtatgtgtgtgtgttcatgcctatactcacacacatgggagcatgaccacccctctgtgcccctttctatcagtggacagtattgttgtctcccctttggctttcctggcccctcccctggttgtcctggcccctcccctggttgtcctggtccctcccctggttgccatgggtgccgtggggactcggatgtgtcccctcatatgatccatgtgatgtgcccttcataagcgctcataaacatctgcccctgcctgctctgtccaggggtattttagtgacgcctggaacacgtttgactccctcatcgtaatcggcagcattatagacgtggccctcagcgaagccgacgtaagtatgcacctgtgtggcctgcgtcctctctctcctctctgcacattctgctccctgccctgatgtggcatcacctggacaagtcacagatcccagtcacacatgattggaaactagacatttcctcacagaggttgtggaaaacaaccttctagagtagagccttagcctaaaggcctctgcagacataaatcacctttgcagggctgactctggcaccattgaccccaggcactagtaggcaaggtaagatagggtgtctctggttgtctccatttgctctgtcaaaatccatccaaagtgacgttatctctgacatgtttgtctcggggcagtttttcaagtagtcgagtggcacattgttaacgctgtccttttcttctttttttttcctgttgtgcttcctgtcttctgtggcttctgaatgcttgcctaacagcactatttcactgatgcatggaacacttttgatgccttaattgttgttggtagcgtcgttgatattgctataactgaagtgaatgtaagtagccaaccttgtgtcccttaacgtgattgctttcgttccgtctgacgtagaagagactagcaggcccacccgtgaatccccatgcacacagaattatagacactaattcactgtggaagatgaaagtcagttaattagtggtctcttctcccttgccctttctttatcccttccccttaaggaatgaagacataagtatgaagttgccactttggaactaaaatagttatttttaagatgtcatactccatcttttaacaatgtggccttgtacccacagggttctgggatggcacaggagatccctatagctgtgcctgactttgagatcattactgtcattgtcctccagctcaatctagctggtgactctggccctccatccccaaagagtgttgctggtgtgttccaggagagagttataccctcttgtcgcgttcagtttatcattaacaagggagcacatccataataggtgaggcaggctccaccacgagcagtctgacaactcaaacatcagagtttgagaagggaagtactggcttgctcaagtgaaggcccaaggcaggcaggaaagggccctgtccattggcctgtacttcgttcattcgcaggctttagtggatgtcagtgtgtgtactcctcaaggtggtggggggaagtgccgctgtgtgatgttggcttctgttctgtgttgccagtccagggctgcccctgccacaccagcgctctgctttgcctggctgacatatgcagggctgagaattgtcaggttcatcctggtgcccagactccctatagggaatgggaatgttggtgctccttgatgcccctctgataagccaaggctgactttcgtcagtatggatgattggacagccattagcctggaagttccagccccacttcagccttgacttatggaacccaggcttcatatgtccatcagagtgacaatatcttctgggaataaaatgatgtagatatttgtgaaaatacctactaaaacaaagggttatgaatacacactattatttatgcaaatttcctgtttactatgcaaaatggactgtaagatattaccatgggcactgatgtatgtgccaagatagtaaggtgacattttgctaggtctgggtacacataccccccaacctcctaaagcccagactgtaaactcaactttatgagacatattctataggcagctgtaaaattgtcactcatggcaagtgaatagctttggttgtaaaatgatctgttcttacttcaagaaccctaccttggctgctgtgtggcaagatatctgactgctttaattgtcttaaagcatttgaagtatctgtaatgtgtgtcagggaacctctcaatggtcagaaacaacttataacagacgttaaaaataccataagctagggtactaatagattgttttaagtgctatgagccgggggtcataaactattttctgggtaccaggatgttaccaagacttgtctaccagctagacccagctttctcgtgctgcccacttgctggctagctagtgtgacttggtacactcagaggcaacaccttcttcatgggctggaagctggccctgctcttcaactctggcctggccttgcctgtcagtgtctccgggtggttgtgcttctgtgtggattgggaaggtctatgtgtgcatgtctagttagcagtttacgtcaggtgtctgtgcagggcctcattcatgatagccaagttctcactgaagacacacactggggaatcttcccagttcccaagactcctgtcaatcactaacctttccctgactagttgtactctgagaccaaacactccttaaccttggcttggtaactccctagcctgtgttacctgcaaagatctcagtgttggcccaccgtctcttgatgcaaaagttatgctccctgcacatttatcccatcttcaacatcattgttactgggaatccaccacttgtaggcctggagctaggctctggaaataaccaaaggttaagagacagacagacagacagacagacagaccattcttaacctctgatattataaatatgtaagaatggggatgtttatccccatatcctccctccatacgtacctagttccccaggagagggatgcatgtcatatcctcaatggccttgtctcctgatgtccagagtcaactgagcatgaatatccttggtccttggtccgttgttggctggtttgagttgctatcataatatcatcatcatcatcaccaccaccaccatcatcatcatctcatcatcatgttttgtgatgtttaacctgccacactctctcccctagactgtcgaccttccttttccattgcctaattgatttttcatgttggttttatttttagaaaattgtagcggcaagtatatataatcatatatacggtgaagtctttaagcaaaagcgcttctagagactgtatactttgtttctgcttcccacttttggtgtttcactgagttctcacaggacttgctaaggatcaaccatggtcaccttgactgtttcttctcccatatgtcctggtccctggctggggcctcagctccggcttgtttggtcagtcatattggttctgtgactcaccaacacagccttccagattgagtggtttggtctgtaaaatgggaactctacttgtttgcattttttgtaataaaaaaaaagggggtggtggggggtggccctttggccctttgcattgtcctgttcgcatgctcacccagatctttgcatcttgatgtcttcccatgctccccaccctatctgttcgtggtgtgatagctttctggacctgtccccttcacctttgtttgtaatgccaccaagttgctgactgttgaatgacacctgatagggctgactttgctttctctttgatgcctgtttgttccttgagttctgaaatgatcaagcaactaatgttctgacccaggcagggatggttgctgctgacactccgtctcttgccatcccttgttgcctaggggaggagtagtcttgcttcgcgtttatcaaagaacacataaaaaccaacaggaactcactcccagatcctaggcattgatgctgccctgtcacgcgcccagcttagaccgaggcgtcaccatgccattcagtttgtagtcagaatgagctctcaagtccatatggtggccaggaacggggctgaggaatgtgatcttgcaatagcaaaacctactgaagctatccaccccaaccctctagatgcccatggaattctattgaacatggatcacccagttcctcgaggctattctcgaaatgacagtcaggtagagagccagtctttgccctgtcccatgtcctcaagggtcacctgtgggtggcctcagaagctgagcagggtcatgtgacttgcacaccttgcccatgctctgctctgtctgtccccagtgcccctctggccctcagaaaggggacagatgtagagtttaatccctggaagccaatttctgtttcttcatcaactctagaagcccctgtaacagctgtgacagcccaagtggtctcttttactggtttcactctctgtgaccactctgcaggtgtgagctatttgcagaatacttgacctgacattgatgtggtctagacaggaattctccattctgggagcacattagaataacttactggctttcaaagttcctgaagtgtaaaaggacccagattcatttagaaaatcccttttgggtggcccctgggcagtgggtagctttagagaataccctagggtcagaacaactggtctctgtgcagatggagcaaagccatcctagggtgcttcaagtgtggaagatactttggcaacttgcatggttcccccactgctgccagatacattctcccctctagcaggcctctgccctgggaggtgtggtggcgggggcagtgtctcaggccactctgggggtgcatcctgcagtgctttggttttcattccttgtgttgtgtggtccactgcttttgtttcctgaaaaatgctatctcctctcctcctccttaaaaaaaaaaaagacaatttgactaggtgttgtggtcgatacctataatcccagtaagtaggaggtagaggtagctacataatgaatttgaggccagcctgggctacataagaccttgtctcaaaaaaaaagtttagatttaatgattgatgattgtcattcttcagataatagtttaaaaattgcacatttcaaaagtcagtttagctaactttcatcagcacaaaggaagaggatcacaaatggcctgtcatggagcagcacagaggatggagccgaagagagtggccagaaagagcaggcgtactagtgctcttacaggtcccacatatgttgcaggtattttggtaccatagctgtagagggctctgctcttccttctccagtcctcttagcacagacaagcagaggtgtccacacatgcacctacccagtcagaggtgtccacacatgcacctacccagtcagaggtgaccacacatgcacctatccagtcagaggtgtccacacatgcacctacccagtcagaggtgtccacacatgcacctacacagtcagaggtgtccacacatgcacctacccagtcagaggtgtccacacatgcacctacccagtcagaggtgttcacacatgcacctacacggtcagaggtgtccacacatgcacctacccagtcagaggtgtccacacatgcacctacccggtcagaggtgtccacacatacacctacccagtcagaggtgtccacacatgcacctacacagtcagaggtgtccacacatgcacctacccagtcagaggtgtccacacatacacctacacagtcactcacatgtgcacagtctgctgtctgagcaatagtgctgcctcctttaccacagcccttaggaagagtgatgtgggggacaagcatcctgggaaagtaacccccatggatagtaaagccttaagttaaaaaacaataacaacacccgccccatgatcagagctaaggatagcagctcacacctgtaaccccagaacttagggagtcagagtttgaggccaacccaagctgcataatgagaccttgctctctgtctaattaaaacaaacaaaacaaaacccatccctttaaggaagagctacttctggggtgaggcaataaaagaatttgacaaaaataagcctgggttctgacatgtctatggcatgttttgaatatatatatctcctgtacatgttcctgttctgcgcatccaggtagactagagccctttccagtggtcagcacctgctcttgggtaccttcgctgctgaattacaagtatgccctgatgtatccagagccattttcttcttactgaagttcctagcaattcttgtttggtctcaggaatcagcttaagagccaagcctttcttctcccatgtccccagggaaggaagctcctagcagcgtacctacctttgcccctgtctagttatgctgtgggccacagaaagcctttgttgggaatcaccaacagaggaacctgtcctttgtcagtctcaggaagactcactgcctcagtggaaaaggcacttggtggcaggggagataggagggcctttccccattcttgctattatcttttcaagatgcctcctggcagggaaaacttgcctctagcatctttgtatttatttaagcaactccccaaaaggactatgctgagcattgagtagagtgaagaaggagaaacaacctccgtggagataggagaaacaaccattcattgacatacacactcagacctgggtgaggcaaaactgctggggctcaggcaagctgggccatgctgttcttccagagtcctggggactagagtgtgggctggctgaggctgaattgcaggctgctgcagagaagcctgcctccatctcttgcactaaccaggcctctagtccttcagcagagacatgtatcctctggagcacatataatgctaagtgtggggaccacaggcagagccactgttttcctcatggttagagttggtccattgttccaagccaggaggcctgctgtaaggtggtcggctactttgaccaagccagagaagcaaggtttctctgaacctgtgtctttaaagacctcaaagacaagaaccataatctttgagcaggcatcagtctccagagacatcacatccctggaaagaaactagactagaactagtgtgtctgtgagtctgtcagtgggtgttgtccactccagtctagttccagagtgaagcactggtattgtctcagggagggagcagctgtgttgaccaaccactacacactggtaaaggggggggagtatctcctagccattgccgccttcccccaacattaatacatctcaatctttgatttcttaaagccatctgaaagtgagactatccctctcccaactgccacacctggggtaagatcagtgactggtcccaggggctgggccctctccctgactttatttgaccatgtcgagttttccactggtgttctgtactctccatggttgtcccttccagaacagtgtctgcagtgatttgcattcatcatccgtgtccagtactcttgagcagcccagcgttctcctctaacacagtagaacacagggacatgcatgtgctgtgtggatgcagtttgtcccctgagcccctgtgttgttagcatgtgatttttttttctttcatgccatgctttctgaggtgtaaggccccagaaacacgtcttcagttctcacctctgtcacctttgcgtccgtcgctgtctttctgaaagtgtcccatgttctgctttccactgggtttgacctctccatgataacccttcagaactctgaagagagcaatagaatctccatcacctttttccgtcttttccgagtgatgcggttggtgaaacttctcagcaggggggaaggcatccggacactgctgtggaccttcatcaagtcctttcaggtaagagcaacctagggctttgctttctgtcctctggcccagaagaccccagctctctctgtctgaccactgagtcagcagagattatgggaaactaaacaagaggcagaaataagaccctgaaagtcagagatctgcaatggtttccatatggaagaaatataaatctcaaggacttttgactgcccagaatgtctagcaacagtagtgtccgagagagggaaggtcactacacactccctgaggcttagtagcctgttttagttactgttatattgctgtgatctaggtaacttataaaataaaccatttaattggggcttattttccgtttccataatcagcatgacaggaaacatggaagtaggcaggcaggcaggcaggcaggcaggcacgggtgccagagaagtaacttaaagcttacttcttagctgcaagtttataggcaaagagagacagacatataaacacatagacatatagactaagcctgacctagacttttgaaacctcacagcccaaccccagggacacaccttctccatcaaggccacaccccctagtccttcccaaacagttccactaacggggagccaagcattcaaactgtgagtctatctgggccattcttattcaaatcagcacatagtttctctcttagatagattctcaacttacaccagattactgagtgcttggtagaattaagagttcagttcatctaggtatctaccaggcctatgatttcttagattgcttctagtccatttgagagcagagccccttcttcttcaccacctggcgcctgctgcagattttccgctcgtctagactgaaactgtgagggtgaggaataaatacagatgtgtaatcaaaggcacaactatgtagggaattcatagccatgacccttcacttcttcatcagctgggtttcattcatgattcaaatgttatgtgaacaaatgaaattatataaagaaaaaaaatcaagttttccctaaccccctctgggataaccagtagaaaatttcagtaattttttttttttaagtagggaaaagggaaagagatggcattgagagaaaggagaagacagaaaaaagatcacaggaaggaaatcacagccctgttaaggatggagactgaggaagaagggtgtggcttaggagagacagggcaagcgccataggcaagagaaccagggtgtggccaagccctacagccctttgtggttagtccacattccagagatgaactgctaggataatgggatatattcatgcaaaacaatcttggttcttgatgaaattattaaacttaagaaaaaaacctcataagtaaagaagccatgtgacagaatagtgatttgttctgagacagtcggccagcacattcctcaaacatttggatgtctatgaagaaagtgcagagagtttttgtggggagaatagccctgtgggaccccagtaagcattccgtctgtgggcatagtgctgtaacatgggccaggctgtgtgtcacagagtcccaaacctctaagtatcctgtcagcattctgatgcattgtcttagactggtgagaaagctgattccaatcagctgtgcttggaattaagcccaagaagagcccaggcagccctgtgctaccatgtacatagatgcatttgtcatatgtgatgatggagaaaagccatcaaggaaagaactcagatctggccagacacatctactttacacaaaacatacactttacacatgtactctgctagcttaatttcttcctgggtccagcctgtgagtttgtagctgttttcagatgggtacatggttcagctaagagcattaaagagagtctcagacacaccaaagtgcacccgaggtgtatcaaggaaaggaagcccagcagttagctcccttggatgagtctgaccgagagtaaccttcaagtttgcagtctccatgtttttccctgtcttcagtctgtctgtagtttgtaattgctgccttgtctgttgtaaatatctgatctgtcctcatgtcttgtcatccctaaggctgactcatgttctactgcccctaagaaagggggctttgctctatgtttactgagcagcgtagagagcatcacatgcaataggaatgaggcatcactttgcaaacattttcaagaattttataagagactgagtcatttactctagaccccaaagcatccagtgctacaaacacaccgtcactgttaccaagttttatctggatgctgatttcaccatttaaggcagatatttgttgtataagattgttttcagcatttactactataatcacacacacacacacacacacacacacacacacacacgagttgctttttaggttaggggcataaaagtgtcagttataacttattatagttatgcattatcttaggctgtaaagatgattacataggtaatccaaggcaagtaaggttggttggtacattgttatcttagggataagttaaacaaacaggctgagtgcacagcgggattaagagccaaatgacctcaaggtgtacaaatactgaggcccagcagaacctgcaggctctttgaacgtaagagacattttcataaaaatgtatcgctaatggtgcattttgaagtgtttttgcattcttaagtggtttttggccctctggctccttcattcttcttaaagtcgcatcgtaaggaaaaccagaatgtaggttattttgcataaggatgtttcccagatacagcgcagatggaagcaatcggggaatctggtattttagaatgacttggtcaagtgcagtttcctgaaggctagagagtgcatttaagactcactggatatgtgtgtctgtatggaagaatgtttagggttagcacagggtagcacaactcacttggcgagcaccccctgcctgcctacactttgtgatgctgggtatgcaggtggtgctagtctgggcctcatgagttgttgatccagcacccaccagcccgatcctttctgtcccacaggcgctgccgtatgttgccctcctcattgccatgctcttcttcatctacgctgtcataggcatgcaggtgagtagcagttgctttccctcacaggaccctttcaagctggccccgggtctgtacgtaggccaagtaaagtagaaagactaggtcacgattttccagaacgtgccccagataggagatgccccagtcgtcagtgtggagatcacgtgctctatgctgaggatactcagaaggtctacaagcctgtagatctcgtatcacatcgggattccctggtgtttccagatgtctcgggtagtactgcgtctggggcagcatacttttccagagaagcgtggactcgggctcttaggctgagggactacagcaagcgtttctgggttggaaacggtctggggccccattgacagctgggtcctaacgccatagggcagctgggtggcattgaaagctctgggtccagggagtcagaggggaatgtcctacactggtagagtggcattctgactagagagaggtgcaagtgagagaggcggggtaattccagcccagacagattgatgattgattgattgattgattgtcctgaaggcttagaagtacttgtaggaattctcttgggaattataggacaagaggcataagtcctcatgaggtagcccagggtagcctggggcactgcaaaccgcactgcacacccagctccagatcctcctatcgtgatttgcgaagaccatctgaaatagcgatctgctcataatgccactgggaaatctttgctgggcgtgaagcccaggaggccccgccccttcccctttgtctccagctatggttcatctctctgcttaccacccctcccctcctcagccttctgtgctccttcaggtgatgcccctctgcctggagaactgtcgctctgactgactgctgcttctccctcaggtcagggtttaggtgtcgctccctctggagctgttcctgctgttgacctaacactggctgaatgcgcctgttccctgatcgcctcagtgctcgctgtatctggttaccattgcttgaacactccgtagtctcctcagggcagtgactccttcggggtgagactgtacctctgagacactacattcctaatgttcagcctggtgcctggcgcatgctgtgcccagcagatctctgcagagcacaggaggtgcccggtgtcctaagaaagccctagttgctaattaaacccaagtcagttctaagtttacaaaagtctttttatgtgactgtattagtcggcatttcatgagtacactgaaatactgcagacagaggtagtctaatccacaagcccatcgttttgccctatgtcaaggcagggcaccatcatagaaatgcatcatgagacagacctactcaggcaggttggcagctccccacgttcccctgtgaagacaaaaccccagcagcctcagggtctgccactagaccacaacgttctacctctcaagagttctgcccgcagagatcaagtctctaaccacatgaaccttggagaccattcgagatccaaactgtaacagtgacaaacgtttgattcccttcccccctaataacttcttctagatgtttgggaaagttgccatgagagataacaaccagatcaataggaacaacaacttccagacctttcctcaggcagtgctcctactcttcaggtgactgggtccttgggggtggggggtggggtaggagtggggtggggtacccctaaagttctgaacagatggggtcatgcttgctcttgatcccattatttcttgatagacttctgatttgttgttcttgtttgatatttcttactttggtttgaaacaggatctcattctgtagcccaggctagcctggaacttactctgaagtccaggctagcctcaaatcataacagtcttcctgcctcagcctctcaaaatgctgggattgtatgttctactactctcagctgttttataccttttaaaaaaacattttttcatatgtatgtatgaatgtgatatatgttcgaggtggacatgccactgtgcgcatgttgagatcagaagacaagtttatggagtcagtcttccttcatttttacataggttctagggattgaacccaggtcaccaggcttgcacagcaaacacctttcaccccctgacccgtctcactggccataattttgtactaaacagaactagcatttcagttagagaggaactgactgcattgttaaaactgctggggtcattcagattgtgactgacagaccaccaaaagcaaattgtaggatagatatgtatgtgtaagtatgcatgaaggatgcaccagatcacaaccagggaaacagaaacacagtggaaacctaggaatttgtaattcccaaaattaacctgtaagccccacatgcccaggaatcaggtgacttcctggaatgctgggaattgtagttcttgggaaataacaccgccacatgggaaagtactgtggcctataagtttgcccttataaccccctgcaacactggctctaggccattccagctgggacattctagccaatggccttgaccaaagtcaatctcttggtcagtatttatttttttccctgtaggtgtttttaaaagaattacttatttattttatttatatgaatatactatagctgtcttcagatacaccagaagaaggcatcagatcccattacagatggttgtgagccaccacgtggttgctgggaattgaactcaaaacctctggaagagcagtcagtgctcttaaccgctgagccatctctccagcccagaatttaatatttaaatgtaatatttaataaaggcttgctttaaaaattggtccaaaatggtacagttgttttttttctggtgaatcacaggattaacatattggaccattactgcctcacattttttaggattggttttaatcccagctaatttaactttgcaaagaatcttcctcacagtgagagaactttctagaaacaaggaagcaatgtctaatgaccccagtaactgtaacaactcatttatttataacttaggtggttttcaactctttcaacagaatcagtcaggacttattaaataactaatagcaatgtttgatgaagagacaagaaaaaaaatgaacatccattaatataaagaattgaatcagacatcgttattataaatcgtatcataccagggcctctaagtaactaaattgtatctaaaagtcaggcttccaggctgtcactaatccaaacggcattgctacagttacatacattttgcacaagctaagaattttcttcccaaatgtctaatccatcagttccttgccctttccctcaataaaagccctgtctcttaacttaaacaggtgtgcaacaggggaagcctggcaggagatcatgcttgcctgcctcccaggaaagctgtgcgacccagactccgattacaacccaggagaggagtacacttgtgggagcaactttgccattgtctacttcatcagcttttacatgctctgtgcattcctggtaagcagtcttggtaaagccccttctccacttacaggactgcggtagcatttgaggttcagaccagtaatgctgccctgtcgtagtgctttgaggcagttggcatactctgggcccttctaggcaggtgtcttgcttagtctggcatgtgttgctgccttatgggatgggatgggttggccgctcactggtgggctggggtcatttccagccaaccttgttactgaaggctgctgtttcctttcaaagatatcaaagccactgtacgtggctttaagggcctccaaagtgtgagctgtctcttgtcacaattaaattataagattacagtgtgcttcagggtgcgagctaatgcaccctcccgccccctcatgagtctgtgccaagccatctggtcagagtcctgccctttccttgactactttctggcgagagaatattatggcctgcctctgcaacctggatatgtgggttccaatattccatgccctgcagttaggaggcagataacagtgcaagggacccacccaccaccctcctgattcactcttccagatcatcaacctctttgtggctgtcatcatggacaattttgactatctgactcgggactggtctattctggggcctcaccacttggacgaattcaaaagaatatggtcagaatatgaccctgaagcaaagtaggttgacgaacacccctctggctttcaggggtcctttgggaatggctgtggtgatctctgcaggggtcggggtggtaaactgagctcatttggggacctcaggctgtactttgcttccaggggaaggataaaacaccttgatgtggtcactctgctccggcggatccagcctcccctggggtttggaaaattatgcccacaccgagtagcatgtaaggtgagtgttctgccatccaagtctgacaatctattcgctgctttgttcagtacacacataacactaatctacattcgccaggcctttcttaaggtgttagacatgtggagataatgtctctgccttgacagcaccctcaaatttgcaatacttagaattctgtcagggataataatgggatgaagggaatcctacaaactgtcaccgcgtcagatgtcagaggcgatgatgtttaggccaggctcaggtgactatgaatgtcaaacagcatgtgtcaggtctttgggttgatccctagcgccactaaacccacatgaaaaacagaggagacgtaggagtcagtcagaggcaggcaggcaggtgggcttctcagacaggagaacagagtccagatagaagccagaagaggaagagcctcagactagccaacagcaaggcattgggtaatcatctgactggaacacaagaccaagtggcagaggcctctgtccccaagctgaacctgaatattctgttccacaacatattctgtggaggacgatgagattccaggtcaccaactcagagttggtggtgttgacatgaagcggactggaggaaggaactacatgggactgccaggatgagggccgcggggatggggagagaggagtgggtagcatggagatgagctgaggcagtacaaggggcacagtgctgccaggtgaggagatgggggtgagaaaaggactaatttagcccttggctcgatggtggtagacctagggccttagcttggtggtggtagaccttgggccctagcttggcagtggaaggtattgggtcctagcttcccagttatagacagggtgacagattgcatgtggcctctttgctgtagaattctgtagttcctttccctggggcatgaagctgaggtgtctctgggatgagcttaggtctcctaccctgtttctctcatccccacactggtcacgtggagccttagttcacactggtccttctcccatagagccacagggaccttctcacattattgtagcgacaggaatgcaagttttgtctgttgaacttctccttgaagaaatccattcccagcacagaatggaatgaattaatgcacagaacccagctgaccgcagtcatatttgtctggactccaggaccctttacctaaaggatttaagtgggacacaaagtcagccattttgctgacttaggtatttgtcaggaagagtgaatgaatgcccatcatcctggctgcactggctgtggagacaggaaaggttgatagtggcatttggaacttaggtaggttgcctagacaactgaatcctcgtccctcggcagcggcagcgtagaaaaaacatccaacctttcttttggaatgaactttttagccaatattaactttggattttattttgttttattttttgagactggctgacctggaagtcgctatatagcctccccaagctaacctccactcaagagatcagcctgtctctgcctcccaggtgctaggattaaaggagtgtgccaccatgcccagctagaatttgtttttaattaccattgttaaatgaacttcccatgtgtttatgatctacttcagtcctcacaaggcctattagcctgccttgctgactggaacccaaagaaggtgtctcttaccccaagttcttctgcaactctccttgatgctggtgttagaggtacttggagaggggtgagacgtgggaagtattgatctattctgaaagtccaagccttcagagaagccatggagacctccccaagatagcacatgatgatctgtctctggaaactttctgaaagaacagtagtgagttctactgggtgacaggctcaggccctgtgcctggcctatgtatctgctgtatcatttaattatcataaaatccttaaggatgtacctagagggtaggcctgtccccaggacacagagaactaactactgaaacatgaagaacacatgggcaataaaatttaattatttaacattaactagcatctgattgtcaacatttatatgtcacaactgaactttaaactttgttatctcaggttcctcacagatgttaggttgtatctgtcagtattttccagagaaataggactgatggggtggctgtgggcttatgtgggttatgtgtgaccaatgtctagctggccatgtatagatgtacatacatacatacatacacacacacaggcacatacaagggccggtttattatgtggtatgggcacatgtgatttttcaagttccacgatctgtcatctcctagtgggagactcgggatatctgtggtaccgttcagtctgaggcctgaggcctgaggcctgagaaccggggggactgacgagatacatttcagacagcagtagactgatggtctatcttaaactgataggcagaaaggaaaggcaatgttttcccacttctttttgtgctggagttaaatgaagactgccaacttttacaggcatttgtgtgacttagcccaccaattcaaatgctagtctctcccagaacaccttcacagatggacctagacatgatgtttaagccagtatctgagcagcccatagacaagtcatgttgatccctataattcgccgtcttagagaggctcccagatggtttttgagttgaagtgaggaacatgaatggggataaacaaagaatggacatcaaaaggggacatggctatctgtattctcacgaggaactcttttttatctacagagattggttgccatgaacatgcctctcaacagtgatgggacagtcatgttcaatgcaaccctgtttgctttggtccggacagctctcaagatcaagactgaaggtacgcactccctggaagcaggaagcgaggcaggcagcaggagagggagatgttacatgcgcacgcgcacacacacacaccccacccccaccccccacaccccacacacacagagggttcattgtaggaggcaggggacgcagattctgcaaaggctggagagtgagcctgaggtgaggaagcagaggccttgcagagaggcaagaagggaggagagagatgaggagacattgccagtggggagacaggtgttcttcacaacgctgaagctctacccagcagagctagccccttcccacctagcgcatgcttcttatgctgcaaacaagcatcattaagtgttccagaaggtaggagggcctactaggtgatgtgtccctagaaaagaacctgtcaaatagagagaagtcaagattatgagggcagagtaagtacctacatagggcccgagatgtgtcttatggtgaagttttcttgtgcaggaacaaaggcaggaggagatggagggagagaaaggagaggagaaaaaagaggagagtgaatggaggaagaagaggtagaggcagaggaggaggaagaaagggagaggaggaagtagggaagaagggaaggaggaggaggagggggaggagggagaggaagcagcagaggcgggcagttgccttctggtgctgggagccaagggaggagtgtaggtcgtagctggggtaggttgctatggcagcagaaggtagttgatgaattctcaggtggaaatgatcacccccccagaggtggcttggtaaatgcttctgaatataggaaatgtatttagcgatcactctggatcacttctatcagaaggcaatacaaggacccggcaacataacgagggcaggagagcactcggccacaaacacaaagcctggtctatgcagtggccacacacccctctttttaccttttggatttagggaacctggagcaagctaatgaagaactccgagctgtgatcaagaaaatctggaagaagacaagcatgaagctgcttgaccaagttgtccctccagctggtggtcagtggaacctatttcccaagtagttcttgatcaagaaattagtttcagtggcaagacctccagacagcccagagagggagtgcagggtgctatcccagaccattagagtgtgaggcccacagctaaaggagccctttggcttcacccgaaaatatctggggtgatacgaagacagtcaaaccaaagaggggcttcagtgggggagaagtccagagcccgtgaggctagagcagggtttttgctgtcatagaaaatcagtggtaaaggacatgacagcactcacagagtgaaaagcttgaactctcgccctaaaggaaatacttaaaactagtctccggtcttaatcatctcaagaaacgtggggagttttcagaaaagaatacttctaagggaattttaagaagacggcatttcccactgtagttaccaagggtgtcctttaatgagatttagagatagaactaacaagcatgcttcttttgttatttatcacaaattaactgactaaacatttagaacttgcatatatataatatctctctatattatatatatatatatatactgtttctctatttttgtttaaatacttgtggacattgaagtgagatggttattttccaactgttttgtttcaagttttaaaagtgcagaatctccttacccagcgtcccgtctccctgcagtctagctaaccctagcctggaaacacgataaacatctggcatgttttataaccaggcatggatcagaaccagaagctgaacccagcacccagactgtgcgagcctgtggctcctgagggacagagagagccatgcgttagccactcttgcttcttaggaggcttggccttcatcatgattcaggccacccatagctggcctagccactagctcaactctgagaaagtggctcagaaggaaatgaccaacatggtgggaattcccacctccagacccctagccccaagcccagattctgcacttttaaaactcctctcggtttccgctcttttcctttcagctgcacatccaagtggtcgcatggcttagatgaaccgcttgttaaaatgttgtaaccctgtgcctgagcttcctctgcagcttccactcctctcaactctcagaatattctgaagcaattctgttttagggtggtggcatggaatcagagttatctcttgccaactggattcccctacattgtttgttgaactctggatgcatgcgtcaggatagcaggctgtgcctgtctgtgtaaaccctccactcacgagcctgcaacactcccctctctcttgttccaactcgctctctttggaaacaccaccttcatagtggtccatctgatgcccacaggaatagctctcctcacacgaggaggtatgcttgaagtgtcacctgagtcacggggacggtgctccatttcttttcatcttactaaggaaaagaaaagttcagactttggcttataatctagctaaactcttcttttgaaaaactgaccaacatttatctccattggacttttcatggaggatgaacacacacacacacacacacacaccacaccacacacccacacatatacacatacacacacacgcgttctggggcttggtggttctctctgtctctttacatggtttggggtttgggatgataggagttaatctggtcccccatgtgatattagagaagaaagaactagagtcttataaagacatagaatgctccataaatttctatagtgcccactgtagtgcctgcttatttactttacatatcacataagcacattgccaccaaaggggaccacacagcacctttaggccttggtggatagctctggttttagtttctatattcgtcatttgtctctttctctttctctctctctctctctctctctctctctctctctctctctctctctctctctctcctttcccctcccctcctcctttccctcccctttctctctctttctcatctcccattggaccagtgattcccagtctttctctcatagtggcacacttaagaaatgacaccatgacatataccttgggacagatgggtggttcgaagtgttagtgtctcccatagtataatgtggttagagaccagcatgatgcgctgcctatgtccctgaggagctcaggagaccacataactgaaggagggaacagagccagatgcttgtctgggcagatttgccactgggatgtgatctgagctgctcatcgtgagcttggtggaaacaatgccaagaaccagccaatgaggacatgctgggattttctttttctctcctgtctgcctgcagtctgacccctgctttttatggggctgagatgtctcagcctggaatcttgcctgggttctcagtgctcccttgtcatatcttccaggtcatggactccccctttctctttagaagctcctttccctcggagaacctctttcttttggaaattccttcttgagtcataactctggttccttggtcccctgggtgtcctcctgtccaagatggcctcaccacatccattgcttctctctgtccctttcctgtcaatgatcaagctttagcttttcttgttcttaggagctcttgttcaggccaggtctcttggtcctcctgctttatctcagtggagataaccatgtctccttctagtcctgccctatggatctaaagtagaagagaaaggacagcaagtgcatcttttactagaaacatcttggtttaaagcaatatgagcctctatgttgaatcaggagtttcccagggctcaggggaccctggagtacaaaaggtatcagtatcgttgaagtggtatagattctagactcttagatacattggcccagcagccactggcctacttggaaggagctagaaagggcagggctacgtttataccaccagaatggcagctcagaggaaagcagggggttgggtgtggccaaagccactctctgaagagagaggtaaagttgggggagagaagggccctgggctcaggccttggccagttgacctgggccagtcatgtaacttctccctctctcagaagagtgagcagagttgttatgtagaagttatgagacccacgaggagttatccagccatggtgcctagccatggctgatggacagagtggtcagaagctggagagagggcaagcatgggctttgcagagcaaatatcttggcttgtttccctatggatggtgccatactggatggtggagaagaaccagtagccagtcagggagatatgagttcagatcaacacagagccccgggtttcttcacttgctcctccatcacaccagggcttccttggctcaggctcaggaggaatataacatttctcaaggccagttcaccccaaaacagactgcacaagaattctcagcagcttctggcaggaatggctggagaatcttcttccccaagtgacccagaagccgctgggtgggaaccataaatcagccatacctcccaagtgagcactaagtaaaacccaccaacattgtattcatggatacagtgggtcccagtgatcccaggcctcctatgctccagcatccattcagtgagtgatagtcttgtcttggtctgaagtcatgactcttgtcatcagagggcacgtgacacaaggacagcccacgcctgggttggagtgctttattccccttctcttaaacatccttagttcttctgacatgggacaccattttataagggagaatacaagctcacctaagatcctcttgtccccagtccacgggactcttgcaaggatagcttgaccagaagcctgaggacctacaactgatcctcagcctctgcagnnnnnnnnnnnnnnnnnnnntccctgatctgtgtctctcaccagtggggtagctgcgcagctttaggtaaattcacataagagagggctttcactagccaaggtcagagttcctgaacctactcagggtggtttcaagtttatctcctccccttaggactctaatgagctatcagtgtgcctctagtaaggaacgggaaaccccatagtaagaagaaaggaatgaagaagtccctgaagacacgagcaatattatagaggcttctttgtaatcgagcatctccactcacttcgtccagagaaagcaacccctggcaccacacacagcgagcacaggaagctctagtccaagcctcccacacttgggcctgctgtctggatggtgcctgacacaggcaggctggggctgacccggggcggggcggggcaggggggacacagttcacactgacatgctcagagtggtttaccatgagacagtcagagcttctattctgcctcatgcatcaccttcaaagttgtcagcagagtcctgattccccggtgatacgtgttggaggttgtttctgaacagagcagaaagaaagcctgctcagtgctgaagttagttggagctgtcactgcaatgcagaaatccagccgttctgaattccaaaccacaaaatggtctcagagcttattggtggaagaacggggggagcgtgtgagagctggatctgcagtctctgttcctctccttctaagctcatcagtcacctttctaggtcgccatcttgtgacatagggatttggatgcataattgcacttgatgcttacagtaattacacatgcaaatttctatgcacggggtggaaaaacatgtggcctgcaaggcctttctgttttgtaatgtttattttaagtaaataaccaaggtggcgcttcctatcgttactaatatgctactctatttaactcgtgataaatatacattactttctgcaactctgaggatcagtttacttaactgactctagcttcgagccttaactgctttgcaaagctttgcttcttgctagactgagcaacccgtgttataggctgacagcccagtgccctttgtgcaccgtcccaccccacccctgcccccagccagaagtgagggtttaggctcttggtccaaatgtgctgattcgggagagctgtgtctggtctctccgtttagatgatgaggtaaccgtggggaagttctatgccactttcctgatacaggactactttaggaaattcaagaaacggaaagagcaaggactggtggggaagtaccctgcgaagaacaccacgattgccctacaggtgaattgccctcttgctctgttctcttctcactaacaatgttgccagctttgatttgaaacactagagagctgactattcatggttgagcagtgccacaaggattttgtttaaactgagatactgcccactgcccctcccactgtggactagccatttccgggtcgcaaggtaagtacttcctcctcttcgtgtcttctccgttgagcctcgcacctgccatcatctggtacgcgtgcaaaaccctcaggacagcctgcaatgggaaaggagtgaatgtcaccccacaccctagccacctgagccttctccaaaggcagcgtcctcgaggcaggccccctcccgtagccctgggctcagggtccagctgcccagggttaagctttccatcagaacgcaagtgctttgttttgtttctgtttgtttcttaccccacggcttgttggtttttggtccatttcaataacattcatcactccctagtatgtactgtgtgcacatgtgtgtggtgtgtctgtctctgtgtgctatctcctgatggcggtaaggcttgctgtgcaagtgctacacacataggccagcctttggcccatctccctgtctccaactcaggacccatatacatgctcagacaagaatgcatgtacaagagtgcctgtacacgtgcggacgcgcaaacacacacacacacacacacacacacacacacacacacacacacacacacacattcaactacccctgccaggccctgaaagtgtgagtgtggcatttagaaatatctggtctagtcaggggctaggcatccaaaggccatagaatcctagagatgcctagagctctgggtggaagcaggcatggagaggcaaggagacatgctagaacttgcaggcaggggagctggggaaggtggtttagggggtgatggtgtttaaagaggactggggacagatgtcaggagaagagaaaggggaagtacagaggttggcaagctgtcaccaagtcctacaaccatgctatctggagtgccttcagtctgccataaagacactttccttgtggtttaaaaagtttacctgaaaatgacttttatgtccctgtcctcatggttcttgaatgtggcctcgtaggtgtcaatgggggaccacgtggaatagtcctgtacttagttccaagagcaaatcaccagcattgttgtgtgtgcaaagggggccataactgtggacactaaggcctgactgtgatcttgctgtgagaaagactatgaataaggaggatggtgaatggggaatgctgggtgtgtctgcacatctcaggttagtagatggccttgtagacagtgaccagctgactcagagtgagatcccaggggctggaagcggggatattgtgctggtgggacaggtggacacctatgcctattcaagccagcctgtgttctttcattccctgatcacatgaccttttggtaatggcccagccatttggctcactgtgtcttttgcctcctgctgccctggtttgcaagaaataactctaactctaagattactccagttcacaagtagcctcggatgacaaaaactgaaaagtccagtttgcaaatttgaataggtccctggtttgtacattgcttggtagcagcacggctaggctggccactagcagagaattggtgtgcactgaaagttgtccccctcacatgaccttctgccccaaggagaggctggctggatctctgacttctctgggtaccctctacctacctgaaatggcttgctgctttagaagtccagttgacggaatcaaaacttggcttcctagaggggacttaatctcttttgctcctaaggtcacaatttgcagcagtcagtttgtctctgagctcagagacaatccaggtttcagtagagatgtgacatgtaaacacttggagctctgtgtgcatgggggagggctgtaccttttttgaagccccaaggctcactctggtggcagagctcagtgttttggtattctgaaatagcataaatgacacatggcttaagtagtcactgcattttgcagatgcagtttactgagccttgagctggtgctgacagaatgctataaaggttctgggtaagagacaaccacattatgctaaaataatgttgaggggtttctcctgtttaagtcttttcatcttgctatttaaagaaagagtcttacttcattggtagaagtcaaatatttctagttagacggtataaatacgttctcccagggttctattgagaattgaggccaggcctgtaatttatattaagtacacagcatagaaaattaagttgtgttcataatcttgacagttcagttctgaaaaggcatttgattctgaaacaaacattgaaaatagaaagtgtttgtctccttgatggataattctaattacatttttggcttcctctgatgcagaaatggctttaaatgtgatttgttactctccatttaattagtgcgtaaggaaacctccttttctgcattatgaaatatcatgggtggtgtagcagttaaggagctaggatcagtcgtgggaggaaggcactgacttgaggcagctagaaagaagacacatccttgagacagctgctgagggtggacttgtctggttgagaaggaagcaatgggcttctgatagcagggcccagtggggtggggcagggcggggtggggcggggctcccagcctggttgtagtgggacatggagtgtggcattattgtgtgagcaaaagtgaacagccaagcttgtgcgtgctggcctgcagagtgaggtctgtctgaagagctctcagaactggcaaccaagctgtgcacccccatttcatgccatggctcagcccgatctccccatgttcagaccaactgcagtgtgaaccttccctgtggtggatgatgactgaaggttctcctgcctctgcatggggaggagctgggcgcctgtgtcctggcctctctggtctgaatgagtgtgcactctccatccatccacccaccccatccatcccttcatccccatcattaaaactaaacttctctccagcccttctatggtgggagccagagagaagctgcatccggccttttggttatctctcagtcatccgacatacacannnnnnnnnnnnnnnnnnnnnnnnnnnnnnnnnnnnnnnnnnnnnnnnnnnnnnnnnnnnnnnnnnnnnnnnnnnnnnnnnnnnnnnnnnnnnnnnnnnnnnnnnnnnnnnnnnnnnnnnnnnnnnnnnnnnnnnnnnnnnnnnnnnnnnnnnnnnnnnnnnnnnnnnnnnnnnnnnnnnnnntcacaaccatctgtaatgagatctgactccctcttctggagtgtctgaagacagctacagtgtacttacatataatcaataaataaatctttaaaaaaaaaaaaaaaagaaccccatcctttgtgatctacaggatgtgatgagtaggttcaatggctttaatgcctgtgccttggccacaggtggggatggttgagagatgctggttacaagtagccattagcttgagtcttctgtttcttactgtggtcttctcagtacccaaagacagggaagcaggctcccagagatctgacccatggctagtcctgttaagtgtgtcaccatgtcaccttaatctggaaggcaatgggatttctcatttttagaagtaatggtccacccaaagccatagcactgctcttaaaatttatatatatgtacacacacacacacacacatacatacacacatacatacacacacatacacatacacacacacatacacacacacatacacacacacatacacatacacacacatacacacacacatacacacacacatacatacacacatacatacacacacacacatacacacacatacacacacatacacacacacatacacacacatacacacacacacacatacacacacatacatacacacatacacacacacacatatacacacacacacacacacacacacacacacaggttttcctttttactgtgagaggagaacagatgttaacagatgacatttcactggctgattcgtttgtttcagatgcttgaacggatgctttagagttctctgcctgagctaccgcaccaagctggttagtccgaaggcgcttgtggctaaggccttgaaagggcaaactcccactcgggcttatttctgctgacgcagcagcatttcaggagaaatgcaggcaccacagccctggggagaccccttccgagcaaggcactcctccggaaggaaggcagaagccgggctgtggctcatctgtggagccatggctgcctgtggcggacactgctcatggcggctccttttcatgaaagggaacctacgaattatggttttcccttccaagccagagactcagtgaaagggggtggggggtgggggagagagagagagagagagagagagagagagagagagagcacgtgagcgcgcaaaggggcagatgccccatgagaaatgaaatgaacacaacttgctgacaatggccagtaaaaaataataaataaataaataaataaaatgttttatatatatacatatatatgtgtatgtatatatatagatagatatacatgattaagcagacctgcgtaaggcaggcaactgactccgccccaaagtcctgcatccctagtttgcccgaactcccaaagactggcaggctggttggaactgagcagacagagttccttttctgtgacagcgcgtcacggcctcctgaccacccgccctgcttgctgcagtgacccagtccagaatgcactaataagtggaaggccaggaaactcagacacccattgaaactaacacacacacctgcatgccaaaaccaaccaggcaacagctcaggttccatcttaccgtgtcttcgggaaatgccaccacacccaaacctcatctaacattgttcgtctttagctcgcactcagagccagtctgggacgcctctttggaagcagtatggtctagtttcaaggacactgggagtcagggaacctgggttctagtcccagctccagcattcacttgctgcgtgaccttgggcaagacacttaacctctctgtgcctcagtttccccaactgtaaaatgggggtaataatgtcgacctacctcacagggctgttgtgaggatagctaagtgattgtagagctccttgaacgtatatttgcttattattaagactacaacaataataatatcatatgcctgtttactaccagaacttcaagaaattcttggtttggtttgatctcttttctgttctgtactgtagttatccattgagagttctctctatttttaagaccctaggcgatgcataaggatgcaaacaggtaacctgtcaggtcgcattttcaagtagcaacaatagtagatttttgaccaaaatgttggttgatgagggatttgctatcaaattctaaactccttcccagaggggggtcaagtctgtacctctgatattagtctgagatgcccaaaatagccaagaaaggagagccagtgttcaaagatcaatggttatggggggggggggactctaaaaaaagaagagaaggaaaaggaaaaggagaggaagaagaagggcttccaattcattgatctccttttgttggcttggagatcgtagcagggtgtgtatgcatgtgcatgactgtgtgagcgtgtgtgagtgtgtgtgtgtgtgtgcttgagtgtgcgtgtgtgcgtgtgtgtgtgtgttacattagtggatggaatgagttggtagggtagagaatgaggtgaggtgagttgaaagacaaggaagagagagccaggactctgtgtggtcctactctggcagaaagaagtgttcctccaagcatctctggggtgcagctaccctgaaggccaggctgaggtggtggggcaccccccccacccccagtgggcaggatgctcctttagacctctcccagggaagcctagaagggctttcttagtgacaccttgtagctatgacatttgccccgaccacagggcttccctgcctcgtggcttcactttcctacacaatggtggacctcctgggctcgctatggaaacaaacccagctttggctcatgcacaggtgacagtgagataaggagctcatatgggttttattcattctcacggcttgaagcccccatggttgatggtgtgggaatgggtgggaaccaagccttacatcatcctgggtggcctgtccccttggaagagagcaaagcccacccatgtctgatcttaatgctgtacccatagctgttgcctctagcatccaaatctctcagccagaagcctgcccttccgccccatttctccatgttttagcaatcactgggctaactcttatcccggcaggcctctgagattacctcagagatgatgggcagtacctgggtaagccactgtatcagaatcgacagagaactgatacatcaccctgagagggcgaatggttagccttacagacatggatttaaataaataaataaataaataaataaataaataaataaataaataaaaggactgtctcttagccaagaagcttccctgcccccaccttccctaccccggccttgatatcacttctgtttctagacctcgtgtagttctaatgggtagggctgtacaggcctttctccatgtatcacctaaacctatagacgttggaaaatgttaacttgcttacaagcctgatttaagggatccctacaatcccttgggcctggctgtgttgcagccaaggctactttagggaagacagccaagcatcagagaggacttcccccagctttcacacaccgggggaaatttcctcagagctctggcagaagaacaagcctgtggcagagaggaagatggaagaaactagttgggtttcacgtttaaaatcttcaacgatgggtacagcaaacccggtacccagcatctgaatctgcggtgctaaacttttagctcctgggtcaaatgtgacagagaccagcatccatctgtcacagggaagccacagtagggtgggaagtagattcttatcagaatcgaaggtcatggtatgacccaattcagaattagtccacgggatgaccggaccggctttctgaagaagggaggttggtctgtactgagaggagtcatttttatgtcccaaagtccttaatgaaaaagttagcgcaagtaatgtcatagccgcagactcttatggtcgcatgttctttactaatattcacccagtgtccctcaattgcctatcatagcacggctccattatctataggaaagggcttggtaagtaaagcttagggttcccaggtgagtggatacctgggtgaccttactctccttggttaggtcttaggcctgagaaagttgactctgggacagtaaggagaccattcatgatgcagtgttgaggtcaagaagccatgctagagcatgcccaccatactggaacttgagaggaagaggcaaaggctagctcagagaagccacatggtggacagaggtggagacatgtaggagggtcagaagagctgagcattaacaggagaccacagctgtgctgctgggtaggggacagattggttggcagttctcaaacatttcaatcctagggactttcctagtcttaaagtttatcaagagcccttatatatcaatatttactgtcttataactcaaagctgattaattttataaacacaagaatatgtaagcacaaagaggccagggggtggtgacaaccctgtcattcggccttggaaaccttgctgcacacttagagagtgagaatatacaaggccaaggacatccactcttacacgacccccagggacccctgaaggagtcccaggatgccttgaggtccatgaaccacatcttgaaacatcactctggggagatgacccaaagttcccccttaaaggcagaagatgttggagcctcatagtttccatctgtgcccaggaggctcccatgtagctggagcactccttggtgggctgcttctgctcctcctcagcctgtgcagcccacacaccttcctaattgaggccaagggtcaggtggtgtggacttcactgcctgtggtgacctggaagagcaatggttagagtcagtgagtgttagaaatgtgtttgaatctctaccacctctgcatagcacaggtgagaatcagggtgtgtgtgtaacgattaggaaccattcatcacgcctatgtttgggggtgatgtaatggtgagagtgagggtgtgtgcggtgctgccggagcattcgtcaagtccacgcagtggaggtgatataattgcttgcctacgttagaaggataaccttgaatgaatgtgtgcttgagacttggttaccaccctctccctgcagattgggaaaaacaaggcttctagctgaggttttaactagttctggaatataatgtaacctattacatatcgtcttggctcatccctcctcagtatgtaggctcaaaatgacaggaatatgattctgccaaaggagcctaaaattttggagtctgaattttatataatgctgtctgcatttttaggaactgttcaaaaacgtctctgattctgatgttaaaccaggaatcagagtggaataagatggaagggttggtagtgtggcccagtggtccgtgcttagcatgcctgaggccctggtttagtccccaccaaaataatgtggaactgcaagtggcctctctgttctttgcagtcataggttgcttagatagcgctattaaataacccctttagctttcagaatgtggtggcacatatgatttgtacagcccagcgctggccctcagtaactcatggtctgatgactcgtcaaggagaggagggctcgctgtacatgagtaatggagtgtcatagccatgattctaaccctttatatctaacacgagaactgttcacaatggataacaaaggccacaccatgacatttctcctggaggaaggcagtggtagaataaggggtgtgcccatgtgcagaggaggcgggggacggcacatagacaagcctgttcattctttcaggatttaatctcccatcttctaacagctagtctaaaactgttctttgtaattgagtgtgggccaagtcctgcccctcccccctaaaattaaccagaacttgtcaatagtgaggtgactgcatagagccagctttggttaaatgaggcgtgtctgggttgaggagcaggctgtgccacggtaacgttctttggcaggagtctgaagccctggcacccactccgtgaagatggagggtctctcccagggccgcctggagacttgcctctctgtcctccactgctacagcgtaggtctggggtgggtctctgggtgtttgtgtatgcatgctgtggagtgagagttggcagatggctggcctgacacagggagctagtctggggaagcaggcagcaaatgcttttcaaatgcatccagacagacagcaccccaccctgagggtgagccaggaagggaaatgggcatttctgctccacagcagagcgtcactttatgctgttgcttcagagatgttgagagagaatatatttttggtgacttaatcattaagtagagtaaatatctataaaattccaattaaatggtgtctaaaacttaaaggagcagtctacaggcaaaatgccaacatttctttttttaaacaaatatttatgataacagctagcattttaaagtcaaccagaaactaggcttaatcctgtttaatattttgtaagattggacatcttaaaacaagtcaataatgtttatattttatagcaattctgtgtttattcaaaactataactctactgtgatgttaatggaatgactttatatggctatgtgtggattaagtgctaatgaccacatttcaaattaaaacaatatttttgctgatagagatagatatataaaatatgaaagactagaaaattttactgactgtaatgttttcttcaagaaaaatactttttttttttagtgttgtaagtaatttctctgagggtttaagatagttgtctgtattctggaacactggattctgtgcctctgggggtttggaacagcctaagctaccttttagcttgatatgtgtgctagaataattttcattctcgtgttttgtgatatgtaataaattcagggtgctgtgcttatgctccatttcaattctagctgggaacctgtgtgtcggtcccctgcccccaggtcccacgcaagagagcgagtcagccccactcttaccaggtgcgctttgcgaactaggatcatgagttcaaaaccctctgctttcacatctgggaagagtgttgccttctctcctcctgtctctttaataaatatgttgtcattatctgtttggggaagtggtaccccaagccacctgtcaaccctctccatgatttatgttgcaaacgaaccttctgtcctgtctgtttactccccattcctgtcaacgaaatcctaatctcgtgtaactctgaaggtgtgctggagacagtttctgttttcattatgcaactgttacatgtgtatttcagtgaaatgtcaactcatcaacgaaggatgatgttaaaaattatccaaataaatagttttctatttcttttaatgatacctagtccagtcagttaaatgagagcaagactgttatttaaactggcaaatgttcctggccctatgtcttgagaatccatctgcgttgatgtgcacagtgtacctgggagtgtcaaagagaatgaatataacccatgtttattttatggaaacagaagcaggggtttcaagcattgtgtcttatccgaatctcaaatacgtaatagacctctctcgaaaagtcagacaagggactctcaccactcttcttgtgtcttgagaattgcactctagagactgaatgagtgggtatgtatggccgtactccacatgcccgcagctgaactgagtaagaccttctaccaacacacccctggagctgccttcatggtatttctgaggaatagaggtgggcctgttgcagacctagaaaatgtgctggacataagaatctgagagagagagagagagagagagagagagagagagagagagagagagagagagagagagagagagagaacaaacttccaaaaacacgagtgtatttgtggttagaagggcagcaggaagtagctttttttggcacgccatgaactgtttgggaccctgggatatgctgggatatgcctctttcccttcctgtacattgatatgtatgctagaagactgtctttaccaccttctgtggttacataataagtgtggggtaccatgcttaagcttcatgccatttttagttgggaatgtgtgtttgtcccctctcccaggaactaaggttcctttgcctaacattcctaggtaagacccataaagcttcgattccctagcttgacctttgtccctacaattcatgaaacagaaggacctgctggtgtccaatcacagaagggttcggaacaaaccagcctttttgcagaaccacctaatgaaccagatgttcttgcggatgcagctgttgttataaagggccgcttgagaagtctctggacaaccttacattttgaattaacctttgtcaccaccgatgtttgcagatgaccagctttgagtattttgacaccaggggttctagctcggcttagccccactctgctcacctcctctctccttccctcccctcttcccttgctccctccctttcccttttccaagcatctgtcccaccacagtgtctcaggtgtgagcactgctctttatctcagtccttctcaaagctactcaacttctgtgtggcgctgagaagaaaggccaggaaagtgctctctgcccagggacccagccctccacgactgtcttctgtaaacggccctgaggttggagcacaagctgcttgtccaggcagtgtctttggctccctgctagcttgtaggggttactatttgctgcctgcataccggaggtagaacctaagaccccagagcgactgtggagaaggatgaaacccctgttagtctgaagtcagcatcttgaccttcttcaaattaatgctgaaaactcaattttctcagagcttgtgactccctttaccctgtttacaggccgttcacatggtttccccgacagaggtgtggatgatgcagactttcccaggcccatcatgactgaccccttgggctaaggaaggccagcagagagggtctatggggaagtccagagagctgtcacccgtgggtcttgtactgcctgtagatggtagcaagacctcatcagtctgtgtggtttcagaatcccgccccctctgctagcaggtcctcagtgtgtatgggatatataggccaaggacccccccccccccaagggctggagtggctccactgcacagcagcctcagcctgtgtgactgttgatctgtttccttgtgacctgagtgtgctggtgactgcaatgtatgatgtcacccacctgttccatgctttccagtgagtcagcggccccaatggctgctcgtttctctgctcctaagccagctcatcctccatgcagccaggcagttctcgtcccctcgttctttttaggaacaactagctgatattccttgccctgtttgggactcaggatatgcttctctgcaagcagccttcctgaagagctagtcaggggcatacactgttagctgtgaccattcctagtgctgatagccaggtcatatgctgttgagtggggcatttctaggggaagttacttgatcacaagccttaatgggcccaacgtagctccactgggacctactgacaccccatccctaacggcctaggtcacagttacagttagtcagtacttccttggattggcctttggagaaagcttcccctcctactgctccatcaggctggaccaggcctcctcgatatctaacctgttctgccattttcattgacctaggcgggattaaggaccctgcatgacattgggccagaaatccgacgggctatatcctgtgacttgcaagatgacgagccagaagactccaaaccagaagaagaagatgtattcaaagtaattattccacgcctagcgcctcactggccacatggagatagtggggcgggtggggctttggttagggtggttctgatccgcagaggagtgtggacaatacaaaccaggggcaggggctagagaggcttgcacatcctgccccactccaccctgggacctctctgttcaccagtacctcttgtgggccagaccagcctctttcctgagctttccccggtccccagctgtcagcttctcagctcagccacagcccactgaccacagagtccaggaacattctgggtctttctagcagctgtccacgctgccttccttctgctccagcagttctttgatctgccagccagccctcagcctcccagctcagagaaaatgtcaagtaccctaccttggggctacccaccaagccagctgggcttaagtcacctcatcttggagcgcctggaagaacatacccaaggggcagcagagagcttgcgccccagctcaggacttggtaaccttcctcatttcaggtgggcccactgccacacgagtctgtccacctgaccactgaaagagaggctcaggttgtctctcagggatcctctggagcgtgccctagagtttgtgtttcatgtagagaaaaaaaaaaatgacctaacgtagctaagcctgcatcaaatagttgttaaattacctggtgttgtctcccattattttgcagagaaatggtgccctgcttggaaaccatgtcaatcatgttaatagtgataggagagattcccttcagcagaccaataccacccaccgtcccctgcatgtccaaaggccttcaatgccacctgcaagtgatactgagaaaccgctgtttcctccagcaggaaattcggggtgtcataaccatcataaccataattccatagggaagcaagctcccacctcaacaaatgccaatctcaataatgccaatatgtccaaagctgcccacggaaagccgcccagcattgggaaccttgagcatgtgtctgaaaatgggcattactcctgcaagcatgatcgagagcttcaaagaaggtccagtattaaaaggtaaccttggaaagggtgatgctgttgtctgcccttgtcacacccgctccgcagggccagtcttctgccctgtgctctggcccatggtaactccctggagacatttgtatttgaacttgagagccacttgcctcttggcctctctgtatgtagcccgtgtgagggacctaccacataaggggtcacccactacccaccttctgcatggggtgttctcttaaaacaacagcagccacaaaatccacctccctcagttatggtaacattctttgggacaggggttggtgaatgtcttctgtaaagggccagtattttagttttggggaccattcagtctctcttgcaaaactccccaggtttgccatggcagggtgaacatagccagggagcattctttttttaatttatttatttttattttttattaattaggtattttcttcatttacatttccaatgctaccccataagtcccccaagccccccccactgacctcccacccacccactcccactttttggccctggctttcccctgtactaaagcatataaagtttgcaagaccaatgggcctctcttttcactgatggccaactaggccatcttctgatacatatgcagctagagacacgagctccggggggtactggttagttcatattgttgttccacctatagggttggagacccctttagctccttgggtactttctctagctcctccactggggaccctgtgatccatccaatagctgctgactgtgagcctccacttatgtgtttgctaggggccagggtacattcttaagaaacgaagcagttgggttcccatagagctgtgcgtgtagcactggaatttggactttgtagggctagaaagggcaaaagggttcgctgctttttactttgttttctgccctttataaatggaaaatccctacctagatcgtgggccacacgaaaacagatagtagaccatagctggccagcaaactctggtttgcctgcccccgctccagaagacaggctggtatctgcgcgtctaatgcttttgggaatgtctaactcttcttctccctccttcccatggtatgccttccctggatagaacccgctattacgagacttacattaggtaggtgcttgccgcttctgtctttgtctggaaactgtgctgtcctgttacccactacatttgctcagtgccaagccatcaaagcatttgttctcgaaatgccagagctttgcattcatgaatgggcagttcccacttatttctcacaaaggaaaactggggcccaccagtctgtccactttccctgcccctgtatagctggggaggcctaagctgctttaggggtccagattctcacgtggacttaggagaagcacagcccagacatcctgaaaaccaggccccagatccctctggttaatgtgtgtgcgtgcgtgcgtgcgtgcgtgcgtgcgtgcgtgcgtgcgtgcgtgcgcgcgtgtgatgggataatctcatgtacatgtgttaactagacttccttatgggtggaatggtcactttcctgggggcaagaggaaagggcttcaggatcattgcttcaagtaagaccaggaggttcttggtctgaggagtgaacaaatgagttgctcttagtcgatgtcactgagccctctgggcctcctggggcttgaggccagaaggcagggcatttcatggaaatagtgttccgacatagggcagggaagcctgtggaaaaaatttccaggaacacctctctagtggcagaaaagccagaacttcttcagcagcctcgatttgatagggcaggactgagatctctgtcccaggttctgaagtcacattggctggagctggggtgggggagtggaagtgaaacagctgggaacctagggacttttcgtgggtcccctgacttcagagtggaggactctaggtctgccttgctctgttattcacattacacctgtgtctatgtctcgaggtctctaggcacagtggtttggccctagcactgggcaaggtactgagaccacaagtacacacacacacacacacagaggcacaggcacagggcactttggccagggcctgagtagtcttatggccccggggcagggatgcgtaggaagatggaggcactctgagggaggacacaggctgttgcagaggcatggctgaaggatctagctgccacctcctcaagctctcagatctctttcccaactgcaggtctgagtcaggagatgagcaatttccaaccatttgccgtgaagatcctgagatacacggctacttccgagacccccgctgcttgggggaacaggagtatttcagtagcgaggagtgctgtgaggacgacagctctcccacctggagcaggtgaggggctcagcctgggcagagctcagaagaccagccgtcctctactctgctcctgttgagggctcagagagccacacacactcaggattcctctgacacatcagggcaggagttcaagtttgccttatttcaccctgggccccgggggccctcagaaaggctctggccctgggaactggacttccacggtttcagaccctgccatctcagatgttagattgttttagggggtgggtatttcgaggcagggcctctctacatagcactggatatcctggaactctgtagaccatgctggcctagaactcacagagatctgtgtgccttcatctcaagtgctggggttaaaggtgtgctccactacacctggcctgagagatgagttcttattaactgacataggaacaccagcctcagctatgtttgcatagcatgctggctggagtctcagtgactcctgcttcctatgccaatgaaagggcctcctgaaggtatggggacaagaggtaggaacagcttccctcaagcagaggtgcctcccccaacttctgtcctgcagaaagaatgctgctggctaaaataggcattgtacagggctggagatatggttcaaggatgaagagtgtttgccgtacttccagaggacctgggttctgtttgtagccccccacatggcccgtggtgctaacaactatcacttaactccagttccagggagatctgatgccctcttctggtctcaatgggcattgcatgcacagagcacacatatatgctcacaaaacactcatatatataatatataaataaataaatcttttttaaacataagacacattgcagccagtactggaggacaaaattacctaccccaatccttcctgacccgtgactcacttttttcatcaggctggggccaccaggttgaaatggtgctatggctccttgcctggctcctgagacacagcctcacctttacctgtgctctgacaggcccttttccaccacctcccaccagcgcccaacttccacattcactgatttggagccacatggacctatgtacaccccacctctggggcttgtcatcccaggtctccctctcaggtgtcctagccacccctgctggtctcagtctactttaacagcagcagcaggccagccttcgcatctctcctgtttggaactgaatcatgcccttcaaacaagaacccaaccgtggaactcaccactctctcccactttttacattgtactgagcctgcacactgatggcatgctctaagctccgtgtcctgccgggtacttggagagggcagctccttgggacagaggcctccaggagacgagtaaagggtagccagttgacaagctttgtgtgatcaccattcgcttcgggcctgagggtgtcccaggcatgaaaatgactgccatgtgtcttattccaagcctccagctccaatctccggagatggtccttgttttctacccggaagtttccaccactcataagacagggcttgtaggagttaggtcaagtgttcttgcccagaccctcacaagtgccttctcatgttttctctcactaactgccaggcaaaactacaactactacaacaggtacccaggcagctccatggactttgagaggccccgaggctaccaccacccccaaggcttcttagaagatgatgactctcccactggctatgattcacggagatctccgaggagacgtcttctacctcctaccccaccatgtgaggccagctttcttgtttagggtggagcctcccagagggcaccatgcctgtccccatcctaaccctggattaataattgatgtgtgttaccagggaagtgctggtaactcctaagaccagccagtacctggatagacagtgctttcctggcccaaagcaaaatgggggctctcctttctcctgtacctgtagggtcatccccaaggctctgccaacccctagaagggcatttgaactttgccaagtatgggtgtttgatgatggtaaagaatatccattttttgtgtttcggaggaaagaagctaaattgaggattctgtttaataaccaagaacagtcgaaacacaggagctcccgagcctgactgagcacacaggaaagaacatgggtggccataccccaccccagctgccacggcctgctgggagtctagtcaaatccatttgagtgcttaatatttaattagccccaaacacatgctgctaaatgaagcctttccttaatccatagataccaaacgaaacaggtgtaagtgaggcccagcaggggtctttgccctttggttcctgccacccctcttccaggtctgtgtcttcacttatcccacacctacatggccaaggggacacttgagtgccctggtcccagggcagtccagtttgcagacctgggcgagggggaacatggctaaactggcctgtatgcttagccattgggagtaggtaagggcagataagtgaaagagctatgtcttacagaggctgtagtgcaaagctcactggatgaggggacccggggcttattttagcagtagatcctgaatggatgggaggggctgtttttcttccaattccaaacagctggcctgcctaggtcttagggtctagaggttgtgccgaccgagagggccgttttctgtggttgcactggttagcaggcaaggcgtggtcctctttataagtagtaccagctcacctgggaggccctggcatacccctcagtactgactgtttccactccactggccattgctggccagccaatgaccaggcttggcctgttcttcatcgtggacctggctttttgtgaagtccagggtgtctgggaggcctctttggtccagtgtctgaggatccactaaccgagggcttgcagaagcctagcagtacagaaagtacagttggagtaatgcagagcacaggtcggggatggggagggagtctccctgaggcccacgacagggtggacaagcttctaggactcggctgtctttgccaaaggatcccagaacactaagcctggtacactataaacccagaagctgtggaccatcagcgagcctctatctgcaactgctgtcagcacacagcaagtacttagatacactcacatctaggctagggaaggtgggttctttctaggcaaagaatttggttattttccccggttaagctggttgacggaatccctcattttgaaaacagaggcttaaatatggggacctcagaaagatgcagagtgtttgtagggcagagataggatagcatggtgcgtctacgattctagaatggatctctacaatacattccggggcttgtaacttagcacagattccactgggctgcctgagagcaaacatttgaagtgattcattgctcccttatcgaaacgtcccacagctggcttgctccttttagccttcccatccctagttggggcattatgtaattgtttctcttggatgaagcatgtggcctgcttcttcctggcctccttgctgaatgcctcagaaagtagtcttgactctcaggacacattgtccagacagaatttatatcactacagcatcctgtgcttttgctccgcagcccatcggaggtcctccttcaactttgagtgtctgcgcaggcaaagcagccaagacgatgtccttccatcgcctgccctgcctcaccgcgctgccctgcccctgcacctgatgcagcagcaggtgagctgctctggccccacctgggatgcactctcccctggggatacacatggaggaagcaaagagcctgccccttctaatctgcttatccttgagcagcccttcctggtagatcccccagggcccattctgctggagttgcacatgcagcaaagggtggaccgggcatccttggatccgtgcttcctgtcagaggacactggtatagtctgagttaaggcaattacagacactcataagagtcccattgatggctgctgctactaattattccttcagagaggtggttccaccatcaagccacttgggcagcttcttgtgcatgaaccctctgtccatgagagtgggttaagggggcccacatgctcacatgaaaggcaactgagcctgttcaccagggcttaaggatagaggtatgcatgcattacatatatatgtgtagatatgtatgaatacatacatattgtcttaggatttcgttgctgtgacgagacaccatgaccatgacaactatactcttagaaagcaaaacatttaattgaggctggcttatagtgtcagaggttcattccactgtcatcatggcagaaagcgtggcagcatacaggcagacatggtgctgtaggaagagccaagagttctacatcttgatccaaaggcagtcaggaggaggtgctcattccacagtgagcagagcctgagcacaggattgtcaaagcccaccccaacagtgacacacttcctccaatagaccatgcctcctaataatgccaccctctgggccaaaccaccacacatacagtctttatatttcctgaactatctcatcagaagagctgtgtgggctgattgatgaagggagatgtcagaaacctgcacccagccagccagccagccagccagcagatctggatctctgtgaggttctgaccccaagctctaacccatatgtactcagtggccattgcagattttctagtcacctctgccagcacttaaaatatttgttttggagttactttattttacatgcctgcatatgtgtctgttcaccacaggcatgtctggtgctcttggggtttagaaggcatcagatccccagaactggagttacagatggttataaactacccatgtaggtagtggggattgaacctgggtcctctggaagataaattagtgagctcaaccactgagcccatttgcctgtatcatcatggaagaaagataaactttttggaaacccagatcactcgatgccaaacctcagacagccaaggaggtctaaaagaggcctgtgacccacagggcagaatcccaagtcttacctcagccactggcctgggttgtcctggattccttggctacaactacagtgtcagtgcaaaccggcattagcagacatctcaaggtggctctcccatgagggacatgtgagaatcgtgactgtgcccggcatttcagggcacactcactgcaggatggcaggccttagagccgagagacatggttgttgtcctgaatgagccagagtccctgaagtgtgcttcagtactgaagcctggagaggcctgggtagtatgttcacacatcacagcttatccatcttccctcctcatccccaagtggttacgtaagttagtaactgacagttcagtcatagagaaggccctatggcttggagaaagaggaagcccagtcttttttttttttttcactttcacattatgaagtttggctgccaattcgtatatatgaatgcatgacagtgcaactttttttttaaagatttatttattatgtgtaagtacactgtagctgtcttcagaagagggagtcagatctcgttatggatggttgtgagccaccatgtggttgctgggatttgaactcgggacctttggaagagcagtcgggtactcagagcagtcgggtgctcttacccactgagccatctcaccagcccggaatcccagtcttttattaatccctggttccctggccagctcactgagtggcctctgctacacaggcatcttcccccaggtttttgagaagcatctctgcacagctgccatgtgccagactgggaccaaggctcagacctctctctgcttctcccgctcagatcatggccgttgcaggcctagattccagtaaagcccagaagtactcaccgagccactctacccggtcgtgggccacccctccagcaacccctccataccgagactggagcccatgctacacccctttgatccaggtggaccgctcagaatctatggaccaggtcaatggcagcctgccatccctacaccgaagctcctggtacacagatgaacccgacatctcctataggactttcacgccagctagtctgactgtccccagcagcttccggaacaagaacagcgacaagcagaggagtgcagacagcctggtggaggcagtgagtatgggtggcctttgacctctggacaaatcttaggtggcagcagaaacagagccatgatcacatggggagggggcagtggtgggctctgcagccttgccacccgagggtggcctctcggcagcatttaaggcctgagtgaaaaccagctggcactgccaagtcccaccagagagtcccatcctgcagtgccagtctgtgctacgtccccagtgctttctctcttgctcagccttgtggagccactcagctttcgacaccaacagagctgagctcatttatggttagcatcgtgtataaagtttagcagcatggctgacagcgtccccagagcatgccgcgcactgagagctgatgcagaccttccctcatgccatcgatctatctcctatacaggtcctgatatccgaaggcttgggacgctacgcgagggaccccaaatttgtctcagcgacaaaacatgagattgccgatgcctgtgacctaaccatagacgagatggaaagtgctgccagcaccctgctcaatggcagtgtgtgtcctcgagccaatggggacatgggccccatctcccaccgccaggactatgagctccaggactttggtcctggctacagtgacgaggagccagaccctgggcgagaggaagaggacctggcagatgagatgatttgcattaccaccttgtagcccagtgagggcaggctggctccagccagagacgggcacgggagggccagggataaagtgcctcataattaggaaagtttaggcactagttgggagaaaaacgctcaattagacttttgtacaagtgatttcatgcctcaaggaagccataaacctggtaggagcaggttctgagcggcctggcatgtgctatgtcacatgctcaggcccggcctcagaagacagtatatctggcctgcacagaggccagagggctgcccaggagttggtgtctcccatccagggtgcatgcccatgcccctttgcctgcagacatgagagaggttaaaggtgatgacagtcaccacgcctgtgtcattacctcaaccattggtctagcatatcagacacccactgggcctggcatatccatttctgagccccctcccccaacacactggttcctggtttctgtggagctgttctgaatggtacacatcagaacccagccactagtggtcacgacaaggggagtgggaccggatcgttttgttaagcgatgccagtttacataagagaccatcactcagacggtcagttctgtcacattaagggcaactgtaaactggaagagtaccgcacttgcaaaccaggtaaaacttagatacgtttagtttgtttaaaaattatagatttactgtacatgacttgtaatatacaatttgtatttgtaaagagatggtctatattttgtaattatcgtaccgtatttgaactgcagcaatatccacgggtcctaacaatcgtagtttcccacccaaacctagaaattattagtatttttacttgggctaaaaagaattaggagaattagagccaattctcacatgttcagtaaaagaatctttggggataaacttttgagttcctaagaacttggcacttcagaacttttttctaaaatattttgagttactataaacctatctttccgtaagatatcaagttgactaatttgcagtcttttctttgggttctatgattttatagtgcacctcccacccacatgggttgccgttgactttggtttggttttattttcacaaccctctggtcagttagttatgcagcaggtccagctggctactcggcccagtggcatccactggtctggctccctcagttgcccacgcaggatgcttctgggtctctgacgtggagctgcacagatgagctgcccacgtctgctcacatccccaaggatgcttaagatctaggaggtataccacaggaggggagaggggagcaccgtggtgtcctgtgaatgcaggtggtctgtggagtcctgtcgcctttcacagctgctgtgcaggattctctttgagagctgtcacacacagcggagcaagggctgaagttttcacgagaacacaagcgctctgactgcacacctggggacagttagctttggaatcgttagaactgtcaagatttcctgtcagcatcatgagatctcatcccatcactttcctaaggattctctgcaatcaaaaatacaggtagcaatttgggttcaaaatttttaactagtacacagacaacctgtggaaacaatttttttttttgtaaataaattttattataaagacctcgcaaacctcttcggaagacattcttactccagatgcaggcaaaaacacttcaaggtttgtaaatgactatttcctgacataaagcctttttttttttattaaaatgcaaaacgttcttcagaataaactctgtataatgtcatcatatggggagctctcctcacacagctggctctactgggggagcttcgggcggctttttccgcccttggtctccgagaccgatagtaacttcacaccagctgcagagtgctgttctcctaaagggctaaactaccatcagcatttaccttggactctgtcgtgctgggtgtctgtctgtctgtctgactgtgcgacgtaacatcagcagatcacactcacgtgtgttctggaatgggtgatcgttcccaaagtcagctgtcaacgctgcctggcgtttcaggctgtccttcccggtatgtctgctttaagcctggttcaacctctcatttaatattaaatttctctttgtaagaaaaatttgaagttgtagagcatggttttttcctcccctttaaggaagttttaagactaaatagttctgctttttggttttcctaccctgccccacccccccctgatattgaggtctttggaatgctgcttttagtttaagctcctgcttttaatgacattaaaaggtggaagtcactatgatctgctcaccgtcagcaagaacctcatttgggatggtctgtgaggtatgtggacttgtgctccatagttctagaaggttgagggtgtagccctagccacttgaagagagcatagctggggtgcactacccacttcacagtggtccagctcttaagccagatcggctctattttgtgctgtgtgctttttactatctacgatctttatcagctctgcctttacttggggaggatggagtgttggtttacttgtacaaacaccaccaaatcatgggcacctctcacaaaacccactccagctgtgctttcccagagggcagtggagacctagggagaggctcggtctctggcttctgatttcagaacaagggtgaagagtgtggttgaatatacaacagcccagccagcaggggcttcgcaggtcaccagcttgggcctaggaggtaggtcatgttttccccgcccccctccaaatttgaagattaaaatctttgcattaggtttgatattgtggtagtttataagtggaaatatgaaaaatcttggggcctgagggatgtagtatggtgggtgagaagaatctatttgaatgtatggaaatgaggcagggctcatgtgttacagtgtccccaccttctgcttctatgactgtgtctggtcatgctggcaagttgtccctgtctccatccatgatctgtgaccctgtcaggaacacacttggccaacagtgaggtgggcccaagtcccatcaacacagcagggctccccacagttctttttggtgctaggggtcaaccctggggcacatgcttgctaggtgtgcaggtactggttttggcaacatgtggccttccatgattggggtattacaggctctttgccaaggagcctacttaactaagcctttccagtttccccaggagactcagtcttaactgcctgtgtgaaccccactttagaacggaagcaggactgcaccattctaccactctgtctcccttgtggcactgggacttccagacaaccccagcatgtggattcagcactgcaggcaagactctcctgcgtgttcatccgttctgtttgggctggaacctggaatagctgtcggggcttcagcgaggatccctccaaacctcatgttctgtcccgatgtcgccatctgtgagttctgggcacgtaacatcgacttcttgtctcgggaaactcgtttccttatgtggctaaatcatgtcagcacgtgaagccagcctccctatgccgaagtgagagaaaggcccgactgcaactgaggggcacgccaggttgatcttcgcttattctcaaacgccgctgagcctgagaggagaacatggccctcccaggggtgacacctgtgctgctaaagatgctacggatgacggccgtctaacacctgccctgtgaggatctcttggcagacctaggatttccttgatcttctttttgaacaggaaaaaacaaaacaaaaaaacaaaaaacaaaaggcaaagcaggtaagatgaaataagggcaaccttgttttcaaagtaaaagtgttggtttataatttgttttttgaaccctttgaagggtcttctcagactcagaagtccagaaggcagctcctgccagtcaaccctaggggaccctggaatcctgctatttcctctctcttcttcactcagccatgtgatttctatacagcgatccctttcttcccgactacagatgatggctttggacatcttcaggaaaactaacctacaatgcgtctgacccccattctctcataagaacagttggaatgaggcagcttggctcaaaaattaagttaccggttacatccaaatttatgaggaatttccagatcaaagagctcttgtaaatgctgctggtatctgctcccctgacccaagactcgaattctagctggtttatctttcactccaaagtcctttgctgttctccatcagccttggtgccatgctctctgttctcacgtctagagaataagaaacggccagccctgtctgcagaagtagctctggtgcctgggccatttctggggccaccatgaaaggacctcgtgggctcatgtccttggcatgaggtagtgactggcatgtgggactggctctatactcctgcacttttgtgtggtaagggttaaacaataaaacctttggcagtgaggccaaaatggccttttcttgaacaacgtcctgcaagcctctcacctggacggtttcatgagagccagagtggtaggcgttgagttgtgcagtcacctgagccctcgtccctgtgcctcgctcttcagatttaaatcagggcaggagagaagtgcagagggggatgaggcgtcctctagctgctgcctgtccctctaattggggacataagctcaggtaaccagcccagctgagctgctacctgcctcttggcttcagcaaaagcttccttggagagcccagtccagttcaaccaccctgactttgcaggaatggcctcaggtgggagaccagggaaaggatcatcccagtccttcctggaagcagagctctgaactggagacaagaaaaccatgttagctaccccacctgctacccgcaggcagccagggggagggccccagcttgcttgctaggctttttgtggaggggcatcagagagacactgggaaaagggacttgcctcactgcctaccatgacctcatttcctcagaaaccatgaaagtctgagccaagagtcggggtatctgggtcccgagtgtctatataccggttcagaaatatctagggcagggctgtactggctggatctcttggcttggcctgagttcctctgtcgtcctcaggcaatggctgtctgtcttaacgctgggtgtccagagtctggggcttgtagacaggaacattcttgtcctcaagtgcagggtgtcccttaataatgtcggctgctttctctgcaatcattaccgtgggagcgttcaggttgccgctgaccacgctgggcatgatggaggcatcaacgaccctgaggttttctacgccgatgaccttggtttgcgcgtcaaccacggcagtggggtcagaggaccggcccatcttacaggtgcacgaggggtggtaagcactgtctgcttttgcccgcacaaaggcatctatctctttgtctgactggacgtggcttccgggctgcagctcttttccccgaaatggagccaaggcttcctgggcaaaaatttctcgtgacagcctcacacactgacggaagtcctcgacatcggtttctgtggaggagaaataagtgaggtccccttctcttactctgctggccaaaccaggggacaaaggtcagggacatggagaaccaagctacaagtgctttgttacctgcccagaggcagttagtggcaaccaggtatcttagacaaacagtgccaggtttgtgtctgaggtctggcatctctgtaagccaggggtagagatgtatagtctatctctactgccatgttcctgggaggtaagaccttgatcatgaggcatgagtctctgtggtgcgtgcaaagaggcaggcttgggaatacagcgtgctctctggcagggaaggccaggcaggtagtatgcacaggcctggcaattgttcctcctacagacgggcctgaaagtggtacctctatcctgctgtgctgtgaggcccaggctaccttgtgtgacctagaactgagggcaacccgagtgttaagcagtaggatccagagtaagggtgagggacaaacggaaccttattaacattccctaactcgatggcaggcccaggggataccaaagtagcgtctgtgttgttacctgttgacaagtagttgggatggatcacagggtggtcccgggggttggcacttctcagtttcagccagcccacacttgtggccctcatggttcccacgtgcacctagaagggttcagaggtaacagttcacagtaatctccattagctacagctcagacacttagaggagccccaggttccctgtgggtgggcactcagcatttagtgtacagacctccatcctgtctggcctttactcctttgtctgaaacgttcatgggacgatccccgggctgaggaagtcactgtaacaggtcctcccccccccacacacacacacacacatcctgtgggccgacccctgggctcactccctggggtgagtaaggttagggctccctttcctcctccagtcagacagtaggcattgtgggcagagtactaaacggaggtctccatggtgggatagataacatcaggaacatctattctaatgcaggagcatggaggcagagtctctggccatggctggctgcatacctggtaagcttcctgctgggtgggtttccgcccatggtcaatcacttgcgatggcaggaagtggaactggatgtccggatgagggaccccaggtcggctgcggatgaaccctccggtctcaagatgggctgtggctccgtcccctgaaggtcacatgaggacaaggcagaagagctggtcagggtacagcagatggcccagctctgcccggtgtccctcttctcccctgtgtctatcttcctggcctcggggctcggcaccaggttcgtccataaccttccttcattccccgggcagccatacccagcgttacaactttaaaaacactagctccatgctaagcgaggggcgtcaggtctgccaaggccacttgtgttatgtgcccttcgtcttgctgctcagtgagcgtcacctcgagcaaggtcctgtgctcagtccctcgacgtgtgctactactgcctcttgtacccttgcagagacctgccagacaggacctttgtgccctcacctcacagagtggaaaaattggcttgggttgtcaactggctttatacctagcaacctgaggcccgtcttggctcttcaggaagaaaaccacgatgcccacagaccgtagccaccaagtaccccaggaggcagcccccacctgtgtagctccagagccactccaggccgatgcagaccttccgcagaggcttctgggcagagtggagggtgatgggctgtgtgcacgcttgctgaacgtagacctccaggtggtcctgcaggttctgcccaactcctggcacaggaaggaagggttaggaaaatggctgacacaggggtgaacccctggctttggaagcttctctctagtccgctttgtcttcctgcctgccctggcccccagcttggaagttgtttccctgagacatgtcttttgctctcttagacaagtctggctctttctccaatgctgctaaaaccacccactctgtcactctctctacagcaatcactcaggtgcccttggtcagccctcctcagcagcgccctccaaggacagggcccacagttacaacaggtacttgggaagtgtcactgtgtgtgtgctggccaggttgacacttgtcagctccatcgtctcccccagcctgttaagggagaggcagtcccaacagaccctactcaagctcatgcaagatcaagggtacactgggcagtcaggacacagactgcttccataggcctccaggaaagcttcccgagaaaggccagccctcagggacacaacacaccctttctaagatgaagcttggatcttcacctgaacagtggcttgctctggagccataggttggcctcatttgtgcttagagcaactggtaaatcttaggatagatctctcacaccacaaccccatcctggtggtaatctcagccccatgcctgctacaggatgctctcctaaagggtgcagaagctgcctgagggagggtgaaggaaaatagcataaagacctggggttctccagtgagacccagatgccctcagatgtataggaaggaaggatgtgacaccttcaagaagtatcccaccgccacttcaagcaacaggctgctaggttggacagagctaccttccgggcagcagtcagactcaccaggcaggtggcacaccacagggatatccagtttcctgaggtcatctgcattgccaacgccagagagcatgagcagctgtggagagttgatggctcccccgctcaggatcacctccctgctgacgtaagcctggaagaggcagagctcgaccaatcacacttcctgaaaagccagctgtttgactgccccgtggagaggcacccagttccagccattgctgggcctttggaaattacaccactgtggagaatctgttctcagatcctagatagagaacagaggagggggccggctggagggctacttaaaaatgatccgcacagagtccccatgggtgactctaagtaacagctgtaacagtaacgggggccttggaaatggggggtgggggtagagctcaagtagatgatagcatacacttcagtgatttgaagcaagcacacaaatagatctcctgagaagggaaggcgggggaaggccatctctgacatatcgccaagtgaagaaaagcaccaaatatgattccatttgtggatttttaaacttctagggttgatttaatggtttctggcaggccagaccctgaaaccatatactagaggactctcgtgggggtagatgtgacaggcagaggcttacggaggcacaagggaccatggagtctgcgggtggcaggagttgaggtcttctgacctctacatcctgtgggaccccagggacaagcctgccactgctactggctgtcaactcatcctaggaacaagagcacgtgggacaggagcaagagcctgattgcctgtccccttcctgccctcttcagtccccacacgttccacaggaagtcaactcaccttgtgtctctggccgtccttgatgtactccacacctactgcacgggtgccctcaaacagcactctgcttacaagtgtctggacctcggccctgaggttggggcggctcagcaccgggtgcaagtaggcgcaggctgtgctccagcgcttacctgcaggatggagcgaggtcagccatggcctgctgccctcccctcgtgcctggacacgaaactactggggaaagcaaatctagccctcccttgacaatgcaaggcccaccttcaaaggtatgtctgtgacctggatagcctaccctgcagtccaaactattgagagccccatggtttgctctatcctgctgtgtgcaagggtcccgtgctacctgctgtctgtctacctgcatccatctaccaagaggtgatagctgggacacgatggtcttgtgctgtctctttctgcctcagcttgctcatctgcaagtctctataacgccatgcgttattcattacacagagctgttccttcactcttccacagcccctcccctccaaccactacccctagtggggtccactgtgttttccctggctacaggtaccacaggactgaagtccctacccctctcagcttcctagatctgtgactatagggtttggctgccctatccaggctggacaggcccctgggaactctaaagtcacctctgctatactgcatgacctagaggcacagtgaatacccaagtattgggttgtatcctgtgatacctaggggccgtatatagtatctccctctcaccaaacaccatgctgatttgcttactgaccatgatggagtcaggaaggatgcctataattagaggtgggggctattaaaaatcagtaccctgggggctagagagatggctcatttgttaagagcactgactgctcttccagaggtcctgagttcaattcccagcaaccacatggtggctcacaaccatctgtaatggatccggtgcccttttctggtgtgtctgaagagagctacagtgtactcgtatccattaaattttttaaatcggtaccttggtggacagtcatgtccatccagccgaagccctcctgttggaagccattcatgtcttcagtgaaggggtagccagcctgacgtgctgcctgcaggaaggcctggtgaagcgggtggttggtcttgccccgagacacatgcagtgggccatccccaccgcggtacatattggcacccagctcatgtctctgcgccttgcggaagtagggcaggcagtgtgcatagtcccaaccctcagcaccttcacggtgccagcggttatagtcctcggcgtgtcctcggatgtagaccatggcattgagggatgaggagccaccccagacccggcctcgtggccagtacagcacgcgactgtccatgccgggctgaggctcagtgtgatagtaccagttgtatttgtcatcacacaggttggacacaagggcagccggcatgtggatcttccactgaagccgcttgctccccatcaacaagtccttaggtcctgcctctagcagcagcacccgatgattcgggtcctcggtgagccgactagccagcacacagccagcagagcctgcgcccaccaccacaaaggtgtactcatccttgcccacactggcaacagcgcggctgcaaggggggcatggctggccctgcacagcccatgccagggctccacgtgggctctgccatcctttcctccagcctctaaggacctgccacatgcttccagcccagttcctctatccaccgacaggagttggaagagtcttttcctagaacaggaaacatggttttaagactctcaactccactgcatatgtagaagcagcctggagctggttggttatgcctagcttgggcaaggccatggcgcatgatagccactgccctggggaggtagaacctgaagtagagattttatcatggagatagtagtccagaatgggcgttggggaagaggggaggcccctccacaggcttggaagttgttccctggacaactttcctgagatggccataggaacttggagactgggcatctagctgctaaacgggaggaaggctttccagcctgaccaacaaggggctattctccttacttcaggcaggatgctgcattttattacaggaatgcacaagaaagaaaaaaaaatagaaaagctctccagatggagagggacaaagtaggctgagggactaagacttgggagctcatagcctgagagatcccaggacgcactaggacacagggtcacagccatgctttgcaaggtcaacttgtaaagcggtagctttgacagagaaatgccaatggcctaaaaataatgttgatttgtttttgcttttgagatctttccctcccccctcccccaccccggtaccccatctcactctctttcaaagtcatagcctctttttcttcaatagttgttacgtgtaaatatatgtgattatggaaagcgacctgctcagacctatatatgccaatgacttttgatgggtcttctctcaccaatgtcccacatgcttggtgcaaaggttgagaacagcctcagtatgccactgacctcgtgaggacaagagcagctgaaccccgcaaccccaacaacaacctctagtctaccctgaagctgaaatgaaaggactgaaaagtcccttgtcaactttggcctgcccagatgcagatgatggcaaatcccccttagctttccctcagtcctgtatcagtaaccagggcctttgacaaaaagtggtagggccttctggagcaagaattctgcagagagtcccctccacccccagctccagggtagcaatgcccatgctctgctctcccggggatggactcacttcccccaatgccctcccaggatagttgcggcctttgtaagaggacgccattacccatctccattagactgctacacacgtcagtattccattataatttggaaacacacaaatacactctttacaaagagagaaagcaagcaacagaaccagagcccccaggtgttgtaactatcagacaaagactcaaagtcaaggtcacagctactagaaatgatttcgttgacaagaggacatgttgaagggactttcaagtaggcatcagtggtctgcaaaggtgactctgtgggcaagggcacttatttcataagcctgaggaccccagtttaa

SEQ ID NO: 50 - DNA, 7660 bp, Mus musculus
gaaaaagtagaatatgccttcctgattatttttacagtggagacatttctgaagattatagcgtatggactgttgctgcatcctaatgcttacgttaggaatggatggaatttactggattttgttatagtaattgtaggattgtttagtgtaattctggaacaattaaccaaagaaacagaaggcgggaaccactctagtggcaaatcaggaggctttgatgtcaaagccctccgtgccttccgagtgttaagaccacttcgacttgtatcaggagtgcccagtttacaagttgttctgaactccattataaaagccatggttaatgatgcgataggatgggaatggccatgggtgtattttgttagtctgatcatccttggctcatttttcgtccttaacctggttcttggtgtccttagtggagaattctccaaggaaagagagaaggctaaagctcgtggagatttccagaagcttcgggaaaaacagcagctggaagaggacctcaagggctacctggactggatcacccaggcagaagacatcgatcccgagaacgaggaggagggtggcgaggaaggcaaacgaaacactagcatgcccaccagcgagactgaatctgtcaacacagagaacgtaagtggtgaaggcgagacccagggatgctgtggaactctctgccgtcgatggcgtcgctggaaccggttcaatcgcaggaggtgcagggctgccgtgaagtctgtcacgttttactggctggtgattgtcctggtgtttctcaacactttaactatttcctctgagcattacaatcagccagactggctgacacagattcaagacatcgcaaacaaagtcctcttggctctgttcacctgtgagatgctggtgaagatgtacagcctgggcctccaggcttactttgtctccctcttcaaccgcttcgattgctttgtggtgtgtgggggcatcaccgaaaccatcctggtggaactggagctcatgtctcccctgggggtctccgtgttccggtgtgtgcgcctcctgagaatcttcaaagtgaccaggcactggacctccctgagcaacttggtggcatccttgttaaactccatgaagtccatcgcctctctgctgttactcctcttcctcttcatcatcatcttctccttgctggggatgcagttgtttggtgggaagtttaattttgacgagactcaaaccaagcgaagcacctttgacaactttccgcaagcactcctgacggtgttccagatcctgacaggtgaagactggaatgcggtgatgtatgacggcatcatggcctatggaggcccttcctcttccgggatgattgtctgtatctacttcatcatccttttcatctgtggtaactgtatcctttggagccactggaactatgtggtcaccatcactgtctcgtttcttctgactttctctgtggttgtggtggtgacggtagcagctatttccaaattagatatcctgctgaatgtcttcttggccatcgctgtggacaatttggctgatgctgaaagtctgaacactgctcagaaagaggaagctgaagaaaaagaaaggaaaaagattgccagaaaagaaagcctagaaaacaaaaagaacaacaaaccagaagtcaaccagatagccaacagtgacaacaaggttacaattgatgattatcaggaagatgctgaagacaaggacccttacccgccctgtgatgtgccaggtattatatgcggcagagaggcccagaagggctttcagatacgtgtgggttgccacaagctcattaaccaccacatcttcaccaaccttatcctggtcttcatcatgctgagcagcgctgccctggctgcagaggaccccatccgtagccactcattccgcaacacgatactgggctactttgactatgccttcacagccatctttacggttgaaatcctgttaaagatgacaacttttggagccttcttgcacaaaggggctttctgcaggaactacttcaatttgctggacatgctggttgttggggtgtcgctggtgtcctttgggattcagtccagcgccatctccgttgtgaagattctgagggttttgagggtcttgcggcctctcagagcaatcaacagagcaaagggacttaagcacgtggtccagtgtgtctttgtggccatccgaaccattggcaacatcatgatcgtcacgaccctgctccagttcatgtttgcatgcattggggtccagctgttcaaggggaagttctaccgttgcacagatgaagccaaaagtaaccctgaggagtgcagggggcttttcattctttataaggacggcgatgttgacagtcctgtggtccgtgagaggatctggcaaaatagtgatttcaattttgacaatgtcctttcggctatgatggcgctgttcacagtctcaacttttgagggctggcccgcgttgctgtacaaagctattgattcaaacggtgagaaccgtcagtgtgttgaatatgccttgaaagcacgccccttaaggagatacatccccaaaaacccataccagtacaagttctggtatgtggtgaactcctcgcctttcgaatacatgatgttcgtcctcatcatgctcaacacgctctgcctggccatgcagcactatgagcagtccaagatgttcaatgatgccatggacattctgaacatggtcttcacaggggtcttcactgttgagatggttttgaaagtcattgctttcaagcccaaggggtattttagtgacgcctggaacacgtttgactccctcatcgtaatcggcagcattatagacgtggccctcagcgaagccgacaactctgaagagagcaatagaatctccatcacctttttccgtcttttccgagtgatgcggttggtgaaacttctcagcaggggggaaggcatccggacactgctgtggaccttcatcaagtcctttcaggcgctgccgtatgttgccctcctcattgccatgctcttcttcatctacgctgtcataggcatgcagatgtttgggaaagttgccatgagagataacaaccagatcaataggaacaacaacttccagacctttcctcaggcagtgctcctactcttcaggtgtgcaacaggggaagcctggcaggagatcatgcttgcctgcctcccaggaaagctgtgcgacccagactccgattacaacccaggagaggagtacacttgtgggagcaactttgccattgtctacttcatcagcttttacatgctctgtgcattcctgatcatcaacctctttgtggctgtcatcatggacaattttgactatctgactcgggactggtctattctggggcctcaccacttggacgaattcaaaagaatatggtcagaatatgaccctgaagcaaagggaaggataaaacaccttgatgtggtcactctgctccggcggatccagcctcccctggggtttggaaaattatgcccacaccgagtagcatgtaagagattggttgccatgaacatgcctctcaacagtgatgggacagtcatgttcaatgcaaccctgtttgctttggtccggacagctctcaagatcaagactgaagggaacctggagcaagctaatgaagaactccgagctgtgatcaagaaaatctggaagaagacaagcatgaagctgcttgaccaagttgtccctccagctggtgatgatgaggtaaccgtggggaagttctatgccactttcctgatacaggactactttaggaaattcaagaaacggaaagagcaaggactggtggggaagtaccctgcgaagaacaccacgattgccctacaggcgggattaaggaccctgcatgacattgggccagaaatccgacgggctatatcctgtgacttgcaagatgacgagccagaagactccaaaccagaagaagaagatgtattcaaagtaattattccacgcctagcgcctcactggccacatggagatagtggggcggggaagcaagctcccacctcaacaaatgccaatctcaataatgccaatatgtccaaagctgcccacggaaagccgcccagcattgggaaccttgagcatgtgtctgaaaatgggcattactcctgcaagcatgatcgagagcttcaaagaaggtccagtattaaaaggtctgagtcaggagatgagcaatttccaaccatttgccgtgaagatcctgagatacacggctacttccgagacccccgctgcttgggggaacaggagtatttcagtagcgaggagtgctgtgaggacgacagctctcccacctggagcaggcaaaactacaactactacaacaggtacccaggcagctccatggactttgagaggccccgaggctaccaccacccccaaggcttcttagaagatgatgactctcccactggctatgattcacggagatctccgaggagacgtcttctacctcctaccccaccatcccatcggaggtcctccttcaactttgagtgtctgcgcaggcaaagcagccaagacgatgtccttccatcgcctgccctgcctcaccgcgctgccctgcccctgcacctgatgcagcagcagatcatggccgttgcaggcctagattccagtaaagcccagaagtactcaccgagccactctacccggtcgtgggccacccctccagcaacccctccataccgagactggagcccatgctacacccctttgatccaggtggaccgctcagaatctatggaccaggtcaatggcagcctgccatccctacaccgaagctcctggtacacagatgaacccgacatctcctataggactttcacgccagctagtctgactgtccccagcagcttccggaacaagaacagcgacaagcagaggagtgcagacagcctggtggaggcagtcctgatatccgaaggcttgggacgctacgcgagggaccccaaatttgtctcagcgacaaaacatgagattgccgatgcctgtgacctaaccatagacgagatggaaagtgctgccagcaccctgctcaatggcagtgtgtgtcctcgagccaatggggacatgggccccatctcccaccgccaggactatgagctccaggactttggtcctggctacagtgacgaggagccagaccctgggcgagaggaagaggacctggcagatgagatgatttgcattaccaccttgtagcccagtgagggcaggctggctccagccagagacgggcacgggagggccagggataaagtgcctcataattaggaaagtttaggcactagttgggagaaaaacgctcaattagacttttgtacaagtgatttcatgcctcaaggaagccataaacctggtaggagcaggttctgagcggcctggcatgtgctatgtcacatgctcaggcccggcctcagaagacagtatatctggcctgcacagaggccagagggctgcccaggagttggtgtctcccatccagggtgcatgcccatgcccctttgcctgcagacatgagagaggttaaaggtgatgacagtcaccacgcctgtgtcattacctcaaccattggtctagcatatcagacacccactgggcctggcatatccatttctgagccccctcccccaacacactggttcctggtttctgtggagctgttctgaatggtacacatcagaacccagccactagtggtcacgacaaggggagtgggaccggatcgttttgttaagcgatgccagtttacataagagaccatcactcagacggtcagttctgtcacattaagggcaactgtaaactggaagagtaccgcacttgcaaaccaggtaaaacttagatacgtttagtttgtttaaaaattatagatttactgtacatgacttgtaatatacaatttgtatttgtaaagagatggtctatattttgtaattatcgtaccgtatttgaactgcagcaatatccacgggtcctaacaatcgtagtttcccacccaaacctagaaattattagtatttttacttgggctaaaaagaattaggagaattagagccaattctcacatgttcagtaaaagaatctttggggataaacttttgagttcctaagaacttggcacttcagaacttttttctaaaatattttgagttactataaacctatctttccgtaagatatcaagttgactaatttgcagtcttttctttgggttctatgattttatagtgcacctcccacccacatgggttgccgttgactttggtttggttttattttcacaaccctctggtcagttagttatgcagcaggtccagctggctactcggcccagtggcatccactggtctggctccctcagttgcccacgcaggatgcttctgggtctctgacgtggagctgcacagatgagctgcccacgtctgctcacatccccaaggatgcttaagatctaggaggtataccacaggaggggagaggggagcaccgtggtgtcctgtgaatgcaggtggtctgtggagtcctgtcgcctttcacagctgctgtgcaggattctctttgagagctgtcacacacagcggagcaagggctgaagttttcacgagaacacaagcgctctgactgcacacctggggacagttagctttggaatcgttagaactgtcaagatttcctgtcagcatcatgagatctcatcccatcactttcctaaggattctctgcaatcaaaaatacaggtagcaatttgggttcaaaatttttaactagtacacagacaacctgtggaaacaatttttttttttgtaaataaattttattataaagacctcgcaaacctcttcggaagacattcttactccagatgcaggcaaaaacacttcaaggtttgtaaatgactatttcctgacataaagcctttttttttttattaaaatgcaaaacgttcttcagaataaactctgtataatgtcatcatatggggagctctcctcacacagctggctctactgggggagcttcgggcggctttttccgcccttggtctccgagaccgatagtaacttcacaccagctgcagagtgctgttctcctaaagggctaaactaccatcagcatttaccttggactctgtcgtgctgggtgtctgtctgtctgtctgactgtgcgacgtaacatcagcagatcacactcacgtgtgttctggaatgggtgatcgttcccaaagtcagctgtcaacgctgcctggcgtttcaggctgtccttcccggtatgtctgctttaagcctggttcaacctctcatttaatattaaatttctctttgtaagaaaaatttgaagttgtagagcatggttttttcctcccctttaaggaagttttaagactaaatagttctgctttttggttttcctaccctgccccacccccccctgatattgaggtctttggaatgctgcttttagtttaagctcctgcttttaatgacattaaaaggtggaagtcactatgatctgctcaccgtcagcaagaacctcatttgggatggtctgtgaggtatgtggacttgtgctccatagttctagaaggttgagg

SEQ ID NO: 51 - protein, 1755 aa, Mus musculus
EKVEYAFLIIFTVETFLKIIAYGLLLHPNAYVRNGWNLLDFVIVIVGLFSVILEQLTKETEGGNHSSGKSGGFDVKALRAFRVLRPLRLVSGVPSLQVVLNSIIKAMVNDAIGWEWPWVYFVSLIILGSFFVLNLVLGVLSGEFSKEREKAKARGDFQKLREKQQLEEDLKGYLDWITQAEDIDPENEEEGGEEGKRNTSMPTSETESVNTENVSGEGETQGCCGTLCRRWRRWNRFNRRRCRAAVKSVTFYWLVIVLVFLNTLTISSEHYNQPDWLTQIQDIANKVLLALFTCEMLVKMYSLGLQAYFVSLFNRFDCFVVCGGITETILVELELMSPLGVSVFRCVRLLRIFKVTRHWTSLSNLVASLLNSMKSIASLLLLLFLFIIIFSLLGMQLFGGKFNFDETQTKRSTFDNFPQALLTVFQILTGEDWNAVMYDGIMAYGGPSSSGMIVCIYFIILFICGNCILWSHWNYVVTITVSFLLTFSVVVVVTVAAISKLDILLNVFLAIAVDNLADAESLNTAQKEEAEEKERKKIARKESLENKKNNKPEVNQIANSDNKVTIDDYQEDAEDKDPYPPCDVPGIICGREAQKGFQIRVGCHKLINHHIFTNLILVFIMLSSAALAAEDPIRSHSFRNTILGYFDYAFTAIFTVEILLKMTTFGAFLHKGAFCRNYFNLLDMLVVGVSLVSFGIQSSAISVVKILRVLRVLRPLRAINRAKGLKHVVQCVFVAIRTIGNIMIVTTLLQFMFACIGVQLFKGKFYRCTDEAKSNPEECRGLFILYKDGDVDSPVVRERIWQNSDFNFDNVLSAMMALFTVSTFEGWPALLYKAIDSNGENRQCVEYALKARPLRRYIPKNPYQYKFWYVVNSSPFEYMMFVLIMLNTLCLAMQHYEQSKMFNDAMDILNMVFTGVFTVEMVLKVIAFKPKGYFSDAWNTFDSLIVIGSIIDVALSEADNSEESNRISITFFRLFRVMRLVKLLSRGEGIRTLLWTFIKSFQALPYVALLIAMLFFIYAVIGMQMFGKVAMRDNNQINRNNNFQTFPQAVLLLFRCATGEAWQEIMLACLPGKLCDPDSDYNPGEEYTCGSNFAIVYFISFYMLCAFLIINLFVAVIMDNFDYLTRDWSILGPHHLDEFKRIWSEYDPEAKGRIKHLDVVTLLRRIQPPLGFGKLCPHRVACKRLVAMNMPLNSDGTVMFNATLFALVRTALKIKTEGNLEQANEELRAVIKKIWKKTSMKLLDQVVPPAGDDEVTVGKFYATFLIQDYFRKFKKRKEQGLVGKYPAKNTTIALQAGLRTLHDIGPEIRRAISCDLQDDEPEDSKPEEEDVFKVIIPRLAPHWPHGDSGAGKQAPTSTNANLNNANMSKAAHGKPPSIGNLEHVSENGHYSCKHDRELQRRSSIKRSESGDEQFPTICREDPEIHGYFRDPRCLGEQEYFSSEECCEDDSSPTWSRQNYNYYNRYPGSSMDFERPRGYHHPQGFLEDDDSPTGYDSRRSPRRRLLPPTPPSHRRSSFNFECLRRQSSQDDVLPSPALPHRAALPLHLMQQQIMAVAGLDSSKAQKYSPSHSTRSWATPPATPPYRDWSPCYTPLIQVDRSESMDQVNGSLPSLHRSSWYTDEPDISYRTFTPASLTVPSSFRNKNSDKQRSADSLVEAVLISEGLGRYARDPKFVSATKHEIADACDLTIDEMESAASTLLNGSVCPRANGDMGPISHRQDYELQDFGPGYSDEEPDPGREEEDLADEMICITTL

SEQ ID NO: 52 - DNA, 337022 bp, Homo sapiens
  misc_feature (1)...(337022): n = A,T,C or G
tttggctattctgtcacatcattaaaagtctagtctgtttgtgatgtagtgtgtttgcaaaaactctcccatacaccctggcattctttgttaattgccattaaagtcatgtcaggttttgaaaaattatggtgttcttgacactgttccctttcagcctcacgtgttccttgtatttatcacaatggaacactaacaaatatttattcagttttatagacatgttgacaataaagtctaccatgtgtgtctccctgccatggtgattattttgctcaatatgtgattgactgagatttttcagtgtattataaacacacattaaaaataggaacataaaaaagataaaacagaaaaatggaaagttccatatttctggatgcaataccatgccaacctggttattaggacacgaaacagataatttttagtgagttatctaagtttgtataatgattcttcttcaaataagtagttttggatcccataaccttcctcttcaaaaatttctcgaattagaaccttttaaaaagtactttttcctctgtgtgtttgttccaataacctaggaaatataaagtttggctattttaccaaactttcaaacccacagtccaattccaatttttagcatccattttaaaccataagcatgaagctgcaagaggtcactgcattttcatattgcatttttgtcaaacagaaagagaactactgaagtggctaagtcctctctactgtgttaatcaaagggaatagaggggtggtgcttatttcaaagggtcttattagaaaactgggattacaaaaggtcaatatttttaatgatttcctatttaatgatcctccaaagtcctgtttaacaagcttatgtcagtattaaggatttgtgacttagtgtttttttttttttaagtagtaagaaaggtaaacaggtccacatacatggtaggtgccaagtcggagagacactggtgccatttaaacttcagttttgttttgtgaattaaatatttaaacaactgctctgaagaaacaaaaatgtaactgtaatgtttgaactataaaatttctgacgtttattgactttctggatctccctaacaacttcctgtcctcataaatttgctcctgtggttgattggatgcagatctgtgtgattttttcattgcagtgtgtgactataccagttttatttccggtagctagcttatgcttttaacctggagatagctgtgtagtggtgttgactgaaaccagtgttgtgtggggtgtgtgtatgcctataattacattcagcatgagccatggggctgcatttatgtgcatgtgtgtaaatagctatttcactatgatctctgtcctgctttggggttgtcagcattgattactgaatcttaaatactaaataacagaaattaaaattaagcaaaattcaaagactattaaaaaaaaccactgtgttcagttgctttgggactgtatttgaacgacagaatgcacttaagaaaaaggagagccattacagtggattgtattaggtcggtgcaaaagtaattgcaccgacctaatattttaattgaggtggtgagttaagttctaaagtcaggacataaaggtaaaaactaagaccaatcaaaggaaggacagactcctgccagcaccacttaagtggctccctccgtccctctgtaactgagtatatttaaattcacatgagttatatgatttaacttgatggtatgtgtcagaagctctgaaacagtattttaaatgtttgcaatacataaacaagatgggtgatattatccctgttttaaaggtgaggaaactgaggccctaagagggtaagtgacatcccccaaacaacatagctagtagctggcagagccaggatttgggcccagttctatgtgtctccaaagtctaggctctccagtacgccatcctagaatgtgaagaactcttagggatcatgttatataaccagtttatttcacagatgggaaacttcagacttattccctcctttcagtcagcatggataatggggtgttgactgcatattctagactctgccaggatttcccaactctggaagtggagagtacttggtgcatcagagagtgatggataagatttaagaattgggtcaaaggggatgggaatgaaccagttaaaggaattggaattactttgtctgatgtgaaatgtaaatcctattcttcgagtgaacagtcacttgatgaaggataaagaccagctggactccatgcaatgaggccaaagcaagaagaaaggactttaaattttgctgggtgaggcctaagtcagttgtaatggagaagtcctgatggtggtggggtatggcggtggatggggagagtagcgagttagcaccatggggtaggggacctcactagacagtaagctgccctctgctggcttcctgttttccctgcccaatctcagagtagcgccgcccctcacagtaactaaagaaattcatcaacaaatcttgtattgattaagacaaaaagtgacatcttcttaatggatccatcagacctttctgtgctctacaaatcttttcatcctctgatctaccttgcccactaaggttagagctattttcatgaagtacgactgattccatttctctgctcaaaaatgaaccaaagcagcctgagcagctgttttcaaagtgtggtctatggacccccagaggtaaggtggccaattgtggcaaataaaaatacagaaagcccaaggaaatttcagtttcaaataaacagcttttttttttttttttttttagtgtaagtatgccccatgcaatatttggacatcctgtattttatctggtaaccctacctgggggaccaaaaggccctctctttgaggtcaagactattttcacggtaacattaagacttatttgtcttccctaatgtgttgacattgcactgatggtacaaaatcaacagtgtttaaaactgctggtgtcttagcatgaatcagggcagtgacaccaaagtgtactggtggatgctgccttattctgtcatgcactcactgtaaaaaaaaaaaaaaagccagttttacttaataatctccttgatgaagcagtaaaaataattaactttattaaatcttaatccttgggtagatgtctttttaatattctgagtaacaaattaggacaaatgcataaaacatttctgctgtatatgatttcctcacttgtgtgatggtttgaggtaggaagctgaatggctttttcatggaacaccatttttactgaaaaactatgtttattcagacctaagtatttggcagttattttcttgaaaatgaatgaagtaagcctgttactttaaagaaaatcttgacagtatttgtgccaattacaaaatttcagctttcaagtgaaaattagaattttgaaaaacttctgtctaccacagggagcttgacagtttcccaatacttaaagactttctgatgagattggtggtgataacaatgaatgtggctttttgatattgtataatgaaacgtgtcaacatttggaaaacctgtgtaactcagtgaaccaggattttccaaatgaccaatgcataatgttaccaaatcatgcatgggtaaaagatccattcaaactgtgaaatagactgatagaatttaatgtaacattgtagaaagtttcactgacatggtttgaaataacacatttcaactaacttttaaaagtcaagttttggtgtcatggcaaagaataatatccacgattatctgaaaaggcgattaaaacagtcctcctatttccagctatatacctgtgtgaggctgaatactcttcacatacttcagtccaaacattctatcactactgattgaatgcaggagcacaaaggagaatccagctgtcttcagccagacagtgaagagatttgcaaacaataagaacaccactcttctcaccattttgttctggaaaacagttacttttcatttttaaaagtatgttagaacacgtaatgggcttgtgactattttcaagtgaattataaatgatttaaaaaatgttctaagccgagtgcagtggctcatccctgtaaccccagcactttgggaggctgaggcaggagaatcatttgacaaagcgagacccccatctctacaaaaaaattttaaaaaaggttgcagtgagctgtgactgtgccactacactccagcctgggtgacagtgagaccctgtctctgaaaaacaaaaacagaaacaaaaagctctttataattgttaggagtctaaagaggtctgagatttaaaaaaaaaaaaaaatcagaactgctggggcagggtaacacctagactgctgagccagacactagggacctgacactacttactctgtgctgcctttgcaatcttccttatcaccactatctcttaagtccccctaggtcccagcctaaccatttacttattaatttctgcatgtactctggacttctcagcctgactttgtgcatcccattcattcctctacctggaacacatgtccccacccgcttaatccgcctgttctggtggttagtgggtcagggctatcccctcttagcaccagggcctgtggatggaggaactcattcaaacccaactacacagtttgtttaaggatatgttctgcatatagccttcaggttctgtttatcttccttaattagaattcctggtgtgcaaaggacccaattttccctctgttttatatttttaccatctaagggccaagtgtgctaccataaactttatgggatttttgtaaatatcagctgacaatttctggtgatctatgtgggcttttatgatcctgtgcagactaatcagagtatttagtgcccgctgtgagcataacacttagcagcagggagagggggttaaggaggtgatccttgcttaaggacccacacggtggttggagagacaggatttatagccaagaagcaatcacacaagacacaagaatgtatgtcatcaaaggggaagccaggtgctgcaggcctttagggaaggggaggtgggggtgggggcacacgagtgtccatagcagcagtagcaatcagagaagtcttctggaggaggcagagacttgaccgaggctttttcaatggagaggggttagtgagaggtcagcaagtcaacaaggtagggattcctggtcagcgaataaacaggagccaaagcagagagtcagaaatgagcacagcatgttcacagtctaatgagactgctgaccacagtttaaagtgaatggtgcgagatgataaggttgaacgctagtcagaggagtttaggttgaatgtggaaggaaggaggaagaaaacattttttggtcagggaagtgacatggtgtgttttgaacaagatggattatttgtgggaggaaaaatggagaatgggcatcttgtgcatgacctggggtgtgagatggtgaggttctggactgggccatcagcaaggttttttgaaatgcagtgcacgcaggtaatcatgtctggcatgccagctcagtgcgttcaagtgggagtgctttataaataaggtcatggagattaagaccccacaatagtgtgttagcaacataattgggttgtagcacatgtagctgatttagagctgaaatcttttgttttagcctttcctcatgtcttgttggctcagctactaagtaattgtgtgtggttttgggcgagctacttaactcctcagtgtcttggttttgttgtctgtaaaatgagttttgtttttttttttttttagagttttgctccgttgcccaagctggagtgcagtggcacaatctctgctcactgcaacctccacctcccaggttgaagtgattcttctgcctcagccacccacgtagctgggacttaaggcgcacgccaccatccccagctaatttttgtaattttagtagagatggggtttcaccatgttggccaggctggtctcaaattcatggactcaagcccgccttggccttccaaagtgctgggattataggcatgagccactgagcctggccaaaatgagggttttatagtacctcgtaggcttgttacgagaattaaatgagttagtacatataaagtgcctaccctagaacctggcacacaggaagcctttaaaagatcttattatttatttattcagtagtttgcattatcatgggaatataaatatttaaattacccaatgggccaacgcatctagagctgtgctgaatcaaggccctcaaaaaaaaaaaatgcttgctggagacatcgccaagatgagactcattcagaaactgggatggaatgtcaaaaactccaattcaaggctgagcagtggctcatgcccgtaatcccagcacgctgggaggctgaggcagaactgcttgaagccagggcttgcagcttacagtgaactatgatcacaccactgcactccaatctgggcaacatagtgagaccctgtttctaaaaataattatttaaaaaaaaaacccaaaccctcctgcaataccataaacttgttaagatctaacgcacaaaacctggagaccgaaaccacaatttaatcatgtcacttttgagctaaaacaacttcactggctctcactgccaagaaattgaatctggtcttcttagccagccagccttcctccacagatttgggttggcctttccagcctcctcctcctctagcccagggggtctttgcctcagccacactgtgctcctgctcatttttaaacacacccaccttgcacttcagtctcccctgtgcctttgctcttacccccaaagctcattcctcatacatcatttatgccctgtaaaagtagtcacctgtttttaatagactttattttttttaagagcagttttaggtttacagaaaaattttgcagcaaggacagaattcccatatattctctcccccaacagtttctcctattaacatcttgcattagtgagctacactatatacacagttataacactggtacaccccagtgttataattgatgaaccaatattgtggtactactattaacaaaagtctatagtttgcattagggtttatgctttgtggtgtacagtccaacgggtttttgacaaacgcataatgtcctacgtccatcatggcagtatcataaagaatagcttcactgccctagaattccctgtatgccacctattcatccctctttctcccggtcagtttttaagaatcagttcaaatgccctctcttctgtgaaaacatctcagttccctcagttacaattaatctgtctgatgcttgtatagcgctttttcatacttgttatagctgctatgtttgcatggtatgaaagaagtatacacggccgggcgcgcggtggctcacggctgtaatcccagcactttgggaggccgaggcaggtgtatcacctgaggtcaggagtttgagaccagcctggccaacacggtgaaaccccgtctctactaaaaatacaaaaattacctgagggtggtggcgcgcgcctgtagtcccacctattcaggaggctgaggcaggagaatctctcttgaactcaacaggcagaggttacagtgagctgaaactgcatcactgcattccagcctggacaacagagtgagcaagactccgtctcaaaaaaaaaaaaaagtatacaaacttttcttctgtcattaggttgtccttgaggaaggaactgtgccatagatttgtcctgacatctagaccagacccttattcttaaccggtgccttatgaatgctggctgcactgaactgaacaatgagcaaatatggttcggctcagtcatccactagatacagtatttttccctctagacaggagctgctgtttgcaaatctcccccattccaaatctgagccagcaaaggtatcataaaacaaacttgctcagggaattttgtagaaaaggcctcaagaggcaaggctttagaccaggagttctgaaagtgacatgtgtacttgtgaatttcatacatgctccttggatgggctagtttctttggagggaaccgtcttctattcccttcagattttggatcagaagcagccataggagaggtggcccaggccagctttatattgttactagaccgtagggcgatttctcgcctctccagtctccaaaaacaaagcacaaaaaaggacaagagcctggttgttttcatcctcacggaccagacaccccctcaggaaggcctctggagagtcttctgtctggtccccagtctctctgcccaggtgccccccaacaattgaggatgactagtgtgttctctttgggtaaggagcaccttcccataaacacttatttttcttaattcacgctgagcttttactttattttcgctttaaagtcactgttctgaaacgttctaaaacgccgtaggaacatgcagataggaacaaaagcaaataaatcgaatcctgtgaagtaacaaagcagacgcccttctcctaacaggcagcacaaagctaaatgaaaaatatcagtcatccactagataaagtattttcccctttagacaggagctgccgtttgcaaatctcccccaccctaaatccaagccagcgaaggtatcaaaaaataaactactcccttcagctcccagactggaggcaacagtttcagcagcaccgtctatttccttgaacaacacgagcggtttgaaagaccttggctttgacttccctgtacctgcctccaaacacacgtgggggcggggtggggtggggggagatattgccccccatccccgttgccttccgcgacgccaggccaggcgcagggcaggggagaagatggggggcgccctggattcgcggttccagctgcaggcagttacctggggtagtgagtgctctctacagacccgggctaccccaacccccccgattccagaaagggccggagaaaagcagggggcgcctgccccgctccggagcagccagggagcccggccgagccttgacgaggatgagctcggagaccgcagcagctaccgcccgctagcacctgagctcccagggggcggggcctcctccaggtgtgcgcagaggaaggccggcgcggagtcggggccggcgcgggagcccgagctgtcccccagcccagaaatgcgcggggaggagcggttcatccgcaccccagcgccgcgggagacactggcgccgcctgcctcctccgggtcccggggggagagcgcaccgtgcggcgcggagggggttaaccgggcagcccgccgctggagcgcgcttaaccctttggagcccgcaggtcagccgggccaggctggggtggcggcaccccgagtcccacgcgacggccaccccgagcgcgcaagtggtgccgggcagaaccgcgcgccgggctgcagacccgccggggcgcggcgcgcgcgggccgtgggcggctcggggcgggcggagggcgggggacggcggcgggcgcgcagcgtcgccagggcgaagccggcgtgcggcgcggcgcggcgggcgcagagcgagcgggcgggcgagcgcctccgtccccggatgtgagctccggctgcccgcggtcccgagccagcggcggcgcgggcggcggcggcgggcaccgggcaccgcggcgggcgggcagacgggcgggcatggggggagcgccgagcggccccggcggccgggccggcatcaccgcggcgtctctccgctagaggaggggacaagccagttctcctttgcagcaaaaaattacatgtatatattattaagataatatatacattggattttatttttttaaaaagtttattttgctccatttttgaaaaagagagagcttgggtggcgagcggtttttttttaaaatcaattatccttattttctgttatttgtccccgtccctccccacccccctgctgaagcgagaataagggcagggaccgcggctcctacctcttggtgatccccttccccattccgcccccgccccaacgcccagcacagtgccctgcacacagtagtcgctcaataaatgttcgtggatgatgatgatgatgatgatgaaaaaaatgcagcatcaacggcagcagcaagcggaccacgcgaacggtgagcagccagagcccgggcacccgctgccaaatccgatcctgtcatggtcctccagccccctcccccttccccgcggcgctggatgggttgagggggttggagagggtgctgccagctcggtgtcgtctacacagagaggggacatgcgtgacagccactccgcgctcccctccaggccctgaatgtcagagttaattctgcatttgtggggtgggggcggccgtggagtgtgtggagcgcggtgcagccggaggggcggcgagtcggggtgattcgggttcagtgtcctcgggctcaactttccttcaacgcccccgagcgatggcaggagggccgcaagtcttcagccggagcccccttgccagcctcttctcgccttccactcctcccccgccccctcgttgactaggaagaaggtccctggtggcatccggaaaattctaggattgcccggtttcgccctccgcgccggtgggtgaagcacacccatcccctcgcgggggaggcccggcctcggtatcggggaaaggggttcgggtggagcgtgcgttcccgctcccgtcgccggctgtgcacacgtcggtaacctagcaatgcccggggagccgctgccgctgtggggctcccctccccagctctggcccgggcaccacgtgcagcttccacgccggccggggctgggtcgagggaggatggagcagctcctggccagccctcccctttggagaccgccagtgccccccaacccctgtcggctggaagcctttccgggtgagcgctcccctagggagaagcttgacatgactcgactcgtccccgctccgattgcccgccgctcgcccgctttgccctcttctcaggctttcagacccgtgcttgctttgactctttacttagcaataattggctttgcaaacgcccatctctctaccttgctgtcacctctctcacttctgcttcagtgaggagactgtggcggaaggcggcaggtgcctgggagatctgcctgggagatggcctgacccaaagctggcgggggcttcgcatagggagcctccttgagtttctgccttgtgtgcacctggataccaacctacacggagataattccctcttaggcctggaggcccctggcataatccagtcagtctatcctaggtgtaggggtgcaggctgactgccttgtctgtctctctggatgctggcttggctgatgctgctgcaatttaaaatgcaaaaaagccctaaagatgttttctgttttcggaagcctgtggaggaaatgagtcccaagcatcatgaattttcatttgcaggaagtgtcagtgcataatctagatatttgttatggggtttttggtattgcctgggtgcctatggaagattttttttcggtactgaaaaaaatgcatttgtggctgtggaaagatgttggagtaacactctgaaaatgattaagactattgaattattggtactgcctttttttttccccttggtgatggtggtagttatgttagagaaaagctgttgtatgtatctgttactcattagagatagatgggttttacaaatcagagatgcggagtaaatgtgggaatgacctcagttttgtcagaagaaatgcactaaaagaccctttgtgaagacatgatgtgaaggagtactaaccccactgggtgtgatgcagcggtgatcctgtgtgattgacactgagaccagagctcgtggacttttcttgactctccagctgactaaagcccagcttgtgaaaaatagcacatgagattcaaaatggaaacataggagtgaatgattcccctgttattgatgggagacaacctttgatttttttctcctacccactggatcctcatttaaaaaaaaaaatctttgtttttctccttctccccagaggcaaactatgcaagaggcaccagacttcctctttctggtgaaggaccaacttctcagccgaatagctccaagcaaactgtcctgtcttggcaagctgcaatcgatgctgctagacaggccaaggctgcccaaactatgagcacctctgcacccccacctgtaggatctctctcccaaagaaaacgtcagcaatacgccaagagcaaaaaacagggtaactcgtccaacagccgacctgcccgcgcccttttctgtttatcactcaataaccccatccgaagagcctgcattagtatagtggaatggaagtatcctttttttgggggaagtctttctcattttctcttttaccatctgttttttaaaaggatttgctttctgaagtgacacaaagctgtagcagtctggaatgcgagtaacagaagttgtatataaggggtttcattgtatataccttcctgtctcttcgggttgcagaggggtggctgtacgggtatatttagcccactgtctggatgtgtgtatagtagtagtagtagggggagggagtgacagcctgaaacttcacaggggcagataattaaaatgtgaaaccaacctttggttattggacattagatggttagttttaaattcagtgttgtctttgggcaatagcatgcattgaacctattgcaaacaaggtatacagattagaaaaaaagactgtataagactctgtttgaagggaatacatttttgacctttagtagaatcttctcattctgatgtttgaaatttgcttctgcaactacaattaatgctaaggttgcttctagtctgacatttggtgattctaattattcaggtagctgcagatatgagcacatgcttcctagggagagattacttttgattttttttctctgatcagtgctataacttcctggaatttccttttgacaagttccaaagaagcatttggaacgtgagcatgagggagccagtgaagggagaggctcgtgtgtgcctcttcctcctgggcccttatgagttatagaacagccttttcagtggaggaatttgcagttgctgcctttataaaaaattctgtctatgtccttggactggaggtacatttctgggtgtctcctttgtatttttaaaattgaactccaaatgccccagaatggctgtcatgtcccagatcttggaaaacgattgtgcttcagcctgcttaaccccttccctaaatctggaggccaacctccagttactgccactcttcagagaaggttgactgaggccttctttctgagcaaatggctttttaattaggcagatgattcattggtctgggtaaagtaaagcatttcctttccccagaagtgtgtttggaactgtcaggggccttagaacagttcctaactataggaaggggtgtgaatgtaggaattccctccaccaggcccagaaggatggaggggccacaccaaaaagggaggatgttggcagccagctagaaagtggagctgaaatccccttataatttgaggatctagctcggcagctatttgcatgccctctgtctttagctggctattttctgtgctaatggacaggagttaaaatgaggtaactgtctagaaagattttggagagagcagccaaatgctagggtaggatttgaggggttctcatgtgctttttcattttgcagcagatgtcccttctctagagtgagttatggtgtctctcacatagctggggttgtgtgtgtgcattttcttttgaagttctctagtctgagaacgaggagggagctcggtaagccagcatgtggcccagtggcattgctagattcatgacaatggctgtaccttgccaggaagacctcagactggcttgacacgactctgagtaagcagagacctctttgtggggtcactacttttgtgtggagtaggtgggaggcctgatgctgtttctctttgtgcacggtaatgtgtacatagcaatttttgcatgcagagtgaattcctggatcacgctgctgtctcccttttccagttgccagacacatgtgtacaggaattaggggacgtggctgccaattcagggagaagcctgtttacaaatgggacagtttgtaaaatagatagacccttaagcaatatatgatttttttttctctttttttaatgacagtttccttctaattcagggagcaggctatagaaatcctttccaccccgggcagctctgtcaaggccccatccgcagtgggagagcaagggtcaagggtcatttgtttttacagacaggcatgacagagtgtcctgccccctggaggagtgagggatgttctccttatcagaaggaattgttaggatcagacccatctatttctctattgctctgttctgcttcacttgtgaaaatcttatggcagtgagatggtatccacttgtacctggagaccaaaactggaccaacataaagaaaaaaaaatacaacttatatttagtcttcctgaacagtgttagtatttctcagatgtgctggtttatcatttaggtattgggaaattgaaaaggaagaatacctattacttaggtattgggaaattgaaaatgaagaatggaagaaagagggagggaagagactgttgtgtttctatggagaacaacattggggcccttgactttagatttcagtggggacctacaaaaaggaaaaatggaaagggaattctgaagtcttaaggtgggctatctgaaagttggatccctgggtgaaaaagattttataatattagatgagttgagagaaccaatgtgaattaaagctgactggcttaaaaaaaataaacccatcaaaattagtaagggaataatgttattcattgcctttttttcgttgagttatgaaagctcttcgaagatgaaggttttatgaaactcaagatctctccagaggccgggcacagtggctcacgcctgtaattccagcactttgggaggctgaggtgagcagattgcgagtccagaagtgagcagattgcttgagtccaggagttcaagaccagcctgggcaacatggcaaaacccctgtctctactaaaaaaaaaaaaaaaaaaaaaaaaaaaaaattagccggcgtggtggcacatgactgtagttccagctacctgggagactgaggtgggaggatggctggcttgagcctgggaggcggaggttgcagcaagttgagattgcgccagtgcactccagccttggtgacagtgagaccccatctcaaaaaaaaaaaaaaaaaatgatatctctagagaggtaaagagtatttgtttcctgtggcatttttggatttcccagaagtatgtcaggatgaatggagaatagtctgttcgtatgctccagttttaagtaccttgaagtgtttagttaaaccatggccttgcctcttgtgggtgagtgtataggcgaagcactgtggtaaaatcaagcccaggaattgcagatgaggctggtgctcacaaaaccttgtatttggaaaggctgaaaacccaaagaagaaaaacaatcattttggcagatgtcaaattttgtgttgccagttttgacaatgtctcttaataacaccagaatgtttaggtaagtatctcttgaaggctgatctcaaagtgattcttccagacagaccaccaagattgagaaatgttaaagcctactttgaacgtgtctggtgctgatttcttatggctttttaatttaatttgtttacaaattgagcacagtaacagcatattataaactgagctccagtccggctctaatctgaaacagttatagccatcgattcctctagcagagaaagcagaggcgggagctgaagcctggctcgctgctgatcacatctgaggtattggaatatgccatgagaaagttataggtagaatgagaaggtcctggtggcttggcctggcccagtccagacaggcgatttaggctgaccctgccaagaatagcccctgagaaaatggctctaacacatggaggcaaggatctgcggaagacatttatcccatgatgatttctctgtgtctaccacagccgggaacttagtaaggctcttgtcacttttaaacctgtaagaagcagaaacctagttcacacagtgccctaattggatgtacttttaggttttaatatgcagtgtgcagccgaagaatgagtgtaacatgatccttgcaacagaagaaaaggacacggagaggtcatttggtaggaggctccactgtgagatgaccaccgatgattacttctgccgaaaacctagcagtcacagcagtcagccgaaataggatttgtgtatgtcattttccttttaaaagtgctttgaaagtggtgtgatcgggagtgtgatgagggacatggtttatgtttccataacacatatataccttaacacattttttcagaccatttgacatatttatattattggctatttttgccaattgtgtggccttagctatttacatcccattccctgaagatgattctaattcaacaaatcataacttggtaagtgtccttagagttcctgctggtcctggtatatggttatcatttgcttctatacttaaactggcagctggccttctgggtggttgaagtttatagctatgcatgtcgtgtttcttggagctttgcaacagtggttttttgtttgtttgtttgttttaacctgtattctcaaatttatactgactgaaagtatttaaagtcatgaatcttttataaatagatatggaatttttatggaagagatttggagcagattttaaaataactgttatctccacataagtttttgctaccattcttttcctgataatattagcttttttcttttctttttttttttttgtttttaatctagtgttcttgggagtggtgggtactttggtcagttgttctggtaagtagagaattatcgtagactttgtacatgaactatttttagagaagtagaatataacaaaactaataaatctacatagagcataatttggagaataatacatgatattattgaatacatgatataatattaaagtttctactccacgtcctatgaaatgctccaagagaaaatgattgtatggttaaataaatcaggatgcttccatatactttgctgccttcttaaagatttatagtgcacattagcttagtaaaagctttgggaagttctgcagttaaaaaacaggtttccttttatttaactcagctagtccctaaaagtaatcagtcatgaattctttaaacattttttttttttttggcaaaagactttaacatcatggaaccagtggtccatggaacttcctttgggaaaggttgatatagttttttttttaaaaaaaaagcactaaagagtactagactgggactaggatcttgtcccactcacctgtcaactagctgtatttggggtcatttctcatacctttctgcattgctgtgcagccacctggcaattaggaggattgggtaagaagattgctagtatcgtttttacctctgacattctgcaatctttctttgatgattcagaagccatttcaggatttttctggtgctgcagcatccttcttgcaaggattggttctttgcaatcagaagccatgcagaatgggagatgaaggggagcccattctggataacaggaaactctattgtttttcttctcttctcttagctggttccgtttgtttttggcttctcatgttgaagctctattttagcagggctggatgttcctaactgagcgagcgttgtaaaggcaaacacactaggctctcccttgtgtgggagagctctgctggcttctgaagatagtgaaattatgctcttgtgaataagccttaacgatttatgtacaggatttcatgttacatttaaaatgttgtggcacatttcagatgtaatgtgatgtctatttgtatgtgggctttagtagtttgatatctagagaattttctaaaaattttgggaattgatgctgaaaatacaactataaatgggagtcggataaccacataaacactggtagtatatatttggacaatgccagagatcatttgtgtaactttggacattttatgtagcttttgatttctttgtagacatgtgacattagatgattgttttaaagaaaaagcagaagtggtggaaagcctcccatcaatggagatagatcatcgtagtctaggccacagatggtgttagccttgttaccaaatttaacgacgtggatggtgacccagattgttacttttcgtagctcaagagaacatgattaaacaaacttagaaaataaatacctttcagaaaggcagattaattcagatcagtggaataattaatgtagctgcatgtgtaagccaattaatattctgaatttttcccagggaaattcagggcactgatataggcactgtcagaccatttggatttctcagctaagaagtcaggaaataaaatacaggaaatggattaatctttcccttttgcaccccttctccagtgaatcttttcttgactattcttaagctttgaacttttttttttttttgtggggggggatttggcagtgtgttaatttggtgggcctttctaaaagccaacgtatattcctttgacctcttcatatagtattctgaaactcatggcattcaactttgtgtcttgctttcacttgggtggtcacatggccagatgaatttttactctgcttgactctttaaatacttcctttcccactgtgggaagggaagatctttgtggatttccttctgactctaagcaaggtcccatgccatgttggtcctcccatgagggagctggttttttgtttttttttttttaaatacatttgacccaatttgtactagagtgattgctctatttttgggattggtttagaggcagctgaacgaaacttatttttcatctgtagtaaatacctttcatttaatgtgaatggtaaaatcaaagggcagacgctgaaatgagttgcaaggctgcatgtatctggaagctgctggttttctttgcctgatagctccatgggaaagatgcagttgagcgatagagtgagatccagggccagctttatgtatgatgtttctgcctgttaccagttacctagtaaaattatgactttttttggggaagaaacgtggccatccccattgatccaatgtgtctttgttctagatagtatgtaactcagctagttttgggatttggagactaccttggggggcagaagttttcccagggatagtttttgttctttatttttttaaaaatataaacactctcaagtttctctgcagctttcgtttatggacttgcagggctagtggaggctggagtcatggaaacggtgcaactcagttcccacagtaatagccctcctagttcagtcaatagcagtatttcctcagttccacttactgaaagcaaataccattgattttattattattttttttttagcacagaggaggggaatgcctctgtatcaagtgtcagagtggggatgattacaatatcatacttcactgtgatgaaaaatgctttatttcatatcattcagtttcttataagcaaaccgacatggttgaacagttttgagtctgtgtaatctgttcctggtactcttcctcccggtgctacctcttacttctctggagtgtggaactgcttgaaattaaaaatgtccagaatggagatcttcatctgccaagtcagaccttctttgatccctactgatggctgcactcacctctaagccatctctgaaccagcactaagcgcccggaggcaaaggcccatggcccatgtctctctatccccttatctagcaaagtgcctgatgtaccaggtgctttttatttgtttatttgtttttttttttttttttttttgaggctctgttgcccaggctggagtgctgtggtgcaatttcggctcactgcaagctccgcctctggggttcatacctctctcctgcctcagcctcctgagtagctgggactacagacgagcgccaacatgcctggctaatatttttgtatttttagtagagatggggtttcaccgtgttagccaggatggtctcaatctcctgaccttgtgatctgcccgcctcggcctcccaaagtgctggaattacaggcttgagccaccgcgcctggcctatatgcacatctttatcctctggagcgtcttcaaaatacagttaatagtgaagcattctgaatccccagccatgcctgatgcagtggtaggggtatacagtagatgttcagtaaataagtattgctgatgtgcaccaagcgaatgactttcccaggagaagcgccaccatcattccttcctctgagccatgtttcagattttcttgggtggcaggtccctttgtggatttcttgcaggtccttagctgggaatgagtgggaaggtgtacgtgttattcctgaaaagcttagggtctgcggcccttcttgtgcacctctgcttaaaagagcccacagtgttggctttcatagcagagcagtctaggaaattttgtactctggttccagggctcagagtagcaagagtgctgggacctgtctgagaagcagtgctgggctgtggatgcttgcctgtggcaccagatgccttacagtggccaggaatgctgcgggacagtctactttgattgctttctttcctccatggctgagatctgagtgtagtgttaactgggcttaaaaatcaagtccgttgtatctgcatggtcacgtagttcggcatctcatggcttttgcacctagaggtgtgaaccataatacctgaaacacaatttcataacctggctccttgggcttagcctatatggtggaggttaggtctgtatatcatcaagactgtgtctttgcatggttgtcattctgttggaattgaactttcttatttctgtaggcctaggttctgtctattcttctcagacagctcatatgctgcttcttcccttcagccttctctgatacttgtccactccccgcctgcctacatctgagtacttgctttccctctggacacccctgtgcccagtccaactctcctgtacagacaccagcccctttcccctggtttataactgttgtgggaagtggcgtggagtgtgatggtctgctcatgggctgtggggtctgacagcctgactctttggctgattagctgagtgactttggatggaactagaatatgagttcctagaggctgagactgcagtctgatttgggtgtatagccttgtgaacttaatcctgtgcctggcacacaggaagcacatcaggaaatgcacgtcaaatgagtgaataaataaatgaatgaccatacaaggactccatggtatattcttgtagatcattagttaattatcaacaattggctaatgattaatgtttgcctgagaggctgactttttgtccattagtaatgacatcccaggaaacacctggcagagttcgtctttaatttcaggagtatatctttctttcttggcaaatttaactattaaagagagaagaaagacaagtacttgatactttttgaatctgtaagttataaacctgtcttctgtattcaatgttgtatattagccacattgcagatgattctatttggatggatgtgtgactgtcacctttcacataaaaattgattgagccagtcatagtggtatgtgcctgtagtcccagctatgtgggaggctgaggcaggagtcttggttgagcccaggagtttgagactgtaggggactatgagtgagccactgcactctagcctgggtgacagagcaagactctatctcaaaaaaaaaaaaaaaaaaaaacaaaaaaatgtggtagaaggggagagagcctcaaaatgaccagagtagatggactcgtgtagtaaaactttacccaaagttggtttcctaatgatataatgtgaaacagtctatgtgctatacaaataattatatctcttttgttaagccttacgtcattttgacaaaggctttacttgattgagtattgacggcttttccaaaataaaatccagctcttaattgagatttgtggctgggcatggtagctcatgcttgtaatcccagcactttgggacacttagcagggaggattgctggaggccaggagttcaaaaccagaatgggcaacatagtgagattccatgtctccccccgccaaaaaaaaaaaaaaaattagctgggtgtggtggcgtgcacctgtggtcccagctactcaggaggctgaggtggggggattgcttgtgcctgggaggtcaagactatagtgagctgtgattatgttactgtactctagcctgggtgacagaatgagaccctgtctcaaaaataaaggaaaaaaagaagaatttaggttttttactattaaaattccataagaggaattccagtgggggtccttgctcatttggtttgtttttttacaatgtgaatatcattattttatagtcataccttatacaacgaacctccccatctagacccttcactagtgagactaccttagggtgaggatatttgggtatattagagtattagccagaactctttgggttacagattgtgggaatacaactcactcaaattggcttagctgaaaaaaaagtgcgtatgtatgtacaatttataaactcagttaaccaaagagtccactgggtagaaatggcatcagacacagctggaaaggggggggctgaaaagatgtcaccagcattctatccctgccctgcaccctcgggtttctgagccagagtctgactgacctctagtaggtcagcctcacgttgcctatgtgtacatcttcctcagctcattttgaggagggcatgtggggacgtgcatttctttctttttttcaaattttattttattttaagttccgggatacatgtgcaggatgtgcaggtttgttacataggtaaatgcatgccacggtggtttgccgcacctatcaacccatcacctaggtattaagccctgcatgcattagctatttatcctgatgctcttcctcccacatttctttttttttgtttttagcatttattttaggtttgggggtacatgtgaaggtttgttacataggtaaacacaagtcgcacaggtttgttgtacatattatttcatcacccaggtattaagcctagtacccaatagttatcttttctgttcctctctcttcccccaccaccccgcaactcaagtagacccagtgtctgttgtttccctctgtgttcgtaagttcttatcatttagctcccgcttataagtgagagcaaggcatttctttcttaatctcagcttaagttcggcattttaacaatgattgcatcagaaacagagacctctgtagcagattggtgggtagttttctttttttttaaccttcctcattggtgtttgtttactttttaactgtctgacaaatgtgaaaagtacccaatacagggtgacagcatgcccagcagtagagacacttgggtgttaaataccagtggcggtggggacacgccccaacagaccccaacagcttctcaccaaagaaagttcctaaaggaatggaagaggttctagaattctggaggtggggtgtacagggagggaccatgtgcactgttactgttgagtggacagatgtgcagaagggaggggtgtcggcgggtgtccctgccccagcaagggtagagggctggttagcagttgatccaggagtagatgttagcatccccaccatgcagctacaggatgtggtcctcaagtcctgtctgctcatgtgatggaaataaggagagtggtggaggcgggggccttccttttttaattcaggtgagattggtattctcccagctggggttcctgtgggctgtaagggtgtttggctgggcaggcaaagccggaaatgggtggtatggaggaagaaacagaatagctgaagatgggatgaaggaggaactgcctgaactgatcagtgagctccacagccccctctgtgtgtgtgtgtgtgtgtttgagagagtaagagagagctcatgctcatgagtgtgtgagttaggggaaaggtggaggtgggcattgttgacacaggccttgcaggacgaagccttcctttggtggctttaattaagcagggccccagacactgcctgggctggagaaaatgactttcttctccagaacttcaaagcaattatttttgctaattttttccttcctccctgttaggtgagtggtagttttagaaatcacaggacatctgttgaaattattgaatgagtgaacgcgaggtgaggctggagggaatcaggggctgacccgagggagggcggggaggcaggtgcagactgctcagtgagtgtggtgggatcccggtcttggctggccctgtaggagcccagccagggaaggcaggaagaggtggcctaggttagctttgcctggggattcaaaggggccaggcgagaggctcatgctctttctccttccctttccctgccatgctcatcttctgagggctgacgctgaatccttttcctgtgtccgtcagggattcctgcataacatagactcacagatacttttttacagctataagaggacgtatttataagaaaggaaattgaggcagctttattcaacaaatattgattgagacctcctgtgcagagcacagcagccctgtgtttctgccttccagcccgctgctgtggctccccatgccttgttgtgaaggaaaacctacagtgtggggttggaaaacagccagatttgttttcatattttgcattcttactataaatcatcactcaaaattgacacaagtaatacatgaatacattgtttcaaataattaaaacaatacagataaagtaacaaacccctttacctacccaactccttctaattacaatgatcagttccgtgtgtcccttccgaattgtttttcacagcgtgtgtgtacgtatgtatatatcacctgtgcattttgaaacataaatacagtttgagtattttaaatttcgtgcaagtgggaacatgcattctatggcttcctttttcccactcaatagaccttacagacctttccatatctgtatgcagaaatctaacaacttcatagttggtgtaaaatattccatgtatgaatgtaccacagtttatttgttttctttgtgatgaacatttagggtaattccaaaagttttactgtttcaaatcatgctgcattgaatatccttttgtatgcttctttgtgcatgcaagaaaacgtttgtctgggatgacaactcagaagtaaactctccgggttggagggtatgtgcgtttttaatatccatgtttattgccacatcattcttcactaagcctgtactcttttacctcacaccacatctcactgcctcagcagtcatttcactctgcagagtgacctcatgtgttctgtatcttaggctgtacaaaaggaagtcttgggggttgggtctggcctctctctgggatgttagtagcatctggagcatctggttagagtagaaagtccacaaacctgagccctagattttaggaatctattttgcaccagtgaccagataaaaggcaccaaaacttattcttgtctcccttgctttcagtcccaggtgcttagatactattgtttcttttgagtgaaatattcattccaggtagctaataggtaaataagttcctaatacaaaaactgagtcttattttggaacgtttgcttgctacggactggtttcatgacaaatactgcctttatgtccctgttagttggggaagaagaatatccaatccggtatgtctctgatgtcccgtgttcttattatctgttttattttcacacacagtaaaatctcgctattattatggtgtttagggtttgtgcccttcttatttccgaaatctctgaggtggtttagaaaatagaatttgatgaaagtgggacaatggggaatggaagcaaagtctacttgccagggtgctcgaggggaactgattgctgacacctggacatggaattggcctcaaggtttcccagcagcggcggcgaaaaagagtacatcctgacacacagggtttttatcctttcgacaaagggaagcagccacgctcattcacagcagcactttctaggaagcacatccaaggaggaatctccagcgcaggtccttgtgtaaggtacattgttggagcacaatgagccatgtcttcgccgtgcttttgtcggggtcagaaatgccgcgcaagcagatggtccctgcattcatgtttttcaggggtcagggtacgacattaaactgtggtataatgaaaatggaagtacttctcatttctataaaaacgctgctttttgattatataaattagtataggatgaaagctgggaagatgaaaaaagagtagtttaacatagccattatttaatcattcataaagtactttttaaagcatttattacgggtaaaatatagtcccattagacacattccctctttgtgctaacttggtttaactcaaaatacaaagggatacaggaatttatgcaaagaacatcctcccctgcccccgtaaaaccatatttgaatatatgtggttttattattttactctaatgtaatttaaataaatgaccaatatttttaaaaataagaaatccttgaatattcttcagtaaatagataacaacagggtataatgaaacactgtttatatttaaatgactgctttgaaacggtgtgaaagcagcttaaatgggtaaaatgctgcccttttatgtcagtaattagccccttggtcttttttcacgataatgcaaaattgtacttctctgtaggcttacacaaattctgaattattgaaatataaattaatggtgaatctttctaaagctcttttcagaatttttatctggtgggagtgaaattaaaacatccaaaattctaaattagaatgtggcaaagtagagacagccagctagaatttggtaaaagacaggtgtttaataaatcttttcctagacatccatgggttggtactagtgtggtggggtagagaaagctttggcgtgttttaggttggccaaatgaatcagttaattgatgttattaaagccaggtgggacaatagtaggttagaccgcctggttttgattgaccctgaatgaggaatcacagacatgatgaggttgggattggagaggacatcagaaacctccatatgggtctgttcctttttcagacccgccagcatgacctgccctgggttacacagtgagagacgaaccgcatggggatgtagggcagagcatctgtctcccaatctgttttcttcctacccacctcagttacaactatgactccaggttgaagttgggcatctcctatctgaccaagggacagggtctaagaacagcaggggcagtgatgacaaaagattgtctctttaaagcaagctgggcattgagtcaacttttcattatctcttcaattattttctttgtgtagtattaggtcggtgcaaacctaatgacggtttttgccataatacatcttccgaaagatagtttccatcacctctccctcccctgcttaatttcataaaatactttattgctttcttcatacataccaacctgtagaaatcatttgaccatagattgccacatttattttatggaaatagccagggcacaggccagcggatgtagtagggcaggagagaatcagcagagctggctaacaaatgcagtgggtctttcctcagtttcttgtttttgtgtggttagcttgccctgtctttctgactataactggaggcacagtggttattgcctttgttactagctgacattggctgacattgctgagctaggtgggctttctatatagggtcctgtgctgaataacagtgtttcagttcatcagccaagatcaaagtcggtggtcccataagattataatggagctaaaaaattcttgttgcctagtgacatcgtagtcattgtgcctttgtaacattgtagcacaattactttattttaaaaataaatttggtagccaggcgtgcctcacacctgtaatcctagcactttgggaggacgaggtgggcagattgcttgagttcaggagttcgagaccagctggtgaaacctcgtctctaccaaaaatacaaaaaaattagctgggcgtggtggcacacgcctgtgattgcagctactcaggaggctgaggtgggagaatcacttgagcctgggtgatggagattgcagtaagccgagattgtgccactttattccatcctaggtgactgagaccccgtctgaaaaaataaaaataagtaaattcaatgtagtctgagtgtacggtatttataaagtgtatggtagtgtaggctttcacattcactcatcactactgactcactcagagcaacttccagtcctgcaagctccattcatggtgagtgccctctacaggtgtactgtattttggcttttatacagtatttttactgtaccttttgtatatttagatacaactggtgttataattgcctatagtattcagcacagtcacatgctgtacaggtttgtggcctagcagcaacaggcgatcccatataacctaggtatgtagtaggtggtaccatctaggtctgtgtaagtacactccgtgttcacacagtgatgaaattgcctaacaatgcacttttcaggaccctgttgtttatacctgttgttaagctatgcatgactgtaatctcctctaattcccatttaatctttaccataaacccacaagggagatactgttaaaaaaatcctcattttacaggtgaggaaacaaggctagaaatggttatattgcttgcacgaggccgtgctcctggtaattggcagggccaggattcacacccggacttctgactcaagcgcccacgctcaagtactaggccatgaaagggagtccaggctcacaggctgatgatgcctaaacaccaagcggaggagggtatgaccaaagggcagagccagagaggagaccatgggggagctgacggcagaaccttttgggggcgtggggggtgggggtctctctggctaggcttcacattcatgcttttgattagtgattggaaccaaggtctggggactggcatagaaactttccaggttaggattcagtcccagctttgcctttcactggctctgtgactgggtcaagccctttctgcatctgctctttctctgtggaagaggaaataaaatggctaaaggtgttatcacaggccctggctcctagaaagcactgtgctgtgagccagaggtttaagatgggcttcagcctcacagcagtcctgtgaggtaggtgtcgttagccttagctgtagatgaagaaactgaggcttgggaagaccagccggcttgctctggggcacctggtgaagagctggctggatggaggattggatagtgatgggtccctcctgccatactagaagagcttcctggacagtttgcttggattggagtttaatttctaaagccatttttttaggtgttcttaccagactgagctagtgcatctgtcccaccgaatagcctaagactttagtggtcatagagggttttgcagcggatctggtgaagaaatgaactgaaaatgagcctgctggccataggagggcctagacctggaccataccccatcatcatttagacaataaagggtggttaattcccttggaacaccaaggacagagagggggctagtttaatggtcaggatctgattctgctgcagctagaagactgaagcctgcctctacatggtggtccggggtaaaaagttcaaagctcagcacactacccacaaggcttggtggtttctttacgtgtgactttctcagccgacttgaaatccaccaggtgtctcttgttctctgcttggcccaggtgggagcccctgattgtctcttgacttaaatgttgctcagaagaggaaataaagcaggagctaaggagcacaacgatgtcagggggattctggcccgatggtcgtgcagttcctagatttggagtcgtgaaaacaatcactaacacctgcgtggtcagggacggcctatacggcacttcatcatagggtctgatttttatcctcacagcagccttgtgaacattgctgatatttgacacaccaggcagccaaggtgtggggcagttgaatgacttgcccaagagcaaacagcaagtaagcagcagaattaggatgtggacctctcctgccctttctgccacactgtgttcctcgtgtcatggagtcctccctgcaggtcactcgggtaagagaccaaggctcacagatgggagctggcttgccagagctagggctcctcaggacccaggtgatgggcttgcttctctgacatgtggtccctgacctctgttttctcacctgtaagatggggatcatagcattattaatagtcatgttgttgagaggattaaaggcgattttgcaagggaaccctctgtgaacaacagatgctggcccattgatttccttgtgcatctagtcccactttctcaggcatttaggctctgccctgctctggctctctctctcttcagccttccaccgtatcaggagagtggagactctggaggaagacagatcttggtttggtttctaggtttgatgctgactgactgggtttgggaatgaacaaatgatctcacctcccttggtctggcttcctcatctgtaaaacagagataataattctcatctcacttttcatgtgggatctttgtgaggagtcaatacaaataatgtgcgagggagctctcatttaccagaaggcattagttaactggtcaagaatagttcaagagagtcttacctcccagtgaagtttaaggtttggcagtatctgagcactgggggaatcttttcctataccccccttgaagtgccatagggttttgagaatcagtcacacggcacacctgttaaatccctgtgttcttccatgattgctgcctttctttgccttatgattttttcccttattgtggcctagtccacggaggttggaaagaggagtgtgcccttcccttcccttccctttcctcagcaaggggctagtttctactcatagctcagggctcacccacagcatagcgctgtgtggaagcctggtgggggcactgggtgagtggtgctgcagcagaaaggcctcctgctgagacgctgaggtcagcattttcagcggcagggagccctgtgactgaaagcagaaagaccaagtacagtgtgaggactcgggttggtgtttgtggccacattgatggcttcatggaagtatgttcccctctgtgcaatgaactagtagggcctgtgtcttggggcctgcaccttttgattgcaggcaccaggcccagcattttttctgtgttgcctatctggacgacaagccatacggtagttactagcgtccccattttgcaggtgaggcagatgaagctaggaggcgttaacttaaatgactctttgctgagggaataaacccataagatgacaaatgaggtctgtggtcactttcttcactgttgcagtgctgtgcccagcactgagtgtgagggatgtcatggagagaatgctgaatttggagtccggtggcctggctttgagtccctgctctgtaactttacttcgttgtgaccctcactttcttcattggtcataaagcaggaggtaaaaatttaaatgagatctgtgtgaaagcgttttataatctacgaagctatatacacatgggcggcatcatccttatggctgtctgttgagagagggcctcgaggagaggacttggcttcatcttgccttctaatccctcactgcaaggccctgaatcctaatccctcactgcaaggccctgaatcctaattccactccatctctccatgatgccagtgccacatctgggacctacgcagaagagtcatacctgccagcacagctatggtgattgtgcttgggaagaagttgaagttgcagaaggaaggtggtagagagggactgaaagagccaaccaggccagagctcgacaggaccctccctccttccctacccttcagacaggagctgcatcaccattttcttttccttttctttctttctttttttttttttttagacagagtctcactctgtcacccaggctggagtgcagtggcagtatcttggctcactgcaacctctgcctcccaggttcaagcgattcttctgcctcagcctcctgagtagctggggctacaggcgtgcgccaccacacccagctaatttttgtatttttagtagagacggggtttcaccatattggccaggctggtctcaaactcctgaccttgtgatccacccatctcagcctcccaaagtgctgggattacaggcatgagccaccgtgcccggccatgcatcacgattttcaaaggccagcttcctgactgttccttgaactccttgagataggtatttactgtgcttgtgacatgcaaactgcaaataattcttgcctcataatggataggcctgtaacccagccagccctctaggcaagcaaatgttatttcctagttttaagtgtgagcttaatatgtgaattaatttcacatcttcatcctcttcctaaatctgtctttgttttgtctgatgaataactgaagtaatggatttggtcacaccactagctgggtagccacctgaggctggagttctgatatgtgggtcttgcctgctttctctgcactgtggctttgcacgtcgggtgctgaagctggggagctggaatcagctggtgtgttctctgtagaactgagaggactagcaccctggggtggaagcagccctgccttctgaaccacagacttgcttgtgtttgatcttatgctgttttcttactatttctgataagaatgtgaactccttgtgagcagggacccagtgtcccatttctcttaaatcctctacagctgctggcatgggatgtttggtaaataatagaccatttaatgaagcatcactctgtctgtaccaggcaccttgaagttgctttgattgctttgcctgttttcctaataggtgtccggtggtctctctttccaatgcaggaacagagtgctggaggtagagactgtgattgcttaatgaagatatcagaacttgcacaacccacacatagggctcccatcaaagcagtagttctagggctgcaacctcttcccaaagatgttgcaacacttgtcttcagagccagtttctgcttttcattttcctttgcttctggctaaaaatgggatcctgttgtcactgaccttactccccgtcttttctttaagaaactcttgagtatttgtaagaaaatcaaatctatcttcaaataaccaagttttcttatctttgagaatcttgagtgcaatgtgtcatgggctctgaaggtcttacgttgaggaatggcaatattatcagaattacgtgtccagcttcccaagcttactactttgaaggaacacatatttacacaattctgatgtgtttattaaacaaacagctttaccacttcgcagtcacgcttctctaagtctgcagtctcgtctggcctgactttctccttgtgccaagaattccttcaccttttctctttagcctttggccccaggaaaatgggaaagtaagatattttactcctggccaatgcctgatttttagaagccttcctcactccctggcaaggcacattttcctgttacctcagagtaaagagactcggttctggggttctgcatagtgatgctacatgcctgacccttgctagggtttgagggtccttgggaactgatgcaatcgtagaagtcacagctgtcattcaggttatttacagaagtagacagaattgcttcacttgccagcagggcgtcttgagcttgactcagaaggatatgtaagtttctgctttttttttcttgcctgtttcaaaaacgcatttttgataccaggaaagttagacaatttaatcttatctgtagcagagggagcttcatccttgctgtgtgaagctgtgcgagacgacaaagactgttgtagaaagaggcctcttgcttataattgaagcatctttgacctgagtcagtgttctgcagccaggatcagataatcagcactggtcactggcacctggcattgggacctggaggcaaagaataacagaattaattggtttccagtaagtagcagggatcatggcatgttcatactttttaaaagaagccttattgagattgagatataattcacacaccctatacttaactaatttaaatcatacaattcagtgttttttactatattcactgttaagcaaccatcatcaaaatcaactttagaacattttcatcacccaaagaaaccccatacctattagctgtcaccccattttccattctattccccctccctagccccagccctaggcaattgctaatctgctttctgtctgtggatttacctattctgaatatttcatataaacgggatcatacaatatgtgtcctttttgcctggcttagcataatgttttcaaggttgattcatactatcgtgtgtatcactacttcattcctttttatggtagaataatcgtccactaaagggacataccacatttatttatctcttcatcaactgatgaacatttgagtgttttcccctttttggctattatgaataatgttgctgtgaacattcatgtgcaagtattttgtgaacttaagttttcaattctcttggctatattcctgggagtggaattgctaggtcatatggtaactttcccattttgagggactgccaagctgcttgccaaagcagctgcgccattttacattaccaccagcaacatgtggaggttccaatttctgtacgtctttgctaacacttgttattgtctatctttttaattatagccatcatagtgcatatgaagtggtatctcattgtagttttgatttgcatttctctgatgactaataatagtgagcatcttttcatgtgcttattagccgtttgtatcaaatcctttgctcatttttaaattgaatttttaaaattattggtttgtggcagggcatggtggctcatgcctgtaatcccagcactttgggaggccaaggcgggtcggtcacctgaggccaggagttcgagaccagcctggccagcatggtgaaaccctgtctctactaaaaatacaaaaaatagtcagacatggtcacaggcatctgtagtcccagctacttgggaggttcaagccggagaatcgcttgaacccaggaggtggaggttgcagtgagcctagatcatgccactgcactccagcctgggcaacagagtgagactcaatctcaaaaaaaaaaaaattattggtttataagacttcttcatatattctgtataccagttcctttttggatttatgatttgcaaactcctttctttctttctttctttctttctttctttctttctttctttcttttcttttcttttcttttctttttctttcttttctttctttctcctttcctttcctcctgtcctttcctctctccctttctctttcttttccttttctttctttcttctttttttctttctttccttttttcctctctctctttccctatttctttctcttttcttcaggcttttgccctgctggccatactggagtacagtggtatcatcatagctcactgcaactttgaactcctgggctcaagcaatcctcctgcctcagcttcctgagtagctaggattacaggtgtgtgccacccaacctgtgctaatttttaaaaatttttgtagagatgggggtcctgctacgttgcccaaactggtcttgaaatcctggcctcaagcgattccctgcctcagcttcctaaagcattggtgttccaggcatgagctactcactgctggcctcttcaatttcttgatggtatccttcaagcacaaaagtttttacttttgatgacgcgtaatatacattgttagaaggccatagctggattgagtcttcaaggttgcctgttccaactcccttgtcggagtaacgggaggcactgtgatcagagaggaggggcctttctgagggtcacagacccacaaaaccaggactggagtataagtctctggactttcaccttgggacattctcagtttccaccccactgtttctgagggtcgaaaggtttgggtgtatatgtagggaaagataattggtaggctctgaagcacacagttcatttgtttttcaataaggaagagtcatgttagaaattttgtcctttcttccagaaggtacactatatagcctggagccacactgtccaaaatggtagtcactggccacatgtcattataagaacttaaactaattaaaattaaatgaaatttaagattctcagtcataaagctgtattttggctaagcattgtgacttatgcccataatcccagtattttgagaggctgaggcaggattgcttgaggccatgagttggagaacagcctggaaaacatagtgagaccccatctctaccaaaaaaaaaaaaaaaagaaattagccaggcatggtggtgtgtgcttgtagtcctagctagctacccaggaggctgaggtaggaggattgcttcagcccaggagttcaaagttgcagtgatttgtgatcatgccactgcactctagcctgagtgacagagcgagaagctgggggaaaaaaaaccacatttccattgttccttatttatatatggccaccgtattagacgacatatgggttgtttccatgattgcagccagtcctgttgggcagcactggctatacccactggcattctgtccactcctgacccagtggtgccctagacacccagctgtgatctgtcttctgtgggtccctcatctacctgctgctcaggcttcttctttatgtagttgcctctgggcttcctagcaagccccctacccagactagatggtctgtgggccctgcaggcagagacacttcttctgcatagtttttggatgtggttgccagtataaaggctagtgcctttcctcacctcagccaataggtgtgacttgcagaaatagagctgaaagatgcttgcaagaagtgtgttctttcttggagaggttagctcctaaaagtgaatgctgaatgagtggatgaattgatctactctttggactaggggaagatgttgaagaattttttatcgaaaattttattgatatgtaataattgtacatatgtatggggtacatgtgctattttgatacatgcctgtaaggtgtaatgatcatagtgggtaattagggtatccgccacctcaaacactatttctttgtgttgggaacatttcaaatcttctattttgaaatatacaataaattattaactattagtcaccctactgtgctatcaaacactagagcttatttcttccatctaactgtgtgtttgacccattaaccaacctctcttcatccccctccagcccctcttctcagcctctgataactattattctactccctgtctccatgagatcagcttttttagttcccacataagagtgagaacatgcgatatttttctttctgtgcctggcttatttcacttaccgtgatggaagttggagtactctcgagtttagttcttttggctgcattggttggtggtgttttgggtgggtacttcattttagaggcagtcagttccaagaatttgcaagatgctgagtgaagtggggcaagaggcaggagttggaacactgggtgttctgagacagtgacatgagggagatgggtgtagtcctgctgggtgccctgtgtagaggtttcctttatttcaggttcctgtaaccctgagggccatctgagccatcaatccaaggtcaacaggctatggaaaaaatctcaaaactgctctatgtaaaaggatgttttacccacatcttagtgatgggagatactgtagtttggaccaagctaggatattatagaccagaaatgagtctggggactatctcagacatgagaaaggattgaccaagaatcatagcaaattcacagtggcacaactgagactggcatccagggcctctggcgcttcgccataggcacattccaagtgccatggtgtatgtcttcatttacacaaggacaggtacttcatacacacaaacaagcaaagcaacttcttggagacattgcccaggcttagattttaatttatttaacccacgttaggcactcagtcctgccttcaggcccccctttgccactctcataattagaaggtattaagaaacctttcaattacggcaagatcaccagggttctcatttctttttcttatctccagcctatctctagaatctattttttgcagggaggactgtccttgactttaaagaaagcattcagaaacaaagagacttgttatttttgaggtcagcctcctccaccagactctgagagccttgagggcaaggacagtgttgtctcttatcactactcaaggactggtgcagagtgttcatttggtgaatatctgtaaaattctcatttttaggagaactcccttttgctgggcttctcaggtatgaggtcccttttccatatggtcctgaaactttatcaattccagtttagaagtagcgacctgaggaaatggaataattcttctgtccatggtgaggggaggatggggggaaggtgctcattttgcctttgaacttgataagagcagagaacagtcaggtttgtgctgagaatgtaagggttactttttcctgaattgggcagtgggtggatggagcccaacaggacatcctgggaaggattcccagagcagggagagggcaagcacagaattgtggaaggaattccgtgccataaacacagaatatcttatttaacagtggaacttttttgctgtcttctttagaggtggaaaacagttctttccaaagacaagcttaatgactgctgtgccaacacacaaaactacaagatacatttaagcatcagtttagcaccagaaatgcagtttacagaagatttgcatgaaaatcttaaaaacaggttgaaaatgtcctaggctcagctagtgcacttttaagttagtaggaacagggctctagggatgagatgatggagcagggatgtgacataggtcaggggtacatgtgtacctggcctttgaagcctcttttggggttcattttaattaatttcttgttcagcttttaccatgggcctaagtttctctggttggagcagagtaagttttcaggctgaatttcttggatcattgcctttgttttctttttcacatagcctgtggatgtctggccttttcagccaaggaaagaaaatggaaatggttttaaacactcactcacttgagccatgaatttcaaccatatattaattttgcttatttttggattttcaaatcttctgagaagcaatgaaatgacacaggggcaggccactagggtgctttggaggttctgcgtggcctggagcagtggggagaggctcgggagagtggaactgtgccctcccactcgtgctacccacacagcagcctcctccctcactctctccttcatgtatgtgtgtttgaggttctgcttagcactttatttggggaaaataagttttctgaaaacttattttgtaggcaatagaggagagattggtgtatgtcttatccttactcgagttggcaaggactctgggccgaatatttagggcttggctcttgctccctctacctaggtggattatgcagtgagatctcacttgcctttaactcatagttattgcttagctcttaggagcagtagaagtaaaaatcctggtatcgtaaatgagcacaatccctgtaataagtgatttctgtgtattattggtagcttgaaaaatattaagtgttacctccattttttaaatatgaaataaagggctagatcaggacatgaactcattcctgttgtcttccagagctattttactaaggaggagatgacccagtggtgaagagtaggtagcagcatgtcaaacctggtagctttgcagtaggggaggtgggcagtacagtgggaataagctagaactaataattcagtgatcatatggggccttgcaggtttttgttattttctgcttgggtgtaggttttgctttgcaaagtctgaaggtgacctatataattcccatatatttggagctctcaggatgtgccaaggatcagcccaattctctgaacgttaactgagggagtcaggagtccttcctgacctcaagaagctcacagttcagttggggatagatggccttgagcttgtgttttagagctctggtcccaggtagtgagctcaaacccagcacagactagattaagccaaagaggaatttattggctcacattgctggccagtccagggataaactggagtcagctcaggcgctcaaatgatgtcaccaggatctggtttctctctctccagcctggctccacttcctgtatgttgattccattctcaagaattctcagacacgacctccccttgtaattgcaggatggctgccaacagtttctaggcctacgcctttccaccttccagcaaaagagagtgtgagagtctttgtcccagtccttccagatggagtcttgtttcttcccattgtctcagattgggtcacgcgcacatccggaaccagttgcaaggccagggacgtgtgcagcactgctgacgtggggccaggtcatgtgcgtcacccctcgacctggggaggagccaactctaccctaagttcctgggctaagaatggaaagagagtcaagtattggttattggggaaaggtaatgatgtaggcttgaactctggcctgacccattgtcaggacagcctgaacttggggctgtattcccacctgacatagccttaagtcagaatttattccagtatgagtacagcatcttgttaccatgtggttttagctgcactgtggatttagacaccaaatcttgtcttccctgagaacattgtccttcctagaggtggggtggaaaacttatttcaggtaagcattcggaccttgaccctaaccttaatggtgattactgttcgaggtttttcaaacacatagtgaataaggacagctggtgcaatggcacgccctccaattggctacgttacacagataaacattcttaatctttctgaggttttgtatagaagagtggagaattgtaccaacttttctccccccggttgtacatcttcactttgtcaccaagcctggattcctcatctgtaaaatagtatcccctcagagttgctatgagaaataaatgaagtgatttgagtaaggcatggcacctggaacatagtacatcgtgcataagaagcagctattgttattatctcctaatttgtcaaatgagcagggcgtattgccagataagctctttaaagttttaatgttcacattctataaatctaggaaaatctttcctccactgcccacccacacttggattttgagaactgcatcttcattgagggtaacgtgttagaaagctctcaaacattatagccctcacagaatgtatagtacttcataattcaccaagtactttcgtgtccattctctcattcaatcctagaacaatctatgatgaaacaaagcaggtatcacaattcctgttttatagatcagaaaacttagggcttagagagatcaaatgacttacccaagggcatagtggctggaaggttgcagggcaaggcctattgccagaatcttctcagatatcccatgtctgttggagcattcttctactccagtgtggatttgcctttctgatggctttgactggagaactgtattgggtagttcatcaaaataagaagccttgagttcatatagtgaaaaataagatcaccttttccctttgttcattggcttgatttattaggattgtattctcaaacctttcctgctattaaaggaaatgaccttagtttgtgttgcatgaaatagcattaagtcaagtttacaacatttcaaagttatggtcagtagcattccaattagaacctaaaaagcttacctagctgaggtttaagtcgttgatcttggaaaaggtaaagacttctcagggaggttgggctgctgtgtatgacagctagaccctcagttcttggtctgttagcatgtggcccatttcttcctatccatgcccctccataaagctttgtgcgctggtagtatttacagtactggatgataattatggcattaattatttgagataaatggagtgtgcccagtagccaatagactattgttagagtattattagtatttttataggtcttttggatagcattctatttcaagacatttgaaaatgtagaccagattagtcaaaagcattgtacatgatctgtccatgagtgtaggctctcattagaacttctggaatcattctgaaatatacccagctagataatactaagtcataccaattaaaaggaaagacttgagtttgagttatagaatgttggagagaaatctagtttattacttttaatattgaagtcaaattttgatttttcttttatggttaatattacctgggtcctaagaaagattgcaaacatgttttcttaccttttttcttgtagaagctttatatgatgttagcttttgcatttaggtctgtggtccatttcaaattaatttcttttctatggtatgaggttggggttaagaggttaattccagccacctcccttgtgggtatccagttgctccagcaacatatgttgaaaatgctttcctgtcctcatttaattgctttggtacctttattgaaaatcaatggatcacataaatttggttctgtttctagggtctctgttctgttccattgacacatttgtctttatgctatctctgtactgttattattactgatgctttgttttaagtctaaacattggattatataagttcttccatttttgttctccacccctcactacaagattgtattggctattctaggtcctttgcatttctatctaaattttagaattaacttgtcaagttctataaaacagccctctggggttttgattgagatgacgtcgaatctataggtcaatttggggagaaggatagcttaagaacattgagtcttctaatcactgagtgtgatgtatctctttagatcttctctaatttttctcagcaatgttattagtatagaggtcttacatgtattttatttatccctaatttttatattatttttgattttattgcacatagaattttaaaaagaatcttctagttgtttattactagtatatggaaacatgcttgatttttgtatatgttgccttgtacatgccaccttgtcacatttacttattacttccagtagtttttgaagattctttagaattttctatgaacacaattattttgtgaataaagatagttttgtttcttccattctaatacttatttatgtatatatgtatgtatgtatttttcttgccttgtaacattggctaagaccttccatatggtatagaatagaaatggtaagagtgtagacattcttgccttcttcttgaactcagaaagtgtttattctttcatcactgagtacagtgttagttggaggttctgcataggtgtcctttattggttgaggaagtttccttctgtttctattttcctgagagtttttattatgaaaggatgttgaattttgtcaaatgtcttttctacatgtattgagataatcatatggtttttctcctttattttattgtggtaaattccattgaattttgcatgttaaaccaattttgcattcccaggacgcacctcacttggtcctgatatattatcctttttatatattgagggatttgattttctagtattttagcataggctttttacatgtatgttcttgagggatattgggtctgtacattttctttgtaatgtccctgtctggctttggtgtctgggttgtgctggactcataatgtgagaaatagtgtggtaccagttgctctgtcatgaccagcagcagaagtctagttttctttaagtgtgtagagtgatgactgttaggtaaagagttagaattattttaatgatcagccaagagtctctgctaagtaacatgaggtatctgtgaaatggcatacataactgttgtgtatgaagcagtgcatcagagaggctgggaaatactttaagtgggttgagcaactcataccattccttatgctaaaattgtacttatattttattagcaaaatttcttttatcactgagagaatgaattatctatctgattgccactcataatttatggagttatcagttaataaggttttattgtatgttaatatgagactcatttttttcctttctctcctctttgggttgtatttcttccaagtaagagcttaaattcatgggtcagctagtactgaccagcatctgttgagttattttgcataaatttggttacctggcctcagataagaatgtttttttaatctgtattggtggcattgttggttgctgatactgctgtagtttgttcttgcaagacttctgtttaaaagaagggttataaattcagtgtaactcagagcagaggtaaagtatagaatggaattagaagaaaacgaagcatcaatttcagtaaagtagaaatcgtttattaaataagcggtgggtgacagggaattgggagtaaccatcctggttcccatagtgatggtgcatccaggaaaaatacagggaaaaagggaatcattatggaagagttttgggtgtgtgttgtcatgctttaggaaacttgccaatttctacacctctgtcttcagattgtcgtgtttagacacacatcccacacaaagtgctcagcagtacttcttgtgctcgtctttatcccctggaatctagaggatggcacctctgggggagttattgtctcacatgatttagaaagacctccactattttctttccaagagtcgaaggaaggtgggtgagttggcctggcacctataagcagggacctacaacactgcttgaagcacctggtgacatctgcttgacaggcttcccctccccactgttgtcaccacttccatgggtggtgggtggtgttgcacggtgcccatggggtggtgtgcatgttctccaatgccacctgccctgcctcagtgctgcctcctgtaacagtctcatttgtttcgctggagtatccttatcgaaaaggtcttggggaccatttgcctaaaatgttccccagcatgaaatgtcccccacacttgctctgcacccgtgcacatcctccttttctttttttttttctgagacaaggtcttgctctgttgcccaggctggagtgcagtggcacaatcagtgctcactgcagccttgactcctgggctcaagcaatcctcctacctcagcctcccgagtagctgggactataagagtcccaccatgcccagctaattttaatttttttttttttttttgtagaggtgagggtctcagtatgttgcttaggctggtcttgaactcctggcctcaagcagtcctcttgcctcagcctcccactgggattataggcatgagccactgtgcccagcctcctcctcatttttgtagacatatcaagtctggcctccttcaggaagccttccctaactaactaatcaagctccccgtgtttctttcctttaggatctattttttggatgtgtatggtttaatatacccttaagaataatgcgtttggaattgtaattgagaagacaaggtttacgttagcagattatagtctaactctgatttttagaaaagtgatatagaatagagacttaaaaaaaatgacattctcacataggttttggatatttggagataggaggaaaaacatgtctttaaaccacacaatgggaagtgaagtgtttgcaacaaccagaacatttaggttataaagtgtcagagcagataatttaggctaaaagaaacaaagttaaatgatttggtgggggcttgatttctctggattgacccccctggactattggctgtttccttcacttccagactgtctggtaagatttttctacagaggtaccttcttattaatgaattcttcccatcacacccactctgtttgaatttctgaattaccttctccttttggtttctgtatctcaactttcttcttattgagtcttctctgacagtttctttgagggtattgctatcagagtcagacatgcccatgacaagattccaggctgtgtaatcttgagcaaatcaatcttgctggtctactttttttcttaaaagaacaaggaagcttgccttgcagggtggttagaatttgagacaatgtatgttgcatgcccagcaggtggcaggtagctaataacaggtgtgtgcttgctctacaccagggatcccctcggtctttggtctttgcatatcatagatactcagtaagcgctctcccaaaggattactgacttaacaggtagggtaatgtttatagccaaggggaggtgagtgtcatcaggcccaggtttgtatgcctatttctactgaattgtcgcaaagttatgtttcatcctatttaccaagttgtatttacagaagactagtcctgttataacaaagcccattgaaacaacacccaggaagtagaccacaagaagtcagtgggtatcttactctgtgtcctgcagggggatctggaaatgaataagggagagagaaaatgtggagtgcagaggatgctgcctggaggtgagactttaaccacatgattattctcagttatggagcaatggctttgttccaggcattgtctccaatagtcacaatcacaccatagggctgatgttttttctatcccactgaggtgtaaacagaggccccaagaggttgcatctggaggtgcgtgagcaaaatttggagagaagtaccaagtgggcacttcacaacaggtgaagagaatgaagagatggataaagataagtgttaagcactttttggtggtactggaactttatcatgtctcttgatttttaagaaaagtggcctattgactagaatttgagactttcattatattgttcagttggcttttgcatgtatattgcttttatgtttttgatgcgttttttcaaaaccctttaaattagttggattttatgttgttcttaagtttgatgaggtagacacttttttagctgggaggaatagagaggcagtgagtgtgttaacagaacacagcaacctcagactccagcccccgctctccttttatccagcggtgtgacgttgagcctgatgcatgacatcttggcagcagaggtgctggtgctctgtcaggctccgggacccctgactgaacatgcctagggtcatgaggaggtttttgttcctgtaacattggccacaactgcacagccagtgggtgaggatgctgagatacaaactgagaattttgcacttcgacctaggctctttgctagatcaaacttcttttgatgtcttagccatgatccctctgagatatctctctccaagttattaatatatctgtgtttcccatcatgtttccccttttgtcttggcttcaaagaagctcagagctaaatttattgcttgattatagttgctggattggccaaggtttaaaatttatgtttttaacttttttatgtgattccctccccattttcattttgatagtcttattgtttattgtatatcaccttaaatactttgagaagtagatcgggtctacgtttaaaaatcgcgtatgtgggaggagagggccattcggcaaatgggaaagagattggggtgactttggccaaaaaagtttgggatagatttttgtattctcttgtattatgttattccctatcagatggtctttgcagctcatttttctgtcttcttctgtgtggtcagaatcaggggagagtttttctttataaaaatgatttgttttcctgatagaacagtgctggtgggtaacattcagttctgaccttgtaggcagacctgggattcccagagggtgcagggaccgcagcactcactcttctttgtgacaggcctgaggcagcttccctggggtccccagcctgcctcctccacggctgctatggccgtgggcgctgagcacgtgcagctgctgcctgatgctcctggacagggaaggatagattttgggcatagttactaggtgtcactgtctccttttttcagcctggcttttacaagtagttgtaatttacttgacaaacacttatttggcatttccttcaatacgctgggtactgagatggttactgcatttttaggcatttaacggggataatagcatcatcgttaataattacaaatatgatcgatccatcatataggcaatacatttcagaagaatattattaaaaagactcatagtagtgggtgtatgcagctgtagtagaggagctgaagccactgagttaccccggggttcaagatggggagcagcattcccatctgtaggttgtgttcttgagtgggaaggcctccttggatacctctcgacagtaattccaggtacttgagctcacaaagaaagtgtctggggccctcagccctttggtgtggctcccagggacgcctgagttatttccagaagtggcgtggtgggtagagtgtgagggcaggcctcgcctccccgcccctctcccctgtgtggcttttcctttctgtaattcaactgattgcttttccttccaaattgctggcttaagctttatcttatctaattttatctcctccagccttgtacgtccagagcatcattagggcctgtgcccattctgtccctcccacttctcttggtctccctccacgtcctgaggggatagaaagacggagtctgcataacctccgcatcttcctgcctgggagggcggctagggtggtgcctgcagcctctggaacctctccattctgtgtgcccctcaacctcatggacatactggcgtttcaggacctggccctgctttctctgtccccgtctctctctgcccactggtttctgtgacccacgcccttcccaccccattctgccccttttcctcacttgcttttcttaccttctgtcacattcacatgctcactatttctttttactccaagcatctgttcctctaaatcatgaactgtagttggcataattaaatatgtaatgtgtttattttaatatcaatatgtcttttcatacacatattagtaagagacttggctgtcagcgccgggccagatcaccatttgcagatgtccactcacgccagctcccccacggaacgtttcttatgcacctcatcagttctctttctccttgtctctctttctgtctctgtgtctctttgttctgtgtacatctctctgtatgtccctggcttcctctctaacacaaattgctccaataggccggcaccttttcctctccgtaaaccccagtttgtaggtacacacaggcacccaggcaagggtagagaaaccaaagagcgcttgttcacacttgctcacacaaggaccagcagagacctagagctgcatgccacgtctttattatccttgctgctagctcctctggtacagcagcactgtgacagtttggaatttgagcctgggcactctcccctgagtgcatcggtgacgtaaaggcaggcaggcaggagcaatcacagcctcccgtcgcctgtgtgtcccaagtgagccccctccccaaagggatgtagggaagccagtccatctgcaaggtatctggagtggagtgacaggaagcagaggatccagtattattggaatagattacatggtatgtgcttgtcacttccgtttaaaggtaaatacaaatctgtctttggcttagaattctagcctcctgacctggggggtgaatattgactggcaggctttacctcccatgtagaaaagagttgcgtgccagggttataaattagagctctgcattggatggatcttcttaatgttttctgtggagtggaattagaacatgttgtttcttttgaggttgcaaaaagcaaacaaggatccctttcctcccagactagtgggaagtagactaattacttgaaatcctgttttatcagccataaaactgagatgaaagctggggcagttatgaagatcctgatatatcctagaccacaaatttctattccttttctggaagagaaaaactgcattttaggtttagataatttggtcaaattttttaggctatcaaatgcaaagattaagtttctagagtcttgaattttagcacagagatagcatcacttaaccttcccgagtgaaaattcctgccttctaggtggtggggaagatcaaacgagctgtggatgccagcatacttaatatgtgttcagtagatattagtgacagattcagtggatatgacggctgaaggcctgggtggctcttctgggcttgttggttggtttcattataatgtatatggttggacctaagataacccatgtttgtgcttctgtggacactggtgctttcagggtcttaactatattgttttcatggaaactttgaaaggactcatggctccaaaaggggctgaaaagttttgaatttccttttttctttctttgcaaaagattttacagcttaagtcatgtaattaataacaggggaggttaagagtcaaagatttttctcttaccctggtcattttcgaagctgcacttggcatgggttgaagcaaatttgtgtcttcttgaccatttacttttttttttaactgagaaaatagattctatctctaatgaagtaattgtaaacagccttgttaacatatggtactgattttttcacagaagcattgttgaaatgcatgggaactaccaggttaaaagacataaaaatagacaatctatatagtccagatggtatctccaaactaggggatccaagtggcatgagaaactgtctagagcaggagtggcaaacacggcccccgggccaacacggccttatgcctctttttgtatggcctgtgaactaagaatggtgttttacattttttaatgtttgaacaaatagctgaagaatagtaatatcttgtgacatataaaaatggtacaaaattcacatttcagttaccataagtaaagttttattggaacacagccccactcatccatttacgtattatctatgggtattttcctgctacaatggcagaaatgagtagttgcctaagatatttgctgtctggtcctttacagaaaaagtttgccaatctttggtctagatggtgaggaattttagttctcctatgtgttaactgatacatgatttcgttttgaagttcagcttttaactttcggttatttttctttctacttttattttttactaataaagacagaagaaaaccatggctggttagtctcactgctcagactatgccttctaatgtttttgataataaaagttaaaatgcacatgctaattttatttcaaacagtataagaaagcaaaatctctctcctacattgtcctttattccaattcctttacccagtgttaacatttaatagttaacattccaaaaaatgttttgtttatactagaatatatattcttttcaaaagcttttcttaagcttagtttactagtaaaaatactcttaaccttttactatgaaaaaaattcaaatatgtacagcacaagacagaaaagtgtaatgaaccctgtgtacccatcattcagctttcataactcttcgtcttatagccaatcttatttaatttgtggaatccatttcctgtattattttgaagcaaatctcaggtatatcatttttttctcaggtatatcagcaaatctcaggtatatcattttatctgtagatatttcagtatgtatctctaaaatataataacttttaaaaaacataaccacagtctgctaacacatgagaaaaaaataataattccttagtgtatatttgagcactgagtattacctataattgtctccccacacccacagttgtcttttaaatgtcatagtttattttactctctttgaattaggatacaggtaggtttcacacagtgtgacttggttgttgtcctttaagtctattttaatctgtctgttccctctgtacacactcttttatcctccttgctacttattttttaaagaaatgaggttacttgttagaggttttacatccccatagtattgtttaatatgttcctctctcctctgaatttcctgtgaatttggtagttggacctacaggctcataacattcaagttttgttttattttattactattttttagctaggctacttcactggtgacattgagtccttccaagaggaggcacttagtatctgattgtccttttttgtgatgttagtactcattgatgtttaatgtgtagatcaagtcattccttatgggttgtaaaatgctggatactcttagttctatgatttctgtgacatttattggcttaaatgtttgatttttctccatatttaccagtttttgaagttttttttttttttttttttttttttgacagagtctcgttctatctcccaggctggagtgcagtggggtgatcttggctcactgcaacctctgcctccacagttcaagcgtttctcgtgccttagcttactgagtacctgggactacaggcgcacgccaccatgcgtgccatgtctggctaatttttgtatttttaatagagatggggtttcactgtgttgcccaggctggtctcaaactcctcacctcaagtgatccgtccccatcggcctcccaaagtgctgggattacaggcgtgagccacagcgcctggcctgtttttgaagttttgacttaacttattagtaccctttaacagtgactggtttgttttttggtttttgtaatttttaaaagtatgatatattttagcatatttactgtgttctgctgaagttactgaccctcagatcatcccccttgtggtagtgtgaaccttctcacattggtccctgtgtctgtttggcatgacctagtagtctctgatagctttctctctttctggtacaacaagatgttttggattcatcttacacatttcttgccctggatctggaatcagccattttcttcaaggagtcagtcctgctgctttttagtgggagatagtatttcagaactaaattttgggttcagaggtacatatccataaacaaacagctttttatagtaaaaacacatacagaaaatgcatacagtacaacaccaatgtagcctcaaaaaagaacacagcagagcaccgcaggggatccctttctgaacacagtcttctcccacttccctcagtcaccactcagtgtttatggtaatgacttcctcgattttctttcctgtttgatcatttaagacaaaatacgtccctaagcagtatcacttggttttgtctgttttgaattttatttaaatggatcatgcttcctgaatttttttttttgttgttgttgttcgagacagagtcctgctctgtcgcccaggctggagtgcagtggcgtgatttcagctcactgcaacctccgcctcccgggttcaagcacttcttctgcctcagcctccctagtagctgggattacagatgcccaacaccatgcctgactaatttttgtatttttagtagagacaggttttcaccatgttagccaggctggccttgaactcctgacctcgtgatctgcccgcctccgcctcccaaagtgctgggattaccagcatgagccaccgtgccaagcctcctggattcttttatatcttgcttctttcattcaacatgagattcatttgttttcattttctttgcaatatgatactccattggatgagtagaccacaatctatccattctgctattgatgtacagtcaagttgtttctagttttgtgctgttaaagaattgctgctaaccttgtatctgtctctggttgcacatgtgcatatgtttttgaagggtatatacatagaagtcgaattgctgggttagatgctatgcatgtcttctttccaatgtgtcatgccagctgatatgctcaccaacagcgtgtgagcattcctgttgcttcacattcttgcccacacctggaattgtcagactttaacatttctgttagtttgttgatggaaagtgatatctgactgtgactttggtttggtgtttctctgattaccagtgaggttaaacacttctccatatgtttgagtattggacttttctcctttatgacatttctattcaagttgtttcagtaagtctttggttcattttcccattgagttatcttttattgattcataggcatttttatatgtattgggtacaggttttgattggttgggtgtgttgcgaatttcttcttccactctggcttatcttcactttctttatggtgtcttttgatgaacacattcttttttttttttttaaacacaaatgctatttatttgtttgtttgtttatttatttttgagacggagtctcactctgtcacccaggctagagtgcagtggcatgatctgagctcactgtaacctctacctcccaggttcaagcgattctcctgcctcagcctcctgagtagtggggattacagacatgtgccaccatgcccggctaatttttttttttttttctaatggtagagacagggtttcaccatgttggccagcctggtctcgaactcctgacctcaagcaatctgcccaccttggcctcccaaagtgctgggattacaggcgtgagccaccacgcctggccacaagtacttttaaaattttattgtaggacgtcttcctccactttgttgggatatgtggtatatagtaaagatttcaaatatagtaattattattatatactatttagtattatatgcaacttatatatgatcttttaaaaaaagtcttatatctttgcctttctatttaaatttcctttaaaaaaaattgacaccaaagaaataatagtgtcacattgtttgcaccttactttttcacatacaattttattctggagctctttctacattatccatatgccagtcggcttcattctttgtcatggtggcatgatatatgtatatatttttttgagatggagttttgcttttgtcacccatgctggagtgcaatggcgtgatctcggctcactgctacctccgcctcctgggttcaagcgattctctggcctcagcctcccaagtatttgggattacaagtgcacaccaccatgcctggctaatttgtgtatttttagtagagacagggtttcaccatgttggcccggctggtcttgaattcctgaccttagctgatccatttgcctcggcctcccaaagtgctgagattgcaggcgtgagccactgtgcgcggccggcatggtatttcattgacagaattaaggttgtttttcttgtttaaaattgtgctgcaaaaaactctggtacataatcttgacataattttgcgagtacatctataaagcaaattctaaacatgggaacttctgggtcaaacaatttgattgttttaaatattaatagacaatatttactcccagttaattcatgtaaaatagcagttcatacagcctaaattaggaggtctaactggccatattcagagaaattatctggatatgaagtaattttttgttaggtctaacctgtattaatgacaatatgattacagtattttcaaaagattgacacttagccattctccatgtttcaaaggaataaatgctaatttagccaaataatagtttggagcaaattttgtgggagagcctgcgcttgtgtggagcaaatcccctgtcgtgttgtgaaatgggcgcggagaagcctgttctagtgactgtcgatgctctttgtgacagctaacgtgagggctctccggctcctgagtcatcctcctccccaaatgggggactgaccagtcttttggatctctgattttgttaaagcggaaatgtttttctctcccattccagtaattctttgagtatatctgtttttcttcagatgtttcgtgagcacctgtgttctggggaatagtgaacaccgtgaggaaggtggagtgttgactatgccatccactgtttgtcttcaagcagattactgtcgcgtaggggagttgtgatgtagtgtatttgtataacggtcttttaccataagtgggtattactccctccaggacatcatttaagtcaaggcagctgagacaatcacaaaagaccacgtattttatgattccattaatatgaacatcccaaatagggaactctatagaggcagaaagtaagatcagtgattgtttcaggcaggagagagtggggtgatagggaggtgatagctaaaagatacagggtttctttttgaggtaatcaaaatgttctaagattgaccatggtgctggttgcatatatctgtgaatatattaaaagccattaaattgtgtacttaaatgaattgcatggtatgtgaattatgtttcaatgaagctattaaaaaacattaaaaacaagcaaaaaatgcaggttttttttttttctcagttgtctcagtgaagttttccctgtaggtttcatagttactttaattgaatggatggtaaagagttgtctggtctgggctagatgcagtggctcgtgcctgtaatcccagcactttgacaggccaaggaaggtggattgcttgagcccaggagtttgtgaccagcctgggcaacatatggagactttgtctctacaaaaataaaataattagcagagcatggtggtggtgtggctgtagcactagctactcaagaggctgaggtgggatgatcacttgagcccaggagttcaaggctgcagtgaggtttgactgtgccactacattccagcctgggcaacagagcaagaccctgttgcttaaataaataaataaataaataaacaaataaatattcaagaattctcaggtctggatgtagggttagatgccagttagatataagtgaaatagccggtttacttaccaatagacaggaaagtagtcttttgtgattcccttctccactaaatacaaatcagtgctactcaggggctctttaaagaaggagttggccaggtgtggtgactcacgcctgtaatcttagcactttgggaggttgaggcgggtggatcacctgaggtcaggagttcgagaccattcctgaccaacatggagaaaccctgtctctaaaaatacaaaatcagctgggcgtggtggcgcatgcctgtaatcccagctacttgggaggctgaggcaggagaatcgcttgaacccgggaggcggaggttgtagtgagccgagattgtgccattgcactccagcctgggcaacaagagcgaaactccgactacatgtaccctaaaacttaaagtataataataataaaattaaaaaaaaaaaaaagaacagcagcagtaaaaaataaataaagaaagaaataaataaataaatgaagaagtcaatcggtaccataagaaaggacaaaaaccaaaacaaacccaaagcaaaaccaaaaactccccacaaaccagcctcccctaacccttttaactcaaagcttcgtaatgtctctgaatttataattacgattttaaagagcactgtttctcatgccccatcccccaacccatttcgggagtaaaccttttctgtcagggtgaggagaaagtgggtaaaggacttcagcatttacagttgagttagtatttgttgttctccaaatgtgcaggattcagggccctctctttggtaggtgtgtgggaatctattggtatttattgggttcttaatgcctgcctgtccttgtgtaagacactctggcagtacccaggaatacatcaaccagctgagacaaacatgaagaataattattgtcctaataatagctaacatttattgattgcttactatgtgctaagcctctaaattttaaagttgttgtaaaagcaggaacaaagcctgtgacatgtaccattgtcttatttagctctcagaatcacagtggtagaggcactctcattattttacaggtgaggaaactgagattcagagggcttagatatctcgtccagggtcacatggctggtaaatggtagattcatacccagatcagcctaacagatctgaactttttcttgttgggggagaggggcaatggaatttttaacattttcattgcacaaataatgcaaattaggcaagaaaagcacaaagaagaaaataagaatcatccatatttctacacacagatttgctcatctttaatgtttctgtgtgtttccttcgtttgtgtttttatgccttctgatttatttttatatccagtcaatctctgtcagcccatcagtgaaggccattgctaattcattaaagaccttgggactgaggacatacaaatcataatcaggatatttcatggactggggattgtgggtgggggaaggatgcagatctgacaaattcatgctgtggtctaactcagagagggtcatcttgtcccaaagtgtcccctcagtctttctctccttccccaattaagactgtcttgtgaaataattaaaaatatctataaaggggcaaattttgcagcacatataattatagaaattatatagtacaatatggacaaatgcagggctaacagtaattcttagggctttcacagatgggcaaggttgggggtagggaccggctggaggcaaagagaaggcttcctgagacagaggggactggggctggctcccacccagatgaaaacctgcaaatctcagggagaaagcttcatgcactatgaaaaggtcacaagaacctccagtcctgggatgatgcaggcaagggaaaaatcaaatgggactttccccattgagtcatcaatcatttgcctggtgattggtgggagtcacctgtgtgttgtgcctgttcccagtgggaggttagagcttcatctctgaattaatatcaaaagaagagctgtctttacaaatcaatatgcttctcacaaggggatggcatatttagatgcagaggttggcatggcgaatcggatggtttgagggtagtggggcatctgggttaaaggccctgatgttctacagacttgggtttgaatcttagctgtgctactctcaagcgctgtcacctggcaagttgcttcgtccctcattcgaggaagtggggccactggagcgtctacctcataggcttacaggtggttgggaggattaaatgagatgagcacatgcagcatttagtacagtgcctggcatagaataagtgctccatagggattagctaatgttttataattctaaaggggaggaaagatggatattaaggttggagaactatggatccttcccattgtattcacaaagaaaaccatgccatgaggcttttttggcaagtcactttaactttttgggcctaggttttcttaacagtgagatgctgggtggttctaaatgatctttcaaattctgcccatgactataatcctatgattctgcagttttaaagagcatcttaatgaatacaaagtacttgccagaatattttcttttttgattctccccacaacagtaatgggccgatgatgattcctgccattttcccagaccaggcagcagagctggcagacatttaatgactctccctcacaaggccatggagctcgtgagagagcataaggccaggttccctttacacacatgtggtgtgtaaaacggatgtacctcgattgggcttttgcccttgtcatggaactgagcccgaaggaggttcttagaggagcggggtgaggatttcaggagaggtgattcccaggggagcttcaggccaggactgtcatagtagagcagtaatttatgggcttctgacagcttgaaaaggtcatggtgttcttctttacttataaatgaaaacaaagtaatttgggggtcagggaaagacgaaagggcttgtgcagactgacctcaaaatccctggtggttatcatgtaaaaattcgatttgtttgatgcaattagccaaacctggacactttcttctccttctcaaagcaattgggattcagggcacaggataaaacagagttggggcagggggcagggaggaggcgctctggcaacagtgggaagtccagattgtttctattgtgcgtgctgatgtaattctttttctgcaagccctctgtggtttatcactttgccttcatgcacccttcttataaagcaattacagaatcacgggaaaataggcagtagcagtgtgaatcagtgccttttggaatggagaactgatacaaactgggcttcagtttgcagagggttgaggaatgtctaaggctcgtggatgggggaaggagaagtgacaagggatcacagatattgtatattgggcctctttggccaggccctccagtccccgaggcccttctatgctgcttactggctgcatgagggctgtggctgtggccgtcgccgtgtcagctgagcttgtaatttagatgttaccactgctcaactatgaaaagtcaggatcagcagctttgtcctagtgctgggagggaggtgtgggccctgggggaaccggcagctggatttagagtgtgaccgattccaggaacccaacagagctgcactagggccctcctcacctctgtgggtctgaatttggggtaggggttccccaaaccaaactgtccagacttttctgtattgacattgagtctatagtcattagtgatcagggttccgattaatctgtgtccttattttagagtagcttttggcttagggttctggtgaccaactggtcacaaccataatttagcttctgaaaggccataagagtcagaatttgtctaacaggaatctccacagagatcctgctgcatttataattgggcatttcctctgcatttacttttgccccttgtctcctactccaagccacccccatgtgcttgaatgttgaaagttttgggttgccaggctcaacttaccagcatggttccatttctgtgattattactaactgcattgcatcatacacagagcaagtggttggaaaatagacctgcgtcctagcagtgggcaagagactcgactctcctgaatctcagtgtttttacttttaccatgggagttgtaaaatatccagcccagtataacattggctggatgtaaaacagcctagtatacaacatgggctttgtaaagtgaggtgctgttggaaagttgtttgtagtaaattgtattattacatactatacttatatagtaccaaacattggcccaaagagttttattttgttacttctttttgatctcatcaaccatgccatgcaaaaaaagaggcattttagaaaagagggaaatggaggctcatgtatgttgagtgacgtgtccaggattatttgctgaataaatgtcaaaatcagcagtacaactaggtgtctggaatcttagtccagtgcacctgtcattgtgtgctgggtgcaaggcattaaggctcactggttgtggtcctaagtgctcccctgcctttgcctgcttgccccccattcatttgttcattggctattatgagagcagctgtaagccaggccctgtgttaggaatgctgctaacgagggcaacagggctcttgctctcttggagcctattgtctagtaggggagacagacttaaaaaaatattatggcgtcaattgattctctttattttctgcatcctgtgaatgcacaagggcccagagtggagagagacttggtcccctcatcttgggctttgtcttactttctctttccttctagaaagttgtgagtcagttctttagatgggtgcgtcagggttctgccttcctgtatttgaggctttgtgtacttggtagttggagatgatggacgttgcatttgtgtgggctgaagagaattaaggaagaaacgaggcagggaagtttctccgaggaggcacattttgaacccgctgttaacgattatggcagtggccctttggaggcagctgcctctcttgctgactgtcatgacccaaccatggcaattttcactgagactgcaccttctgtttgtgatgttttagttcaggtttacattatctgagtagaactgggaatgacaaggctatgaggtcctgcctatgcccctctaacatcgtttccccaccagaagttttctcctgaggatgtattaaatgccgactacttccttggaattgctggatagcctttccagcgtgagcaatggggacagctccagaagagtggcacatcaggccagggaggattatcccagattttacagctgggtaggtggaaggcaggtctggcttgtccccacttccatcaaggagtagaggtgatttgcaaatttctctgtggtttggtttacttctttctcttggtcctttgattctttccgccttcgtctttcctttttctttctctttgcacctttctcccctgaaagatcacttggcagaatggttagaaagtactacctttgtggcttagttgatggtgcacaaaataactgaagaagaaaacataccttggctttgcagattgtatccttctggagagctgaattttccagagtgctaaagctgaattgtatccattgtaagcaacaaagcttttttttttttttttttttttaaattatctttaaagaatccattttaaaaggaaattctctgaaaatacattacacatttaactaccttcagaagcagccggctgagaacttaacccgacattctctccatcatgccgggtcactgttaggaacatccaagattctgctgtgctcgagtgatggtgccttcaggttgcttgcccctgcaggtggtggctccagagtcttagacttctctggttcttctttcttttcctgtcccatctggatcccccaaaccctgacccctcagactgttaggtattatttctgcttgtattatctctccctttctgatttgtgtgttaagaaacaagacagcaatttatttagaaatataagaacagcatctgccatgtagtggttcttattgtagatactgcaatagtttgcataaacgttcccatttaacgtccacacagatctgtgaggtgagcagcattgtgatccttattttacagaggcagacgctgagtggtagagaagatgaccacatattctccttgcctggaatacaggaaatgaattcaacattcattcattggggacttctattgtacttgttagatatcattagttaaaaataattgatgttgggggtgttgagcagtaacagaagagttaaaaaatagaatattctcatagtctggttatgtacagggcttcacaaatctttgtgttgttttacagcacttagcgggccttaagaatgagagaaacagtctgcaaattaaatcacaatgcagatgccatcttctcactgctactgtggggtttagctctacagatcagaggatggctgagtatagtaggcattttctttttgtcacgtactgatgtcacaatactttgtgttcttttatgtggtctaattgcttcaaacttgaatgtgctttcatttaaatccatttatgttgcttttgtcaaatgggaatgatttccatatgaatttgaatttacatactcataggcccttgagaccgtgtggatatagtgaacccaactcttggtagacttgggctctatttttgcctcagccactgacttgttgacttgctgaagggccttgaacagaaatgattacttttctggacttaacactcctcagctgtaaaatgaggtaggaaatctgatgtgatttctagttggggacattctagaagattccatattgtatctcaaatgactgttcagagacacagtctttaggtgctcactctagagaggactgtgataagcataaagcataataatgtaaaccctaacttacaagtttctttaaaagttgactcttaagggtattacacttgctcatattttaaatatttaaaaacaattaaaatttttttccttcatattcaccattggcttttcaagcatgcacagaagtggtgtgcagatcgtttcagatcaatttatcataaaatctaagttgataggtgttctcttaatgatgttcttatactgcctgttcaccttgaccctttagctttgagtagattagagagtgtaggggaaagatctttttcccttcaaatactcaaaggatcatgtgttctcttgagcagttctgcaaatccatataggacaacaggagaataaggatttaaagtgaaagatttcagtcggctgctgagctgctgggaggaagagatggtgtgtggtgctgacctgtccctgattgcccctcatagaaagcgaattggctctccccacgttggctcccatggaaaggactgatgggagagagagtgaggagagctggggatgcccttccagaatgctgaccagggcacgtgggagcagtggtgctggctggccttcaagatccctttctgcacatgggagctgaaccagtgagatacagcacctggatcaggcagcgcagaggagcagtgtggttctcctctgtggtgtgaaattaccctggaaccaccaagcagggttcaacagcactgatccctcccatcaacccaggtctaggtctcactccctcagcaccatctcgcagcttctagcacccctggaggctctgtgaacctctcaccctgcattccttgactcttcatgaactgtcggccttcctgtgtaagtgggtcaggcaccatgtgacctgctcactgccagtttcttctttgaatagatgtttatttcatggatcattttgaagattctccgtgggtgtgcaacatggttttagaatgttgggtaatttctcatgtgttctttgagatggatggcttctcagtcgtctttgcagtcagccactgtagacttgagtttctctcttgctgtcttcattttattgctccatatctgaggaaaaccatgtgaaaaatccctagacacataggagccctgagaagtggtggcagggaatgcttgggggacaaaacagattttagagttacgggtattttaattaaaaaaagagagacccagaattgtttttcacttaaatgagcaattatatctttaacttggggatggaaatatgttgtgaaatttgtttagtcagctccctctgaaataaataaaattacagtgatgatatcattcttgtttaaaatgtttgaaaaggtatcaagacaaagtgattaaggcctaactgtttgccaaattttctttaaagctccatttttggggtatttctatgccaaaaaacatcttaaactgatgaacatatagttctccgcacttgtattggctggtttttaattagatgactgttttaatagtggaagaaatacatttaggttgggcctaagccccagggtgccagatttcaatcccagaaaaaaatgttctctctgtttagtgctaatgtgcacttaaatagcacaggtgtgagtgcttttccctggccacggtcacacatgactttcccaagggctgattggttatggggttggcaggtttaaggtcaggttccccggcttgccctccacccagaggagccaggactctcaggctccctgtaagggaagaagttacccagatcatgagcctgttttgtctgggtcagactgacttgagccacagggagtgggtacagaagcctgggttgctgccgggtatgacccgaccttcgtcttgtacccactgtctccttccttttgtgagtcaccagctcacacatctacatgcctgtaaatgaactatgaggtatcgagtatgtgctacctaccgtggtggatgctgggaaggatgaaccatgcattttcctaaacccacacttcgaggtttacaaagataaaatctcatggctctttgccatccccttctcaagaaccttcactggctctctttttagttaggaaagaaggtccaaagcaaaagaaaggaaacacagggtgtgaaggctggactcctacctaacacacctgtccattccaaacaaactggccgtgcctcctcctcgatctcccacttgtgtgggtggctgtgtcatttctgtgcagcagctgatggtgaggtctttcacttggctccatggtgaatggggaaattctcccaggcactcttcctgcctcatctgtgaccgtttgtcttcccctggggctatagtttgagtactaggtggtattttcagtcttgtctttgccctgaggatgcagaagtactctatggctatcccactcctgacctatgcccaggccccctcttccctctgggggtggatcccacttgtacgggcaactcagtgcagtaccctggaaaatggcagacctggggtatctctggtctctgccactgtctcccagtgtgtgtggaggggctgtatgcttgaggcattattttactgtggcttacctccttggtgttttctccaacttggagcttgggtgagaatgctcagggcttggttgacacctcttcattgtcccagaggtgtaagggctgggtcggaagctatgccaccagaagccatgctgccctttccaccagatacttctgtttctcttctcgacatagaccaattccctttctttctttttctttttttgagacagagtctcgctctgttgcccaggctggactgcaattgcacaatctcagctcactgcaacctctgccttccaggttcaggcaattctcctgcctcaacctcccaagtagctgggattaaagacatgcaccaccatgcctggctaatctttgtaattttagtagagacagggttttaccatgatggccaggctggtctcaaactcctgacctcaagtgatctgcccgcctcggcctcccaaagtgctggggttacaggacatttccctttcttgtttgatttctcctggtatcttctttctttctctttggactttctttcctatctcatatttattttgcttggcattgtagtagaaagataacatgttaccactttaccctccagtctgaacttggaactgctgccatacactaaaaggatttactattcttaaggatttccttccatcctaaactacaaactttttcaggtcaggaactacattttattttgtgtattcccactgtaccttcacctgctgagtgcttaataaacccaggacagaattgaaggcaggctgagcctgtataggagagcagttgctttcaagttatgttaaaaactcctgggcgggagcattcaaaaattactcatagataacaaatccagctacctgcacgtgcatgaaagcagggaactagagccactttcagacagtgacttcagcttaggaaacaaaaggttactttaaagtaatgctgttttacttatgtttaaccaattctagttgacacacttattcagaatggccttactgccaattagtggagcatgttagtgaagtttgtaataaagtcctaatttccgtgactaatgaagctttacttgtgttcaacacaatccctgctctcagttatgaagttataaaaaaatgtgtttatgctgttgctgccgctgcccgtctgtctgcctccctgcctgcctgcacagtctttaagagcactgttgctctcctcctgttcctcacgcatttcaagcacaaatccctaccattcatcaaaggcatttgctggtggtggcaggggaaatgtcacagcactgctgccactactgccaggtatctttttaaaatgtaatgtgtgtgtatgggtatgtgtgtgtgtatgacttccaccatttctacgggaatgttttttgattagaaaaagaaatagttgttacatttgcaatttgtaaccagaaccattttctttccaatgcagttgtaacagtgtaatgataagtagggtctttatccaaccctatgacaagtcacatgtacacacgccagacataggctccagattctgtaatatttagccctatacagtcaacagatttgattccctggcagtcagtctttgcattggaagagagagtaaaaattaggactggtgagttcaaaggttcttctaaggcctaagcctttgcagtaggagctttccatactagatatgttacctagagacttgtgttaaagtggaaaatcatgggctgggcatggtggctcacacctgtaatctcagcactttgggaggccaaggcgggcagatcatgaggtcaggagatggagaccatcctggctaacacagtgaaaccctgtctctactaaaaatacaaaaaattagctgggcgtggtggtgggtgcctatagtcccagctacttgggaggctgagggaggagaatggcgtgaacccgggaggcggagcttgcagtgagccaagatggcaccattgcactccagcctgggcaacagagtgagactctgtctcaaaaaaaaaaaaaaggtggaaaattatcatacaaatcatatttgtgtcaatctttgtgagggtgtcctaaactgtaagtgtgcctatatgtgtgttttaaaaccagaatgtctagtattgtaccacagaaaaaagacgttacaaaaatagaaattgtgtcagtaatttgcttttactgctatgaacaatcatatgcaattcctacaagtcatgctgtgtctagcctcacagccccctcactctccaggcctttctgccaaactcagcttctctgtgagcatgccctgatgagttcaaggggctcccttcttcgtgccaccacctttgagtccacaacaggatggctgttgaattgaacatgcacttagatttcgttaccgtttcctaggtctttttcaaatacattccgcttctctctttagttactttttagtctccctcaagggtagggattagattcttctttgttccctctcccatagcacagtttatgtggcttttgctgcgtgaggttaaagcacattggtggcttacatcttatccatttgtaaccacccagggaccagcacatggccttgtacccagtaaacaatcaatattttgttgattaatgatgcctaaagctggttaagttcttggactcaacattcttctgagctcaatgactatttgcattctagtcataaacaggaaaaggttctgttggcagccagggagatagtaaatacccctgactctcatacattgacttaatcagaaacaacaacttccccttttcaaatttgcattgtgaatgataatatcattttcaaatatgtaggattatgacattttaaagagaatataatgaaatagaatgaaggtgaaaacttgtaattatattagagcaaaactatgtttcccatagcttatatcctactatttctatgtagtgtatctggcgtggtcccatgaggatgccataaccaaatgattgaactagaaactgagaaagacttatcaaacatttagtgtcacgggcttgtgagatgaatcaatgctgggatttccagctatgttttttatggccctgtattttacaaagctgtggaaaatattgagcatttgaacaaggctctcagtcacagtcgtataacaagatgcaggatagggctttgcccgtggagttcagtgtgaaagtggctgtggttggtggaccttctgccctttcccctattgctctctggctgctttttctggtgggtgggtgtgtgtgtgtgtgtgtgttttttttttttttttttttttttctgaggtacttcccagggaacagagaaataagttgacaaaaggcacatataaaagagagatctaggactttctaaacctgaggcccacagccctttcatttaatgctatattggcacatgtcttttttctcttcaaatcattctcaatcatggtccatttctcaccaccccctcctcccaacttgttatcagttgcgcctgaccttttgggaaggaagaatctttaaaccctgtttgcatctcagcagacgggaatgcctgcctacttctcatctagggctcctttctctgcctttagaaattcttttttattcttgatacacactgctcagattatttattaatttaaaaattaacatacagtaaaaatcggggtgtgtgcacgtgtatacagttctgtgagctttaacatataaattgttgtatctcttaccacaattaagataacagaacagttttgtcccccgcaaaacttatcctgcctcttgtagtcctattcttcctttaccccagcccatggcaaccactgatctgttctctattgctatagttttgtcatttccagaatgtcatgtaaatggaatcactcagcataatgcctttgatattcatccatgtttaggagtgtggagaaatcgttcttttttattgctgagtaatattacatttatggatatagtacagtttatccatttatctgttgaaggaaatttgggttatttccagtttctggtgattataaaaaggtgctagaaacgtacaggtttttgtatgaatatagatgttcactagcgtaaatacctaggagtggaattgtatatttaacattataagaagctaactgctttctaaaatggctgtaccattttgtattcccaccagaagtgtatgagagctatagttgcttcacattcttgccaacacttaatcgtgtcagtactttttattttagcttctgtaataggtgcgtagtagtatctcattttggttttaatttttatttcctaatggataataatgttatgttatttcatgcgcttatttgccacctgtttattattattttggtgacttggtgaagtgactatttctgtcttttgggtttctttttactgttcaatttgaaaagtgccccatatatcctggatccaggtcttttatcagatatgtgatttgcaaatattttctctcagtctatagcttgtctttctattatctctcttgctctcttttttttttttaatttttttttgagacagagtcttgctctgttgccaggctggagtgcagcgatgtgatcttggctcactgcaacttctgcctcctgggttcaagtgattctcctgcctcagcctcctgagtagctggggctacaggcatgtaccaccatgtctggctaatttttgtatttttagtagagatggggttttaccatgttggccaagctggtcttgaactcctgaccttaagtgatcagctcaccttggcctcccaaagtgctgggattacaggcatgagccaccatgcccagctgtctttctgttctctaagtgtgttttgcagagcaaaagttttaaattttgatgacatccagttacttggtttttccttttatgagttatacttttgatgtcgtatctaagaaatcttcgcccaactacagatcataaagattttctccagtttttttcctagaagttttatagttttacattaagatctgtggtctatggccaggcgtggtggctcaccgctgtaatcccagcacttgggagtccgaggagggcgggtcacctgaggtcgggagtttgagaccagcctgaccaacatggagaaaccccatctctacaaaaaatacaaaattagccgggtgtggtggtgcatgcttgtaatcccagctacttgggaggctggggcaggagaattgcttgaacccgggaggtggaggttgcagtgagccgagattgcgccattgcactccagcctgggcgacaagagcgaaactctgtctcaaaaaaaaagaaaaaaagaaagatctgtgttctacttagatttaatttttgtagaaaaagtatgaagtttaggttgaagtgcgttttcttttgcatatgaatgttcagtgtttcaactctatttgttgaaaagcctatcctttctcaactgaattatctgtacatttgtcaaaaatcacttggccatacttgactctatttccagactctattctgttggtctttgtgtctgtcccttcaccagcactatactgttttgattactacagatttattgtaagtcataaagcggggtgacttgaattctccagtttcttatttctcaaatttttgtcgttcattttaattcctttgtcttttcacataaatttcagattcagcttgctgacttctaccaaaaaagcctgctgtgattttgattgcactgaatctatagatcgatttggggagaattgatatttcaatcatattgttttctaattcctgaacatgatatccttctctatttattaaggtcagcttctgttgagttgatcatgtgcttttgacctttattctattaatatgatgtattacactgatttttgtttgaacacaatctcacgttcttcatataaatcccacttagtcatggtcaaaatgtttatatgtttatatactgcattcagtttgctagcattttgttgatgatttttatgtctatattcataagagatgttggtatgtagttttctttgtgatatctttgtgtggtttttggtatcaggtaatactggccttatagtattccctcctctcctggtttttgtagaagtgtttatgaaggattgatgtgaattctttttttgaacatttggtagaattcaccagttaagccatatgggtttggccttttctttgtgagaagttttttgattactaattcaatctcttcagttattataggcctgttccaattttccatttcttctagagtcagtttcagtagtagttatttatttatttttcctgagaacttgtccatttcatgtaggctatctaatttgttgactgcatttcttttagaatgaattctcttagttttcatccctctgagattgttctttcacctgcatttcaaaaggatgcttcttgctaggtaaaggattatagattgacagctcttttctttcagcactttatcagaattgttcctcttctttctgacctccatggtttcttctgagaaatctgtaataattcaaatcattcttctctatgctgtatgttgttttcctctggctattttcaagatttttttcattgtctttagtttttagcaatttgtttatgatctttctaggtattgatttctttgagataatcctgctggcagtctgctgagcttcttgcagtggtaagtttaggtcttttgctaaatataggaagttttcagccagtatttcttcaagtatttttcctacacaacaccgtttcttctcttcttctggaactctagttccagtattttagtattttctttttagtattttcttacagatccctgagcctctgcttatttttataatctttttttctcttcatgttttacattagataatctctattaatctaaattcacattcactcactattcctgctattacctccagtctgcaattgaagctatccagtgacattttaagttttattgtatctttattttcaaaatttttgtttttgctatcattccatttattttaagagtatttagccttacttcttggagcatggttaaaataggtactttaaattatttgtttgataattctggtatctatgctatcttggggttggtgtcttttgattgtctttttccttgcaaattgagagttttccagtttttcgtatgttgagtaattttggagtatgttctagacatcttgaatatttttattctgagtcttatttattatggagactgtttatttccttaagcagataatcgacctggttgcaaattctgacctgacttctctgggctatgtttctgactttggttcagttttcaaagcctttacagtgtcattttagtctgtttcttttgtgtgcaatctattgttcagtctgggacctgggcaatgatatcctaaagtgaaaatctgaaggccactggcatacttttagggtcggatccacaacgaagagcttaaatgtgagcccacatgttaatatgcccctttgtgatgtaactctcttgagcttccttggttccctgatgtcctctttttgctgtcctccagctagaaagcgaggaatttagttcctctgttctcctgcattactttacgtgactgtgtccaaggccaagcgcttgaaggtcagggagaaaaagaagcaatggaaattcgccccttattctgggactacaactcttgtgagaatcattcttctttctcagagttttaggtacctgctccgcctgtgctgctgcttcttggtactgagggattgtctgggggctggggtgggagggattggaaaaaaacaaagcaatacagataatttctctgaacattaggagttcctttttttttttttttttttcctttgttggccagaaaatgagggttctcttcaggttatttctgtccatacccagctagcacttttggatggtgagctgcctttgaatccagactgggtgatactggagggggaaaacagtggaaaattctctgctggtttggtgatactctgagttctagtctcatttctcaatctatttgttgttatttacttttcagagtcctctgattcttcatgttttctgtctagcttatatatttgcatttggtaggaaagatagggtgggagttcttactccatcttgcctggaactggagcctctatattagtctgtttatttattaatcaaatcctgcatagagtgggatttaccaagcctggtttcttgagatcctaggatgtattcataatatgtatcatggaattctcaaataatgcttatgataaaataagcttaaattttccttactttaaagcagaggctggcaaatgttttctgcacaggaccaaatagtaaatattttagtcttgtggtctcatagtctctgtcataacttcttaactctgctgtcatagtgtaaaagcaaccacgaacaatacataactagtaaagatagctatggtccaattaaactattgaatgacactgaaatttgaatttcttatacttttcatgtgtcatgaattattatttttttgatttcttacaaccgtttagtaggtagtgggccagatttcgcccatgggccaaaatttactgaccactaatttatgtcatggatggctctatggccctgatcaacaactcctcttgattgaaattttctgtctgttctggagaaacaaagataggaaagcaagagaagttctagaaatcctatggaatgcttatggatacaacctgtaagccaaagtagcttctcagtcttcttttgaactccttaggtagggcacagagagagctcatagatgttttatcttaattcatctccatattactttgtaaggtaaatgctttcatcttcattttatggatcaagaaactgaggcacagagaggactgctagcatgtctcaagtcatgactaaactgggatttgtatccaggcctgtccagcaccaaagctgttgctcttcacactctaggatggcacaaatctcctttttttctgttttatcttgtctctgtacaaaaaagccatgtcaataatggtataggtcattgaaagccttatactttaagactgctgcgctctggtctggacttactcatgaattattgcataactctgggcaaacctcttcatttctcaaggtcttagtctccatgcctataaaataggggattggatccctattttacgtttatttctctgtcatggtagctgtgagagttttgtcagtgagcatcctaatcacagacagcgactttggaaagagatggtacaccttgtcattggagggctgtggggagttgtagagaacaagcttcatcctgggaccatgtgtgatggctgttgacatagagctttgtagctgtcaaggaaaatagagtaaacacactacttccttttgatcttcagtttttcgcagtatgctcctagatcatacttctcttgatttagtgatagccttataaattattgccactttctttgaacccttattggtataagtcggtgataaatgcttgagaaactgggccttgatgaagtactggtatacctcgtttggaatttgttctgaaaatggtaaagcatttcttaaaggctttgttataatatgaaaatgttcattgctttttttgttcattctataatttttttatcccttttacattgcatgtcttgattacatagttgatttgatattctctgaaatgtgatggaaaagaaaatgtaaacacaaaattaaaaagcagaggaatgaagacacattttgtgtgctgcttcgtgccagatagttttgtacatatccttgtacaaagtagtggtctcatttttaccacagtgagtaagcccctggtctctacctttaaggaacttagagtttgataggcttagtggttctcaactggcattaccctctcttgagggtatttagaaatctgtggagcagctgcaattgtcacaaatattgagggatgctgttggaatttagtgtgtgggattttatcacaatgaagaattatcccaccaaaaatgtttatagatctccttttgggaaacactgtgctgagtaaaatagtagtaatgataataaaaacacttgcatattgagcactgccattgtgttcagagaactctacagatacagtccatattctctgatatgtagctctaaattcagaaatctctaaaattgaagtgggttttttattaatccatttggtaaaatgtgacctgaattgatgtgagaacttttatttttttaaagctgagaactgtattttttatagctgtattgaagtatagtttacatatcaaaaaattcacctgttttaagtgtacaatttggtgatttttagtaaatttaaaaagctatatgtaactcttaccacaatccagttttataacattttcataaatgcctccccccccaaattctcttgaacctgtgtgagatgatttccagatgtttcactgaagaaatatggaagtgtttgattatggagtgctgctccagatccttcctgaatgctaggtattcattcattttgaattccaaatatacccggctgcagaagtttcttgtaagagattgtggactgtatgaacacatcccatccccacaataaccctggaaagtagatgctattattgttccttgttttgcagttcaggaaactgaggcatagcctttatacaaggctgaatggaatgtcacaagaaagtccagtgggggtccagaagagaaaatctgtgaccacttggcctgtaaccgaatttgcctatatttaaagatggaggaaataatctttttgttttgttttgtttttttagttgatactaaaggatatgcataaagtatttaaagtttaactcaagatccagtggatatgtgtggaccctcactacctagtctataactcaccacacctttcactcctttgggtgtccatccttatcctctgtccccctcccacagggatgaccactgtctaaaatttgtgcttatcaggccaggcacggtggctcacacccgtaatgccagcactgtgggaggccaaggcggatggatcacctgaggtcaggagttcaagaccaacctggctgacatgatgaaaccccatctctactaaaaatacagaaagtaaccaggcgtggtcgtgggcgcctgtagtcccagctacttgggaggctgaggcaggagaatcacttgaacccgggaggcagaggttgcagtgagctgagattgcaccactgcactccagcctgggtgacagcctgggtgagggcgagactctgtctcaaaaaaaaaaaaaaaaaaaagtgcttatctttctttgattctctttagttttaccacatatgttttaattcctcagcaacactttaattttgcatatttttgaagtttatataaatggaattatactgagtatattcttctgtaacttagttttccctcaataatacttcttagatttatcggtaattcattagttttcattgttcttttgtagaatataccatgatctatctatactttgactgttggtggacatttgtgatgttttctttttttctaaaaagagataattcaaatggtgctatattgaatagtcctcctgaatttttcttgatacatatgtgctaaggattatgtaggcatgaaatttcagggtcctattgtgggtacatcttcagctttattggatgatgcctagttgttttccaaggggttatataaatttatactccctccaataatttatagatgctaaaatttttccaatctaatggttctaaaatgatatatcattctgacttgaatatgtatttctgtgatgactaatgagattgagcatcttttaatatagccatttagttttccctttttgtgaagtgtccgttgagtcttatgtccatttttctactggtttgtctttttttttgagacagtcttgctctgttgccgaggctggagtgcaatggcataatctcagctcatttcaaccactgcctcctgggttcaaatgattctcctgcctcagcctcctgagtagctgggattacaggtagttgccaccatacctggctaatttttgtatttttagtagatacagggtttccccatgttggccaggctggtctcgaactcctgacctcaagtgatctgcccaccccggcctcccaaagtgctgggatttgctgggttgtcttttgaatactcatttattaaacttctttatgtgctctggatactgatcctttgttgtttatacatgatagaaatgttttttccttctttgtggcttgtccttttgatctctttttggtgtctttggataaacagaagttcttaattttaatgtagctaatttatcattttccattaggagtttttttctttagtttttaaattagcgtttatggagtactttgtatatcctagacacctttctaagcaccttataaatatccattaatccttataacattagaggcaagtactgttgctatttccattttataggtaaggaaactgaggcacagaatgttaagtgactttttcaaggtcactcaggtagtaaatggtagagccaggacttgaaccaaagctgtttaaggaattcttaagaaaaccttttctaccatgataagatgtgcagatattcttatatgtcctctgaaacttttttgtttgtttgtttttgttttttgcctttagcatgtaggtcttcagttgctctctaatagatttttgtgtgtggtatgaggtaggggcccagtttaatttttttccatgtggattatcagtgtttcagcacagattacttaaagtctaaccctttccccacctctataatacatgccttataacaaatcaaatttccttatatgctcatatctatttctgggttcattgttttagtggtgaatttgtctctgtgtcagcactgtactgtattaattagtatgcctttataataattcttgatatcagtaagtcaagtccttccatcttgttctactttatcagcagattcttggaaagtttcctactctttaaaagcaagattgcaggataatttttgactgtaacacacacacacacacacgtacacacatgcatacacacattggggctttggaagatgatttgtcattgctattgtattgacttgtttcctgaaaatttagcagatataatttcatttgagtggcttgagctctatttatctgcatggccaaaatctcaaacacacatgatgtagtggcttgtagaaagcttttgattcttgttaaatggagaggagggagaaaggaaaggaaaatcagtctggtagattactagtgtcttctgtttaagttcagttgcgctgataattccagaaaatatactgaggaacttcaaaaggcatgtggaaccttgtgtagtatgatttatactaatcatagtatgtgtgtatgattgtataaggtgaaaaacaagataatgcatcttctatgattaagttgccttacttatcaagtaagaggtaactgtaccccgttggtcttaaatagctgatatgtggtttggtacttaatactgtctattggaggaattgaaatagaatacccagagatacccagagtctccactgggaatacttctgctccccaaatgtgatatcagagtaatatcaagtagaatgtggagtacacccacctatcgaggcacaaactgccctctcccatgaccctttctctgtagaaagtattacttatactgtaaatagcagtcaaatttcaagtaacatcagttctctacatcttagccttttccaatctgggtggccaaagtgaagaatgattaggtactgaaaatttataaatgccgtgtctgagaatttctagacaatgggaagacacctccctaaggaaacctgtcagtctgaagtcttcccagctttcagagcatagcaagttcttaccatagcctggagaatatgtgatctgccagtgcctgctcccccttcacctcttactgacatcccccttctctctgcaagagtgactgccttgctgttcttcagaatgccaggcaccctttcaccccaagcatttgctctcctcttccttctgcctgtatgtgcttccctggatgggtgtttggtttactcctgattacctgggtctctgctcgaatgtcatcttctcagagaggtcctccctgaccaccctctcccataatagcacccacattcatctctgccagccctccctgagttcctacatggcacctgacacatattcactgtctgccctccctcgcttcccctccccacacactaggaagtcacttcctagaggaccagggactttgtctttttaactgctgtttcttccacacatgtgccacagcgtggcacatgggagccgcttgagagctgtttgctgagtgaaggaagctgttggctgaaaggagggcagagagggcctctggagcaggcccgtgccccaccagccctccccgagagctcctgcggcagcttgcttgcctctctgtcggaaacttgcaccatttaggcagctcttccatgagtattcttccattacatgctaagcaccttgagacaaaggtctgtcttaagttctttccctactgtcacccctgctgttttccttcagggctcggactgagcctggcacgctatttgctcatgctatttgtcttcagctatctgttaagaaggcatgcgggtagcagtcatcctccccaaggggagcagcagattaggcagcactgtaattccttaagcaaactcctggcccaactagcatttccattctgaattcctctatgtactgtctttgagtcttatggagacgataatcttggtgagaaaagggaccagccatattcactgcaggatctcccgtggatgcatagcatggtgccagaggcatggtaccccaactcagcacacactcactaataattcatcgctaaagttcactttggcctatgtgaaatttattattgttgatgtccaacattacactaaaattataagaatttatgtacaatctctgtacaggatctgtagggagcacacagtttttcattatgaaagaggcttcgttgctcatctcagctcctgtgctgttgaacaaaaggtgttagacacacacccattccctacttggggtattcacaaatgtcagacctcaaagtctcttctgagtaaattactgcctttgcttcatttaaaggtgcccttgtgaccttaaagaattcagccacctttcaaaatagagctgtatttctactcccacctcaccagagggtgagcctcaagtgtttgattacagaggagcgagaacttactctctaggattaatgtaataagagatgaagagcagacaacatagccactcaccgaaaaccatgtattcataaaaaataagccaagcccaaagtctggatttcagaatattttcattaataaatactttattgcaatgaacagcttaattgcttaatctctgtgtagttatggacatgtcttgtatacactgcctgggctgtatacactgtgtacactgctggctggatgggcttaggcagaagcaagggtcaaggcttttgccagtcttgcaaggcaggcttgcatcaggaattcctagagactgaggagttctcattgtaggtttctttctgactgaaagaagcatggtgcgggcagagcactaggctgcgggggttagaagaccttgcctcacgactctaaataagtcgtttaacctaattgagcctcagggtcctcccctaatggagacggacacatcaaggggctgtttggatcaaatgagatcatgtgactgtttgtggataatgaagttctgtggaaagaagatgggagggtagcattgcatactgtcttggtaagacctcagacttgcttagctgcagctcttcaccctcttacggacctgcagctgagcagctaagcgtgattggaaatgtcattcagctacgatgactggtattctttaaaatgaccactgacttcaagcaagaacttcacaccactggcattgatgctacattcaggaccattctttctcatttctagacagtgatttcatatattttcctctctcccgaaacctccagcaccttccagcctcactctcggccgatggctttacttcccatttccctgagaaaattcaagccgccaggagagaacttctcaaaagcgcccactgccacatccccctgcctactcttctgtccacagatactgctgcctcccctgttagcatgggtgaccatacacactccttgctaaggccagcttctttactcgcacaccaggttgcatccagccttgcctgttgaagtccatggcagtgccgttctcctgcctctctcctgctgtcagctttttcttctagactggatcttcccagtcaatacacacaaacatactcttgttaatatctcccacttagataaccctttattgattccttttcagtcattagctactaccccatttctcttttcctgtatggctaaatactttaaattattttccatattccctgctgcctattcctcctctcatattcctcttgaaactcatcgtcatcaggcttttgctccctccagcctaccaaatctgctgtcatcaagatcacaactggtcttcctgctgttaaatccagtggtcagtttccatccctcactgtacttgattccacatctagcatcctccctcgttaatgcactttcttctcatcttctcatggctcccaggataccacactttcctggtgttccccccacctcactgttgcttcctttcagtcttctttcctgattcttcctggccatttgttgtcttgttggagtgcctggaggagtctttaggccttctcctcctatttctatcagcactcgctccctcaatgatcttacccagtctggagtttcaaatccatccagaagctaacatctcatgcatctccagttgaggcctcccttccacactgcaagttctcacatccctctgcccttggagaggcacgccctgtcctacttaccctcccaagtgcttaccactgctcactggcttaggcgtacgtgttggccaggggttgtcatctctgtgctctccactagaatgtgggctccacaatggaggactccgtttactgttgtatccatagcacttagaagagtgcctggcacatagtaggtacttattcaatattttgttaaaggagtgaatgtgttaggtctccatatacagtggagattctagtaattcgctgtctcaggtcctgtctcaactctccctactagtattagggcgccctagcctttcagagatggtctttgtcttggaactcttactaaatctatttgataaaatatgattgtttctctagaactctgttgaattgataccaggcattcaactatgcagtattaaatgtattctttatcattgatttggggaggctatttgggatagtagaaagatctttgactttagagccagatacttctgagtttaaattcttgctctgctgctaaatagctacagagccttagtggaaacatacagtcttaggccttagttttctcatttgtaaagtgaaagatttggttcatagggctcttgggagaaattacatgctgaatatatgaaatgcatctagcataatctctggcatataacaggcattctatagtggtaactatgatgattatggtccttagctatacggataatcttaggattgcttgcaattcaaaactttttggaaaaaaaaatgtaattattccttttaaatactggccgttggtctttggttcagaacataattgtctaatttaacattgtttctgtggtaaaagttagatttgatttacatttcaacttacagagcctttttcaggaatttattctgcttcaaagatcaaggacttcctttcagtgaaacttaacgacagtgcttaggaatggaatgctctggaaggattgtcttctaattaatgagaaaggagcttattttgtgggggaggttctaaaatgcctttatatgtgcactgagcataattccaaagttatacagtaaacactccatgaatacttggttacttgtttttgctccagagatacttaactgaactcctctattgattgccctgaggtatagctatggaaagtagaggtgatgctactaaatacaaattcaacataggcttacaaatatcttagaggagcttttctggctttgaactgtaaacgtcaacggagctatattcatgataattatatcttgattgtatcttcttagggaaaggattgtcaatggtcctagctcaaaggaaattgaacaaagaagttaagatagcacatgcaaacatacacatccgtgtgtgcccaaacatacggactctctcacactgttaaataatgcatgagcaaaatattaagtgcaaggtacagtctaacgcatatcactctgcagtatgtggtaagtgccaaatgaacaggataaatttaagtactgtaatttcaaagaacgagtcattagcaaaggctaaaaatggtcaaggaaggcttcctggaaaaagtgagcttggagctgggcattgacagatgagtcacactgtgcctcatgatgcagtgtgcagaactggtccagccagggtcaagtggatggctctcaggccagtccacaccctcctctgggggaactagggcaagtctgctggctgcctcagtccttccctgtgaatgcagcccattattcctgaatcacatccttgtctgccattggtgattttgggtgcttcgtgggctttgggtcaaggcagggggttcttaagtggggagggcaggaaagggagtttaggatcacgtttgttgtggggaagtatctgaatgattcatttgctgtgcgtgtctgaatctttctttggagatgagttgatgagggcaagctttggctgtggatttctctctggtgatgtgatttgatttgatggataattatggaagagaaggaaaaggagattcaggattcagacacagaaaaacctgacaaacgattcacaaacacttttctccacccacagaaacccaaatacttagactgtgccttgtggcaggggcagtagggtggctggagagagctgtcacatgcactcacttgcccagctccatggattgtttacttggcagccatagctgtcgatagttggttatacgaatggggtgtgtttggccaggatcccgtagtctcacttaggcctttcataatagtcatgacaggttctctgtggtcagggaggctgggatagaggtgggggagctggaaaaggatgggccacctctgtcctgtccatagggtgacagccacagttctccataggaaccaaacctgcaggtgtgtcagttaaccatgaaccctaagcaggaaaataatatcgccttttttagacctccgcaatttgtgtctctgcataagacaatgagttttattgcaaaggcctagttacaaaaaagcgtgtcctgtgtgacgatgactgtgactgtcccaagctgttctgcttcggtaggacagtccaaaccagaaccaggaccaggcttgcttgacaaatcctctctaaaggaacaggtggtaggaaacttctgaccctcagcgattggactcaaaacattctctggaagtgccttagacattaccctggttttacaaatgagaaaactaccactctgtccatggactgatttgtttgaggttaccaaactcttcttgcctgtctctttctctctttacatgctgttaatttgttgtggactgccagatttacatctcttcccctgacctgttgctattctagacttgtatgtttcaaaagcatctcaagcttgccatgtgcaaaatggaatccagctctttctccaagcctggccactcccagcccttccagtcccagtggatggtgtcaagtccacctagggtgctgaccccacaagttgagcctgagaatgtcttggatttctttttatccctctaccatcgaaatcatcaacttttttggccctctctgcctctggtttgtttatttatttatttatttatttatttatttatttatttatttatgttttagagattgggtctcattctgtcacccaggctggaatgcagtggcacgatcttggctcactgcagtctcgacctcctaggctcaagcgattctcccacctcagcctcctgagtagctgggactacaggcatgtgccaccatgcccagctaattttcgtattttttatagagacaaggcttcaccgtgttgcccaggctggtctcgaactcataagctgaagtgatccacccgcactggcctctcaaagtgctgggattacaggcgtgagccacagtgcccagccttctggatttattttgaacctctccacttatttctctttgtctctgctaccacctccctgatctaaaccaccaccatcctttgtgcctccagtctcttctccacacagtctccagagtggccttttaaaaacaaagctgagcatgttccccgtctcaacacccgtttatagaccatctttatatgaacagaactcaggctttgtgctggcgtccacaggctgtgtgtggtccctgtctctctcctgcaaccctgtccatcttccctcttgcccatggcacactggccatatcagcatcatttcagtgtcctttgaatgataaatatttgttgccacagagctttcaaacatagttttccacctgaaaacttctttttatccattagtttgtagcttagatgtcgcctctgttaggccttcatggattcctccatctaaaaagtcctcccatatttttctctatcattatggccagcttgttttcttgacagcatcatttatgattgtttattaattgatctggttattctctgtgccaactgctggcaggaaagggctgacatttgttttgcacccccgtaggagcgtccttttattcccagctggcttcctattactgtaccttcccctcactcctccacacttgtctccttgctgttcctcagccgtgccaggcttgctgtgccctggggcctttgtacttgctcggccttcttttaagaactttttttaaatactggtatctatgtggctgactctcattttctttagatctttactcagagtcaccttttcagtgacgctagctctggtcccagtgtctaaaactgcacctgcccctgacactccatactgaacttcttggctttatttttctcctttgtgcttctccctatccaccatatggcacattttacttatgccatttattgtctgtctccccagctagaatgacatctccatgagggcaaggagtttcttctgttctttcactgttgtatgtccagtatctcgaatagctctgggcacacaggcactctatacatggttgaatgaatgaatgaatgaatgatttcatgaacaaagtgtgtccagtcactggcacatagtgggctctccttatcctttttattgtggtgagatacagtgtatcattttaacaaattttaagagcacagttcaatgacattacatttgtattgttgtgtaaccatcaccactgtctgctccctacacttttctgaaatgaaggagtcgaggaataagcaagtaattgagtgagggactcttggcaaagcagttgtacagtgtcgatctcttgacttggaggcccagggggtcctttccattgcactgtgctctggaggaggaagggcaagaagatgagtctgagccccatctcagggtgctcgatgcatgcagcaaggaagctcagtgtttccacacgtttcaggttgcctctgttctaaatgacgagggtgctgccctgtctccccttccttctgccgtgcacacacctgctcacacaggcaccatgtgtacacatcccttcctctgcactggaggaagcacctttgcaatatttccagctcatgggatggtgtgaaagggatatgctcattctcctttgaacccttctcaccggatctccatcatgaggggactctctctgcctcccttggtgttctcatcagcacctcgtcaggtgagtattccattgatggcagggaagtgtttatttttaattctaaagtaaatcagattacatagaacacaaaatgttgtgttggatcaaaaccattgactatgaaattctcccagatggatgaaaggcgggggcttgttttcagcccttaaccacttcttctcacaagctggttaaattctacgagaagtccatccttgcgagcacttcgccatcacaggcccttcccttggggagctgtggcatctcccccacccccagcacactcacaccccccagcagacgggaacattctcatgctcactgtcactcacgtgtgtgctgtcccacgtgttctcactcatatgcactaattacacacacacacccaacctgcaggtttgcttttgacacgccaggaattacatgggagcagccagagagcccaaagtaagccttgagatgactttaacccctgtgaagcccacagggtaagacccctgctcagaccaacgtgacaggctcctgctcatcacgtgagttgccctggattcctcgatgacgttgcaatggtgtcttctcaacaaaacctcattgaggtcttgagacaggggcgcaggccaggcacatctaagtgttcgaggtcttctttgttgaattccacagcattatgtgtgcctccaggatgtgcctggcacatggttggcctggggtgtttggagaggactgggtgtaggccggaccctagaggagcttataggacagtgctggcggcagaggtgcccatacctgcgtcctgcatgatgttgcgagcgtgatacccgatctgtgcacaggaagctgcgggagcttggaggaaaagagaaccttgctctgtgggatgagaatgcaggtcaaggtcaggggagagttcagagaggcacttgccaacctgaaggtgtggagatgctgccgtgcatgggcaggaaggggagtggtggggcagagaagtcagggtgtggggtgggggcatggttccaggaagcttcctattttgtcttgtcagcagtagataggaactggattgaatcgggattatgctcacttctattgttagctctgatcatttgttgtttgacttcctgctttcccactagagatacgagtacatggcaagagatttctgaattcccacaccacaggtgtggccatggtgcacagcattgcaaggtccagggtcagtcgtcattttgctggtaaggaaggcataaactaacagcccagtagacaaatagcagtgtcccttcatgcggttgttactttgtgagagtaaagacatacaccaattggtttaatgtattcgggtagattttctactagtcgtgtccgtttaaaaaaatcaccagtcagttctctttatcggaaaaggtactagacacctgtagttgagcatgtgctgagatctggtgttttgttaattgcagtatttgatgatactggcaaaagtcactaagagaatcctcaaaacatcttgttagaaatgggaagaatattccttgactggcaaattttttttctgttcttaaaattaagcttataaatggctggaaaaattagttattttttccaggctttagttgggaagagatttttgtgtctggtgggaacgttccctctctccgttgatgcttgagaaagctacaagacgctgatggtgttggtggcagctttgccttatcggctgtcctggatgtcttggcctcagataagacacttaacccacagtgggagcatgctgctgcttttcaactgggaaacgttaccgtctgtttccatcacagtggcccatgacgaagttgaaagatgcctctgacatttgttatattataaaaatgccaagaatctcctaaagtttgactcataggtcagtttgctttcttaaaacaaaatggcaaccaatgaaagttttctggtgagtgttatcctccgaaattttaagtggatttaaataaagttcagtccgtggatgagaggattctcagtgaaattttcagtgtgcagaattactcgaggccattgagcagagtcattgctttctgtaatgttttcccataagaacacaagaatctccatcctccatcagactaatagtttttccagtccagcattttgccactgagaatggaattaagggagttgctgtgggaagaccccataacccttccagccatcacctcaaaaacgtaggagtgtgctttaaatatgtgtaactccccttaataagctattatggagcccttattcatatgattcttgaatttgtctaaattgcatttgcagcagtttttattttgggctgttaccatctggtggaacgtggcgggcagtctgaacagcagccagtcaggatttaccccatatcaccaccaaaggatctcagtcctttatccattcaattttcatgctgattcatttgattcactaagtagaattgataaatgcctacattgttcacctatgtgttgatttttggctctttgtaagggcattgctttaaatcatgttaccagtcagttcttattcttcctcttaatatgtaagaagtgcagcttcttcatattggttccaaaggcacaactcaccatattttctctttcattttctacaggggcaatcggagctgtagagcctctggttggtaacacccattgtagaatagtggggtgtgggcctcagagagactgaggttatcgctggccccattgtttactggccatgtggtctggagtgctttgctgcatctccctgggcttggcttcctcatctgcgaggtgggggtaataggtggcttctcataaaattggactcactcagactccctcagttgcaagtgatagcccaatttcagtggacttctgtgaaaggtgcagctgacctcaggtggtgctcgattccagggggtgctggggaggagctgtctctttcttcatctctcagcaggggttgtctctgtttggctttctcctaggatgtggtggcgaaatagccactggcagccctggatttatatcttaccagtgtggcaacccagccaaaagagacagcatttttctaatagaaaaattagagaaatcccatggaggtatctaagtgcttggcatggggcacagtctgttctttcctgttgcggccaagggaggagagttttctggccctgcagtggccagaagatggagtcacttttacccaaaccacatggggaaaggattccccacagaaacggaggttctcaccaggggaagtggagggaggcatttacaacagtgtgagattacaacagtggccgccctggagatgtgagggctgtgaggcaatgcaggcagagctcctcaggcagaattctgtcatgcagaattcccagtagatggaatccagcctcttttttccttccctttactgcttaaggaatgcagcttctttagattgcttctaaaggcacttccttcaaacattaagttgattctacctttaatacttttataaacttttaattctatgtcctctcaacctggatgtgttttggaaagatttattttaagaggggggttggtatggcagggggaaatttcacttaatctgctttttgtcattcagtcaaaaattacgtatggagcctctgctgcatacagaacaccccaaagtctgtgggggatggaaaggaaccatgagaagcccctttcctggggtgtctgtggcccgttggaatgtgtggtgggtcaagtgtgtagattctgtggtataaggtggaatatgggcaagtgctgttagggaggtgggaagctggagggagcccagagtggagcagagccccatccagctgggacaatacaggaggactagatggagggggtggtatctgagccaggcctgaggaggggtgtggttttataggcatagctgttgggggcagagtggggtggaaggaggagtggcccagcagaggtgagggagagggagctgacagcttcattcttgatgctcactttatgccaggctctgggcatttggacaagtaacagttcattgctctatccaaggaagaaccccatcaagtcatgggtgcccagccgaaagtctttaaggggtcgagtgagggcgtggaggaggcagccttcaactttcctgaaaggcacagagatgggatggtgaggatgaatctgtgaaatgatgatgattcctgggtttctggaggcggaggtctacaaggagggtggtgcaatggagccaggtggtggaagaccttgaatgccagagtaaggagtttggtggagattgttgaggcactagttcttcagggaaggcctcatgggtgtgtgttctgtgcagttgcccagggccccatgctcagcttaatgctatggtattgtcctcttgaaattcttaatacttttgaaacaaggggtcctgcattttcattttgcactggacttgcaaatcaaagcatgcttgggggatgatgtactttagaacagagctgtgctttagagaagaggttgggccatagttgggaggctgtttgcatccttttgaggaagggggagtaaagggcccagacgaggatgggtatgctggggatggagggaattcctctgacagcctgtggccaggcccgagcagcaggcggaggaggagccgccatcagctcttgactgggggacattcttggagctgtcctctaagtcaggcctgcaggtgacttccagggatagcgttggtgttccaaacggcaattgagaagactgtcttaatatttttactctcaacagtaagctaaagctgacattggcagtctcattcaacgaatgtgaaataaccagaaaagacattccaaggcgttctggaatcaaacagatggacggagcaaacatgttaaaaacagtaaatcacaacttgaacttcagctaatcataattgcatttctctttccttatttaattttgaaacatcttcctaagtagttttttattttggttgcttttacttaagagaccttgttattatagggcaccccagttaaagatgcctcatatatgacatctgaaccaaaaaaccttatcatttaggacatgatatcctttctgaggtttgagaagtggctattttgtctcttacaaagatttgtagggaatttactgagggaattgttgagggactagtgagcaattcttgttcacatagaaatgaacaaaactgcatttacccagtgattttcaaaaacatactcccagtaaatcaaggttgctctgaactgaacttagggtctcaaccagctgcagaccagttacatcttagcaagcagggctttgagtggtgcagtgggcagagtgtgtggctctgacctatcaggtgtgatcccctcctactgtgcactgtttcctgtctggcacagacacaggcaaagcacttttgctgaaaggacagaaagactcaaggtgaaggcagtgccatgcaggccccggatgctgtgctgagtgtcttggaactgaggaagccgctgatggccagtggggccagggcagggcttgcgaaaagattcaaggcttcattccagtcacatggacagactggtactgcttttcacattcttatcaaaaagggctgcaggcaggtacaaagaccactgcagcctttcctgtcctcatggcattgccctacaactggccacctaaaatgaccttctctgctcctgcatccttttaggaatgggtaacttggtaccattcagatgtgccatgctgaaaaaatgagagtgctttcttttgagggagttgtggaggaatacatgatgtcctatatgggaggcccataaggttagtgaggtaaaaaaaagaatcaagagtttttcttgctctgctcattcacccatagtgatggagagatttgatttcatctggatgctcgtgttccactgacagtgagtactgctcagccagtgctcgccgccaggtagttaggtgtgtcttttacaatgtttagcacagcgaatagagaaagtgcctggcagatgcttggccatctcctctgcatctcccatagtaccaagtatcttgccttgtgcacagtaggtgcttgtctgtggggcaaatagatacatttgcagttgaagtaatcctgtttctctgcctgaagtaagagacattcaccatctgtagagtgggaattgtgacttcctctagatgcagggacagttttgtaataaagcatcctcataacctcacttggccctttttggcacaaagacctgtgaaggcggagaccatgacctattttgctcagcatttatttcccagtgcaaatactcagtatttgttgaatgaataaacaaatgggatacacctgtctttcttaaattgcagaagttcattgcttaaagtagccatgtatgtcttcatcaaagtttcttcagttctcaaaatcttctcatatatgtctgtgcatacacacactcactcaacccagcagttggcatacaatggccatttggtatttgttttgcaaaagaagttagtaagtggcagtaggtaaagaaaagggcactgactgggaggtgaaagatctggacccaagtccaggtttggccacctaagcaatctggagaccttgttaaggggctgggtatcctgtctcgcccagtcagaatcttgctgtctaaatggggctaatcactgcatatcttgaaggtggtttatccagctcacaagaaagaattgatgtgcagcgcttgtcaaagttaagccttgtacatgtgtgaggactttgttcttgtcaccgatatatgctcggatccccatgtttgatgtgtggctaatgtgtatgcaccttctccctagtccaccctgagagctgagggtgtcattttacctaaataaagaaatacattgttaatgtagaaaatttagaattcacagaaaattgtaagtaacaacaattacctgcagactgtagcccagagataaccactgttaatcttgtgggatgtttctttttgtacctctcctaggcaggtactttcacatcacacacacacaaagacacggtattacttcagtcacataaccattatttttgtatcaaatttacccaagtagataacccattccaggaaaagaaagagacttaactttgttgttctgttactttctcagggcctagtgcactatgagaccgagcaggtatttgttaaatacttaatggctttctggaacatcagggctgacaagattctgagttataatctaatgttctcagttgaagtgcaggagaatgaaggcctatggagagaagcaggcccagggtcctagggctggatgtagctgagctagaactcagaaatgtgctgttgtcttgcccacgtctactctctactaataagttaagaggcacatacaagaaggcccatctggttggtgcttctagcagagaagctgattcatgcttaattttgaccacatctctaggtttgtggttactgctcagaatcaggatagcatctgggtatctcgaagctgctgtctccagtggaggctttggactgatctcacaaagttatgctgatttctacatcagcctacatctggggtccttctcctggttatcattgtttgtactgtatgcacagataccacgcccttacttaataatccagccttggtggaagtatattctcctgtgtttttgttggaatataccaaccctgtattgccctgccctgcctttcgagcatcgtgaaaagaagtccttctttctcttggtggttcttgcctcatgctctcaccctccctttttgtggtgtcttactgagccagttgttcattccccagcaaacatttcatgtttacagtcctcaactaggctatactgtggaagattcagcagatgtgcaagcccaacctttcaggatctgagtcgagagagagaggggacattatatagagaaattatagctcagtttataaagtggccagtgacccaggagagcggcagagcacaggctgtggatcctgggtggcaggaggcctttgtcatggttattgggggtatagggagctgggcaggcagggatttgaaaagaggggcattagagcttgacttggaaagggggactgggatgtgaacatttggagattgcaggagaaagcattcctggcagaggaacaagtagtagatgagaagggtcacaggtggatccctaggtgggggtagctaaggattctcaggatctggttgctcaatagcagcaagttgagttctgcacctctgcaggccatgacctgggaaaacatcacctcccaagccccccactgcctttacttgtccaatgctattggtgcaagtagcctggcaagttgatacaaccagttttcctttgggacaagggacttggtgaggggatctgtggactcctaagagccttccagtggattccaggtgatttgggaacttcctaaaattgcacagatgattttgtgtacatgtgcacctttcccccacaactttcaaagatctctgttacccttgaaagtgtaggaggaagagggtcggcatgtggattaattttaaaaccatatttaaaaaactctcaaatcatgtgaagtttgtagtggaaagctccattcagtttgaaagccttcaccattctcaggcacagctcactgatctccttagtctgtgcacccctgatgggcaagattatgtctcatccctgcccagaacttggcctcagaatcttatttgtgatgtttgttcagggaataaaatagctttgatgtggatataaatttgcatgtgtgctgacttgcaatagagtggattttttttttaattgctacctctaggatcctaaggctgactttatgtggaggagacatttccaatgtccgtcttcctgcctggtccctacctgaccctccttattaagcacagggataagccttggcatgtcctgccagcaagctgagggctggggctgtctggcctgtacttgccaaatgtagtctgagctgtcttctctctaaaggactcttcagccccatgacccccaagtatagagccagacccaaatgtgcctcttcacatgttccaaggtgggcatgcttgggaacctcatccagcccctccttgacctgaggggtctgcagcagcagcccatgctcatcttaggcagtataaggactcctgtggctgcagaaccacgaggtgggactctcctcaggggctgcttcttggtgaatctgcactctatttataatcaaaagctctgccagatggacgtgaggtgcccagcagagggtaggaacactggcagctgccttggcattttgttaagtaggtatgcaagttgctggcccatcagagagctgtaaggtgctggaatgacagagccatttgttttcccttgtgacatggtctgttttataacgtggtgggtgagatcaagggagaagagtgggccccttcatagtttttcaaagtccttttttccttttttagaaaagttcaaagaggacattgactttctacagtcacaagcatcagcctgtcttggagagacagcagctgtggcatgtagtattttaaggtgatgagccaagtcagacaagtcctgatataggtggggtctggacatcctgagtgatcattctcatctaccactcctctatctgggccattctcattcattcagtagctcatggattgtctctctatctgggccgttctctttcattcagtagctcatggattgtctgtctatctgggccattctcattcattcagtagctgatggattgtctaatatgtgctgaggagagagggaatagatgcacatggatcctaccctcagcaagctttctgaacaggaggcagtggacacaaacagctgtaattagcacaaggtagcatgaagcatcgtaagaaacttggagatgtgcgctggcatggggctggggtcagaggtggttggattgatgttcctgattcctcccttctgggatgctcgtgttttatttattttatctaaaacctgcagaacctttaccacttgtttctacctttaacatcttattgcatttatagcctctctgttcatctgtctgtccatccatccctccatccattcaccatctaacatttaccatcctaagacaggatgcagaaggaaggaagactcagtgcctgctctcagggagctcacctttgattgcttccttatggtcccatttgtgttgggggttttgttccccagcttaactgtaagttccttgaaggtcaaagactgtcttcttcagtgttcttggaagttgaaaaatctgtttggtcagtggattgctgcagctgtcgtcttgggtgtatgtgcttaacaaaaggcttaagagtgtgtgtctgcagggcacaccagccttgctgtttgcagtgctgcacagatgactctattagagtcttttggttctgatttggaaatctagagtggtgggagggtgggaagggaggtggggaaaaatacaatgtctcaatagaccaagttcccaaaagtgtatctgcacttgaggctttcctgaagaatgaaaagcttaattcgtgccttttctttatgctacttgttcttttgtcttttttttttttttttaaggaaaagatgtgtcaatttcagttgcctaattcatttttaatatgggtcagagctgccatattcacacgctttgtctcatcacacctaggcttctgttgaaatgcttgcttcacaaatgaagtttaattaatagaaatagggaagtgaacacagggctgatgaatctggggagacatgacttggtgcctgcccagagaggtccctgggtcagattcctcccgagcctgttgtcagaggcagattcttacttagggagccaggatactgggagtcaggctggggcattcatcaacaatgcatagcatagatttgcttcttagcagatgtggctggcctatttacagttagaagaattgtcattgttttagaaaactttttttgaccaaaaaataaaataaccaccaacaaaaaacccagactcttgagttgaggccaggtttgaatctcaaagcaggttgacctattttcattacagcattatcaaaacttgtgattctacctccctaacatgcttttcctggtgtcacatgaattgaacacctgattcaagcaggagagagagagtgaagaccttgtccttgtctggggcggccctgtttcccactgtgctgtggtctgaacctctttgagtaatgcctcccagagctcacctgctaatgactgtgctccacctggggaggggctattgggaggggctggtccacgcagacagggctgtacctttcacgaagtgctttcacatcccctgtttgaccttgacaacttcccagtaagggaggcagtgcctgcagtgttatccttggtccacaggggaggaaactgaagctcacacaggcaggcagggggaaggcctgggagagaactttcaacactggcataccacggggatttgtgagagcacctgcctggagtccctgcctccgagaacttcgacttctttccagatcttctgctctcttatttgatttaagtagatccaaatatggttcaggaacaaagcaggccccaaactgtgtataggatatgtgggtaatgggccagaaagctcactcctctggaaaatgttggaaagtgacctctcctgagcatcccagtgacatggctggatgccctgttgagatatgagagaaggggctgggggacaaacccatggcaagggcactagctgaaggaattcatgcagaggagaggagagggcttttccactgacgtttccttgcctctattctgtgtgtgtgtgtgtgtgtgtgtgtgtgtgtgtgtgtgtgtgtgcattcctccttggaagatgagagcttctggtctcaaggggccatgccctgtttctcagcagcctcctcatctactctcttggttttcctcattctcttcgaggtaacaagtcctcacctatttttttttttgtggcaccctacagtgtctgcagtgataagagcaggtatctttaaaaaatcaaagccaaattaatctactttggttttttaaagtccccatggtccacaaaaatatttacagggactggagattatctgctagtattctaaaactaacagtaacaacgattctttacatttttatagagagcttcaaacattttagactatctttacttctgttttcctgttattcctagtacctctccagattagacaagatgatattaaatatttccatcttacagatgagcaaattcagacttagagacgataaggtactagccccctggaaaacaactgcactgaacctaggtcctttatttctgaacaagacaggcatcgtgttgaacttcatgaagaagataatctaataattgaaaatacatcaaatacaaggacaaataagagacgctgggggggtaatgtgggagaaacctaaccttgtctgagggtaaaggcagtgtgtaggtgagacatggatgctgagttggcctttgctgggtgaagagagtcaggaagattgtccagggcgtgatgtgttcctggaaccgtggggccccatctcagtgggccttgcaagccaggatgagtgctttggtttgtttttaaagctgtgagaagccactaaagggttttaagcagaggactgatgtgggttttagaaagactgctgtggctattaggcagaaacatgtggggaggggcaagaacaaaactggagagccagagcaggcagctgttagagttattcagggaaatgttcgtgctgtagactctggggtgactgaagtgggaagattcgagaactattggggtgtagaagggacagcagctagggattatttggttgtggtagaggacaacaggtaatagagactcaggattttggcctggatgtaatggggccattttctgagttaggtaactttttacattacagggtcttctctgggacctgcgggggcctgttttgggcaggagggcaggagcatggactcattttgggacatgctgagtttgaaatgcttttaaagtatgttatgtggaaacttcaggcaggaatggggacaggtggttctggagctccaaagagagaagtgggctggaggtgcaaattccagattcattgccacaaagtgaataactggaatagtggacaggaattagaccaccaaattctgtgattctttcgtctttcccgtacttcttgaggggatttataaactcaagctcaaaataggaacctgagctttaagagagatatagccacgtttggagttggtttaacaaaggctgttctgcgggtcccagagaagaccctgtaatgtaaaaggagaatctggtaggtaattggaaccaacaaatatacttaatgttatatcccagtgatggtgatctcagaactcacggttggttgtacgaatgctggttcctggtctctgtagaattgcttccttatggctgcacattccatcaagtggttctgcccaaatttactcaattagatcttggtggtgcatttcacaataagaaataattctgaaatacactcataatggtttcaaattttagatgaattctttggattaagacctaggggtatttccttggttgtagagaacacacacttttatgactccttgttatgaaggcaacagactgtgtaaaagaactctggagttgttggggcaagagctatgtggtgtttctccctgaagccctcagagggttgtcctcctcggatttcaagggacccgctctgtgaggcacactggagtctcaggggcaagctctttttcactgactcactcaccagtgtttgctgagtgtgtctcatgccttctttcttgcttgcccctggaacatgcacaggactcagacccagccctgcttgtggcctggggctggtagatctcatgcaggtaatcacggctgaggatgagctctgctttgtgtgagttctggatgaagtctgggggagtttggagacgggagatgctccttctgcctgggggagtagagaaatgcttcccagaggttatggaaggaaattggatttgtggaggtgactgacagatctgtgccccttgtgtcagtgtctctagctgcgacagacacatgggtcagcaggcgacccttgttttccctgagagcagcaaaggccctggtgaggatgtgtccagcactacaggactggctagctgctttcttttttacctttcagttttcaaggtatgaatttttaaccagatactttctaaccttaaagtgatttggtactcccaaggaatcattctgaaagttaggaaatttatttgtgattcattgagttgaactatcaataactgtaacagattccgatctcctttgtggaaaaaaaaagtaactgtcttctcaagtacaagaatgagagaaagggtcttgattaccattttgtcctgttcaccttttttggagaacacctttaatttcttggccacaccgtgctcgtcttcattttgcacagcaccactgttgtaactcctaaaacttacgcatcacggcagatgtgtgattctttcattctttagatctgtagttttcccttatacagaagttagtgtcttctcttccaatgtatttaaacctttaatgaatatttcatcaaatgaacttcatgtcttgtatttcattattaatgttgtttatgagaccctatcctcattagcataacttacaaactaagaggaagaatgatattttaggacagtggttggtgagagaatagttgcgcatccttctacacgtgtcaaatgtgggcctttagcgagcctgcaggaaaagctgggatgctgagtatgtgtctcgcctggggtgacagatggggtgttcatgttctgtgagctctcagccgtcccgagtgtgtggctgtccctgcagcatttggacgaactcccgccaagaggaagcctgggcatgggggtgctgtgaggcaggactgagtgtatgaatcaaggtcggccttgtcctagctgggtgacataagccaaaccccttgccgactcttcagggtcattttgatcttcccgccacccagatgtcccctggttcactgatgaccccgataactaatgtgtcattttcctctatgtgcttttcttttagagacaacgtctccttctgttgcccaggctggagtgcagtggtgcagtcatggcttactgcagccttgaactcctggcctcgagtgatcctcccttctcaacctcccaaagcactgggattacaggcatgtgccattgtgcctggccttgttttggcaaaaccatatggatgtcccatctaacactccagcctctcatttcaagggcccttttcccctttggccatccacttccacttgcataccctgggcctcatggtttgggtggctgtttcagctcctgaacctctaacttagtgtgctcctcaccagccttgcccttctctctggcctgcctgctcagcatcacccagggcctgttttccctgcagacctgggctctcctccttggccaacttagatgctagacctttcacctcacctcctcaaatccctttggtccttttcatcacttctgtgcaggacatcccagccctggatggatccagctagtggtcctggccctgcctggccatccagcctcagctcatgccactgcccctgcatccactactgttctgcttcatgagctgccttctgttgctctaaggagtcaactccttcccaccttggagcttctagaccgtgtcctctccccagatggctcctccctcacttcgtctattactttaagctccacatcatcatttgtttcctaggggagcctcctctgactgcctggttgaggtcaggcttgtcgtccagcctatacttaggattgtcacttactgtttgtgtgcttatctgttcaacacctggcccagggttgtatagggcagacctagtttcagaccttctgttccttcatgcccatgaaatgtcccagaaatcctattgccttggcatccaaatgccattgcccagactgtctcctatagtcagaaacagctcagaaagcttttatcagcatgagtgtcctagtttttggttcacaaaacaactgtggtcatcacagttctaattcctgttggttggttggagagtcagtacagagtattagctttgggccagattccttgagttaaatccttgccacttataactaggtgagcctgggcggccgggcaccctctcgtttcctcatgtagaaggtgatcatggtgcccacatcctggcattgccgagaggatcgagtgagcgggcataggtacttctctacactgagaagcactgagcacttggtgagcatccggaaacatctgctgctgttagtgtgggctgagctctgtccgctgtgggctacagaaggccctactgcctgtcctgcatttttctcttatgtatgggctttcagtaaacatgtttggattgaaatacacatttgaggaggcactggacccagacctttgagcctgtgattccaaaccctttcctcctgtgcagttgcagctcacttcccacatcactcagtcctgcctctaagcgacactacactgtcaccttccttcatcatcactgttggcgctttcacataagcaagggccccatgtatttttctcttattctctctgtctggaatactctaattctttccttgaatccaatgttctgttcacctcctcctttatatttttaattttttgttttatttatttatttagttttgagacagagtctcactctgttgccaaggctggaatgcagtggcatgaccttggctcactgtgacctccgcctcctgggttcaagtgattctcctgcttcagcctcccgagtagctgggactacaggcatgcaccaccacgccccgctaattttttgaatttttagtagagacggagttttgccatgttgcccaggctggtcttgaactcctgagctcaggcaattcgcccaccttggtgtcccaaagtgctgggattacaggggtgagccaccacacccagcccacctcctcttttaataccagcttcacaaacatccttcaggatatgtctccggactctgagcctgtgtgttgctctctgtccactcaatgctgtgtcgatttgccctagtaattggcaattataattctaagattataaactacagtatcaaaggtaagagcaatgtttcctctcccaggaactacacaaagcgtagaagaactcagtatttcctaggccttcaggaaaagcttgttgactaaaagaaataaccagttgacctggttttggtgtccgtttatttttgcgtggatatgaggtgtaccctgggatccttgttaaatctcatgttactcagcttgttttgtcaccagtgttgggcaaaactgggtgacaggctctccaccttctctgcccctttcttttctttccctgcttttccaggaacaccttgattcttctgtacgctagggtgtcatttctctcgttccttcagcagttcaatgagagttcctgagcactgcctacagtgtgacaggtgctcatctgagcgtgaggagcagcagtgaaccaaataggcagggctcctgttctggtggagctatgttctagtgggaagagaggtgataaaggaatatgtccacgacataggtggtgcttcgattctagcagggaagacttatgttgattggccaggaaagacgtctttaatgaggtgccatgtaggcagggatctgaaagaagtgaagggagcaagctgtgaggatagccagggcagaggggatgggcacccagcctggctgagagtgtgtgtgtgtgggggaaggagatgtttttaattggaatggagtaggggtgaaaggaggagctggaggcatcagaacatagaaggccttctaggaaccccctaaaagggccttggatgttactccgaattagatggagagctgtttgaaggtttttgggagcaggggacattatctgatttgtctaatgtcaccttaggtctctcatgagcttaaggaaatattaactcattcataggaggagggaagtaacttctgttttaaggagggacacttgcctaattcctctttgagtaaggcctaatctgtcagagtcgtggttggactgtgttctgaactgtagcatcccagggcctgaccctagttctgtttttttttttttagatggagttttgctcttgttgcccaggctggagtgcaatggcacaacctcagctcactgcaacctccgcctcctgggttcaagcgattctcctgcctcagcctcccaggtgcctgccaccacgcccagctaattttttgtatttttagtagagacggggttttgccatgttggcccggttggtcttgaactcctgacctcaggtgatctgtccgcctcagcctctcaaagtgctgggattacaggtgtgagccactgcgcctggccaatcctagttcttttactctcttgcttttgctcagcctgtaagtaggagtaggaagtttcaaaagttacaataattaacatattcacgcctttttcacggtctgggggagctaaagcaggtgcaggataaatgaaggaactgaaccagctaggaccaaaatcagtaatttgaaccaaacttgatagctactgttttgaaactgtcattcctacctataggtagataagggcaagagattataaaatctgatggccacgaatctaattttatgagacagtgtaatgataaaaggaatgagggaggctgataaatacagatctgtatgtcttccagttttagccagcttgtcttgtttctgagtttcttgagtttcttccctgggaattgttttaggcccaaatggtaagcaaaaggaatatggtgtaagtggaattaaataactccccccagcacctcctactttctctcctcagatgtgtgagtggtaaatactttggaagaaatacaccccaagcctggtgtgttcactctgctcccaaaggtgcttgggcagttggtggtgatgggagtgttggttgattgtagctctgtatatgagggtgtctgaggattgtaaaattatcaggaaatccctcttggtgttgaagtcatgagcaggtgcaggagaggtgaaaggaaagggcagtgggtattcttccccctcaaagtgtgggaagagcagtgctccaaggccacccaaggagctgggattttttccttctaagctggttttccctttctccccactcccaactagcacgtgggcagaaggaagtgctttatctgcctgctacagggctgggaaatgtggcccgtgtactgcctcagtgcttgggtcaccagcggagatggctgcagtcccagccagctctgcaggagcttcagtcagaaacgctgatgttaggatgcattcttcagggagctgcagcttttcttagaaggtggaaaaagagaaagaagtgagtaaggtgaagtcttagaagaaggaacaacagaaaccaagttcagtgacagcccaccaggcctggcagagtctgacaaggagtctgtgaggtagggagtgtgcacgtgtgtccgtgtgtgtaaaggctaatggaatgggagacgcccttgaacagaaaggctttcacccataagtgtgaagtctggttcgtcttagcgacaaaagttagaaaaccactttcagacaataattgtattattttacagcattcgaagcaacctgagttggtctcaaaggtggctccctcaggccttacctgaggatggggacagagttgctcaaatgctttgggattactgagactagagtcaggataagctcgatcccaggttcctcaggccatgcttttccactagccaattcagtcccttcagcaagtgtttgtcgagcacttactagatagcaggtactgctcttggcacttagagatatttggtgaaaaggtcagcctggagcttccattctactcaggagacaaatgagtaaatacaggaggtgatttagagagcacctgcctcctgtaggaaagaaagggaggttatgcaacagcacctggtaagggtggtcagggaaggccatgtggggctctgggacagaattttccaggcggaaggaagatacagaggcttcaaggcagaaagaaacatcattgtggagtaatggcaggtggctgatcccactctctgcatgcagaaaagagcagcagccttcttgaagccttcttacctttctcacgttagtacaattccacacccttgtgtgtatgtggcagccactgtcataggcatcagggatcctgcttttcttccccttgaccaagatgtgaagatttgtgatcagagcatcagaaataaagtcccttgagacttgcagattgaggaaaaaatgacaggagtcacccagatatgaaaatcagatcttgaattcgtctattgatcaggcattaggcatggtgggagttcagtccgtttcagctttaatgtcctgttgttttgctattgatttctttcctcaggtttcaattggtattttttccatgttgtctatacattggtcatctattttagtgatgctaattgtttagctattaaaatggtgcattagtcccacacaactcttataaacagctgtgtagtaaggagtataatctttgtatctgtagtcccccttagggttaataattaggtttttgacagccagctcagccggcttgttttcacagtgccctgtttcccactggagaatgcaaggatgcagtcacgggaggaccaggtggacagcatttggaggatttgggtggatctaagaatattttcatttggaagaacaggatggacaccagaggccaaaccaaggagtagaggaaaacatggcacctttcccccatcccacccctggaactttcacccacagtatagggttgccttgaagctctggattaccatggagctttcaatgagtaggaggagacatccatttgtcctctgtctccagctggccccgggaactattcaacatctgggattgcttcctgcggtgccccctgacccaactcaccagagtctaccgactctagacccactgttgtcctgggcccctgcctgactcttttacccactccaggatgaccctggtttctactgacacctgcctgacctaactcggtttgtctagaatgcagttgaagttgcagcaagggagatgaggaagggtaagaattggtgaaaaaaattacaaaggtttttcatggttcctaccctcgatgagtttacagtctagtcttcatgaggacatgtgctcatttgatcataaggcattttgtgacatgtgcctggaggtgattcagacagatgggcagggcaggagggaatgctggggtgtgtatagcaaaatgtgttattaaattatggcatctgttgtcaacaaccggtttagaccttcttgatctcctggggtttcttttcagttacagaattctgtcatcattacagaaacaaggcttagccacttactgctttaaataccaaaaagagatggcgaataagattgggatccatggggctttgagaacctagtagcgtgtgtgctgtatcacagttctcttctggctgatactggagagggccatgcaatgctggggacggacagctgtactagggagtctggattcgaattctggacatccctaggctcactgtgtgaccttcatcccccctccccccactccctgtaccctttgagtgcccctgccttcttactctgcatgtgtgtgcatgtgcatgtgtacccatgagtgtgaggaaggataactccagtgttgggggagagtctgccaggagataggtgccctgagtagtggtcttctcttgggcacttaccgactgtgtcattttggaaaatggccccccccaaaagatttccacatcctaatctcttgaacctgtgagtatgttaccttacatggcaaaagggatgttgcagatgtgattaacttcagaatcttgagatggaaagattactctggatttagatgggcctacccaatccttacaagagggaggcaagagttagccggagaaggagctgcagtgatggaagcgcagaagtcaagagtgatgtaatcacgagccaaggaatgtgggcagccttagaagctggaaaaggcaaggaaacaggttcagccctagagcctccagaggagcacagtcctgctgacatcctaattttagttcagcaagacccatttctgccatctgaccttcagaactgtaagatactaagtttgtgttgttttaagctactaaattatagtaacttgttatagaagcaatgggaaacatacatcaattattcctctggatattagttgcttcagctctaaaatggggacacaaaatgttttctgcctgaaggctgagaactggaccatgtgacttttggcattccttcaagttctagatttcatgagagagaaaatcgacctgaaaatgcattaaatgtttaaaaacatagggaagaaagaaatatacaattatttaatgtctgtgtatgtcatttaattcttacaaccacctgagagagattttataattattattttcttttagtcattcaagtatttgagtgcctatatgtgccagatggtgttctaggtgttagaaataaagcagtgaacaagaccaataaaaatctcctgtctttttgaagcttatctttagggagacagatgagaaaccataagcataattgctaagtgaatcatcagctaggttggcaattgatagctgggatggaagaaaattagagcaggttgatgggagcatgttactgactaggattgcaggagctcagagggtgagcagtttgctcaagaccacagcaccaggaggtagtggagtggggatgaaacccaaaatctgttggaatccagaggcctggtctgatccttttctcaggctagtagaaggctctgcctgactttgcctatttggattcccccactttactgagggagaggagtccccactgccagctgttgttaggacaattgctatcatcctgggtttcatatttttagctcctttcccatctctctaataagtaaatgccagagggctagggctaggctgatgctgggaatgagacgaggaacacagacggcacaggtcgcttcatgagttccagaggcttgtacaggagacacatgggccggccactgtttcctgtctctctgagggagctgcaactccagcctttcatctcacaactcaagttgcttttgctgcagctgaggcctgaatgtgcatttgtaactctggggaaaagggtgttcagttatcaacaattactattaggttggtgcaaaagtaactgcagattttgccactacaagtaactgtaaaaactgcaattacttttgcgcctacctgatatttttatgttgcatggccttttcctggcagtttgatgtttatcatttcctgtcattgaggaatgtgtttttctaggacagtatgaaggctttcaggatctttagagggaagctctaaaatgtgcttctctctccattaggttggctcatcagtcagattctgatttgaaaatgaagggtgcttggcagtaagaatagtggaagtaaattttcaatattatacattaacaagtcataactaataacttttatgggttcttcccatctcagatttcagagaatatttttgggttgtgttctattgatgagggcttaaagaaatgccttgttctggctgggcatggtggctcaggcttgtaatcccagcactttaggaggcccaggagggcagatcacttgaggccaggagcttgagaccagcctaaccaacatggcacaacaccgtctctactaaaaaaaaaaaaacccaaaaattagtttgggcatggtggctcatgcctgaaatcccagctactcgggaggctgaggcaggagaatcgcttgaacccaggaggcagaggtcgtagtgaactgagattgcaccactgcactccaacctgggcaacagagtgagaatctcatctccagaaaaaaaaaaaaaaagaaaaccaaagcaaagccttgtcctgttgtgcttggtttgaaactgccattccctttagtttctgcttactgctacttctacacaaggtcaagagaaagcctggcttcagaagaattacatagtcaacccctggggctagctagctgcagaagaacttgaacttttggttaattaatggaggctgggccatagctggcaaagcgggatgtgcccatgcctgggtgttgagagactgggtcttgacatggctctgcaactgtccatgtcatcttggaagatctttctgagttgggacagctgagaaacttcatgccatttgacagttttcttgaggtcatgagcaaattaaccaatcaaggaagtaaataagtaagttttggtggaacaaatttgtatgttattggtgtgcctttttttttttaataccataggtgtgttcctgatgaaaagggtgtgaataaatggaatttaaaatagttttccaatgaacggaatctttcacatgttaatatatcagggtcttctgcagtgacagctttgcctgaatttcatttttcacattagcttaaaaatattttaaagtaaaacatgttaattttgaaacatataggaaccagataaaggcaatatgttttttataaaatggaatcatatcctatcattggacttttggctgttttcctcttttaaccactataaaccatgttgcattgagcatcttggggtagcaaaatcacagattcctgattatttctttagaataaactcttagccttgaaattgctgcattgaagcatatacaggattttttttatatgagtcgcaaagttatttgctttgcttttgctttttgaaagagataaaagcttagacatcttgacattaaaaaaaacaaaagggttaatagcccagactttaaagtcagacatacctgaatttgagtcctggctccaccataacaagctgtgagaccctgacaatttacttcccatctctaagcctcagttttctcatttataaaatgggcataatatccttaaactcactgtgagcattaattgaatgacacgatataagtaaaacaccataccgtacatgaattctctatatgggaattcttactaatttgtacctgaacctctccttattcactagaagagtgtgaaaacttagtttcctctctgctccacccacggctttctagcagtcactgtaggcccaaggaaacccaccaccgtcttggtgcactgtaaccagggttgaggtgtctgtcctaattttgaaagcctgccttcagacatttatatgttcagacaaactaatcaggctgaaatttctcatgcttatttgcagctagatgaagcaatccatttagttgctttggaattacccaagcatggaagaaattggtttctcagccttgagatattctgcagatactgaagtacagatggcaccagggccagcttggtaaaaccagaaacaaggggcctgagtttggccctttgtcagggcctctgtccttgggaactggtggttccacctgggccccaacataagcctcagcttttcatttggccagcatgtatcatgaagttacttcttatttcaccctttgggggactctcagctgctcagagcttttgtgttttctcttttcagcttcctcctcaattgatacggatgaagtatttgctgaatctgtttctctttcctgaatcagaggcccagaggcattcatatagttgctttctggtaaaaccttgctgatctggtatttgggctgtcattagactgtagtgcaaaaagacgaggtgaattttgggactccagatttcagagtgtataatatctcttgtagttaatattcacaacccatgagataggaacagacagggaaactgagataccaaaagtaatgtgcccaaagacgtgcagctagtaaatggcagaactgggatttgaattcttgctgactatggttccatttcaactattactcaataccaccttttaatctgcttattataatgtatttcataactttctatgctgtggtattgatcattcattcatcagttacacaattattgcatggaaggatacaaagagaaaaagatatggcaatgtggtccttgttcttagggaattttcataaggtattaacaggagaagcaacaagataactatagatcataatataaaaatacctcccctctttgttagatagctttaacccccctgttcgctgaaggacttggttctgaatgattgaaacagataatcctccgtgattcccgtacatgtcctctgtgcccacctcccactccagcggtgagtccattgtgtttttcctttattggcaaccctaacgtgttggggcaccctctctaactccacagtacgttgtaagtttggtgttaggagagaaatgatctcaggcctgcacagcacactctttttctgttccctgccttttaaggtcatgccctcttgtcatgaatataagaatgcctgtgcccccttcggagaccggtgccactttcaggctgtgtgcatgctcactgcccctccatcctccttgagaaccatcgatgtgcacagagggttgtactgtttctctgtacatcccatcagcatggcttactcaagctttgcttcctgtcatatgtactaaggttttcaatgtgaaaatatgaaattacattctcatactaaataggctcctttaatccacactcctctctgagaaccaatccactttaccaagatctacccctcttggggctgtgctccctggttaagaacagctggtttagtagcaagggagaaggcaggagatgatttaaaacagaccctgggattctaaaagtcctgggattttataattcctgggattctaaaattagctgggaagattttgagtagcggaaaagagcctgccaactttagccatcctggataataccattctgttttagcttgatcactaatttttctgaccccatgtagaaaacgtatgtaaatcatggtggtggtagcagcagtagtagtaacaacaataatgataataatcatggcagtagctcccctttttttattttttattttttgagacggagtctcactctgtcacccaggctagagtgcagaggcacgatctcagcttgtcttggctcactgcaacctccacctcctgggtccaagcgattcccctgcctcagcttctagagtagctgggattacaggtgcccgctaccatgtctggctagtttttgtatttttagtagggacggggtttcaccaggttggccaggctggtcttgaactcctgacctcaggtaatcggcccgcctcagcctcccaaagtgctgggattacaggcacgagccaccacacccagcctgtgttagattagtgttagagtcaccttattgatctgtcaacactaggtcttatttcttcaatctatttgtacccattaagaagcctttcctcattctcccctctcctcacccttcctggtctctgataactaccattctactctctatcttcatgagagccacttttttagctcctacatataagtgagaatgtgatatttgtcattctgtgcttggcttatttcagttaacataatgaccctggttccatccaagtggctgcaagtgacagggtttcattctttttatggcagcataatattccattgtgtatatatgccacactttcattatctcttcatccattgatgggcacttaacttgattctgtatttgactcttgtgaataatgctgcaataaacatgggaatttagatatctctttgatatattgatttcctttctgttggctgtatactcagttgtggaattgctggatcatatgatagttctatttttagttttttggggaacccccatacagttttccatagtgctgtattaatttatatgcccactaacagtgtgtgagggttcccctttctccatatccttaccagcatctgttattccctgtatttttgataaaagtcattttaactggggtgaggtggtatctcatggttttgatttgcatttctctgatgattagtgatgctgagcatttcttcatataacctgttggccgtttgtcttcttttgagaaacatctatacagatcttttgcccattttttaaattgggcttttttttccccctattgagttgtctgagctccttatatattctggttattaatcccttgtcagatggatactttgcaaatgttttctcccattctgtgcattacctattcactttgttgactgtttcctttgccgtgcagtggtgcagctttgctgagctatttctctccagcggacgaagttgtccctcttggagagtgagatgcagttgcgtcacaggatgttgtcatatgctgggcatgtggcacaggtgaggtccctagagccgtgaaggccaggagggctggttgggaagcatagacctacatagcatgaaactgtgctcttcattttggttttgcatctgcggctttctgagagacctgagctgacacatggaacagatatggttctcccttgagaaattgttccaaatattttgatgtacttcagccagtcactgaaactctttagagtgggaataatgctcatgcttgccttgaacagcagtggcacagagtgattgaaagcctgagctttgaagccagactgctggggtttgaatcgcacctcggatattaactgctttaccttgggcaagttttgtaacctctttgtgcctcggatttctcatctgtaaaatgagacataataagaaatgtaccccttggggttgttgtgagaatgaaatgactttctacctttaaagcacgtagaacagttcctgggacctagtatatatagatggtattacactgtgaaatcatttgattctctaaatcaaatgagaatgcttcataaattgcaaaataccactcagtactcttagcgacagagggagaaaaaatggaatattgtgttggaagctatagtttataatcccacttcatgtggcagcaataaaactggcaagttattgatggggagcccacaaacatgacaggctccccagaacaatgatgcctcatctgtgcatgaatacccctggggaacttcaaaatccatatcctatggttgatttccagattcactgaattagaattttgcagggatacggggtactcaggaaggttttgtttattttttacagaaagatttccaggtaatcctaatgcagctgatgtatggactggtgtttggtaacttctgacctggatgctctaacagttggttatatttaatgggatgcaggaagatttagtagagggcctgacagcaggtatctacatttacataaattttcattaggtaatgcggatggagcaacacaggcagatttgtctggaggaaattctagacatctaaagacacctaaatcctggggctgagagtatggctctatttcttattgaggtcagttttcactggctgactgattcccttaccatgaagcacaaggttgatgggtactcttaattgtgtgaaaagtgggaagtgggaatagttgcaaagggagttggaagtaggcagttttgaatcctggcttgcctgctgcatactggatggaagctgcagatggaggaaacagtgcagaagactcactgagcaggcatttggatgactggccagcagatggggagtggagctcagtagatagccattctgcactcttcaggagagaagaacaacctggggccatgtgttcaataaagagatggggctggcacattgttgaggaggagaaggaggatttcaaatggagggctttttgaagaaggcattgaacacctccccacccacccctgccctgcacttctccctgtagctcagaaaccttttaatagccatgggaccaacatctagcagctggcttggttttgctggtccttgctttaaaatggggatacatatccctgctttacagacctgctgtggagttggatgaaatggtggatatgaaagtgccttaactgtaaagtgctgtacatacttacagaagcattggctaccatgtggagatggcgtgccccttggtattagtaggaggggacagactctgaccctctaccaggggtaaagccccaaatctaaagatctagaaacattagcaccttcatttcaaggtctgatatgtaagaggatggacattcctaagatttattgtgggcagagtagcatgctcacccctgatggtgacagtatccgtagtgggttctcactgtgggctgttgcatttaggccactggttatgcctgcttcccagagctcacatgtaactccattcctttctcctctactcaagaaggtgcacttatgtgtgtatgaaacagggacattattaaaaaggtaacctgaatctacctaattaaaagcacaataaattcaataggttattcagatttccatactgtactgttagaaataaatgacattcacacactgcatagcagttgtgaaggtgagaaccgcgactgtgggtagggagatcctccagacatcagcaattcccatgtagtgtgagaccaccgtggagggctcctttgtgtgtctggcaccgtgggaagttcttagggggacaaatgaggtatcattttctggcccctcaaagtactttcatctttccaggaatgtgtaattatgtgcccaaatgagtggaaggctcctaggttctgtagttgttcagagaaagaagggactcgaactaattgaagtgattgaatgagcagcacactgaaagctagctgtcaaatctgtaattataacttctgtgcagtgcatttgacattttacagcatttctataaggataatgaattctgatgccttcagaagccagataggtaacaaaaatcagggaagcagttaggaagactacacttggatggttagtattgtggtgaaccagaatgcgtgtggcccacctttaagacatggcgatccaaaatttaaaacagaagcatagcacagcacttctgattttcaaagaacttttacgaatgtcctgtttcatgttcacagcatcctatgatgcaggtctgttctccccttccagagataagaacacttaccaagatcagtaaaggtggagatagcatgtgacctggagactgcaatgccagtgctcagagctgtgagatgctttccctagaggccctgggtcccaggaccaagcccttggggaaagaaggtatcatgctttcctgaagtgtctgccctctccccagagcttccctagttattctctgagcacagctctggggagatgggcctctggacctgtttgtttctactgttaccccgtgacttaaatgggcccaggaggcaaagactaggaaacaccaagaaggctggtgtgggaattgaagaaaaccatcaactgtgtcaacagactggacccaataataggaacaaagtgctgaaatcagctttgcagtcacatttagttggctgacctgtgatttctcaactgtctcttttttatcttttaaccatccatgtcatttttcactgaaagaaaaagagaaatgcagagatccagatggagtcccttgaacccttgagccaaagtacagaaacccctgcactgtggctggatgcccctgaaggagggaggccatgtcagttacgattaatgtgagcagcttctctcattccagaaatgtgacctctggttacagcaaatgtgacaacatgaattaccttcaattatggtgaactacgtttaactacatgattgcctccacaccttggtgggaactggctgctttgatagccttgaccatggaagaaaaagacagtagaaaagacttggaaatgacaggcacctagaatctgagtcaagggtacagtggcaggccaagggctgtgggctttctgtattatcagtaaatgtgatatgtggtttgggctttgattcccaccagtgcttgagaaagggatagttacccactttattgagctaaaatttacttaaaacatatgcctttaagtatatattttacagatggatgttttgataagtatatacactctgtaactaccaacccactcaagatgcagaacactgctatcaccataagggtcccttgtgccctatctagtcagtcctcacccccaattcctgacccaggcaaacactgatctgctttttactactatagattagattcatctttttactattacaagttatattcacgtttcataagtgaaatgatatagaatgtaatcttctgtgtgcatcacaagtttgtcctttttatggctgtatagtagtccattgtatggatataccacaatttgtttatccctgtacctgctgttggacattagagtctaaacattggaaacattgttttggctatgaaaaataaccaggttttggctattacaaataaagtggctatgaacattttatataggtgtttgtgtacacacatatatgcttttattacccttgggaaaaatagcaaagactgcagttgctgggccatattgtatgtaggtggggttttggccctcattatttttgatgctccctggtgatacacctgtgaacgtattatgttacagggcaaaagggactgactgtgcagatggaattaagcttgctgatcaactgactttaagataggaaaattaccctggaagtgggcaagcccagggttatcacatggacccttaaaatcagaaagggagggcataagccaatcagagagacatggtagaaggagaggtcagacttaaagagtgagaactcaacctgctgactttgaagacagggaaaggaggccatgagccaggcattgctgatgtcttctagaaggtgagaaggacccccagctgtgacagcaagagtggggacctgtcttatgtaactaaattctgccagcaacccgaattagtctgaaagtggattctcccccagagaataagagtccagacttatagttttagcttttgcatgtagctctatgattcattttgagataattttatataaggtatctgtgaagtaagagttgaagttcactccttaacctgaatatccagttgttctagcatcatttgttgaaaaactatgcttgttgaataactttggctcctttgtgaaataaattatgtatgtgtgtttatttcggaactttctattctttcctattggactgtatgtctcttcatacaccaatcccactatgtcttgattaatgtagctttatggtgtatctggaaatcaggtagtataagttctccagttttacattaggttctttgtatttccatataaatttaataattggcttgtcaatttctataaaaatagccctgtttagattttgattgggattacactgaatctatatctcaatgtagggagaattgacattttaatatcaagtcttctgtccatgaacatgtatatttctcataatttatttagatttgatttaatttttttcaataatgttttgtggttttcagtttcaaatgttttgcataattttctaaatgcatccctatatcatttgtttctgatgttattgtaaatggtatttatttcaattttcatttgtttattgctaggatatagaattaaaagcagcttttgtatattgactctgtatcccataaccttgtaaactcatttcttagttactttttcggtgaattcattaggattttagacatatagatcatgtcatttgtgaacaaagatagttttccttctcccgttataatcggtaagcctttaatttctttttcctgccttattacattatttgaaacctctattacgatgtggaataggagtagtgacaatggaatccttgtcttgtttgtgatcttaggggaaagcactcatttcttcaccgttaagtatgatgctagctgtgggtttgttgctgatgtcctttattaggttgaagaagtttctttctatttctatttctcaggagcttttaccatgagtagttatggaattttataacactcttttaacgtatctattagaatggtcatatggttttcttttttattccactaatatagtaaatagcattaattgatttttaaatgctaaaaccaccttgctttcttaggataaacatcacttgattgtggtgatggtgccttatccttttgatatattattgaatttaatttgctgttattttgtaagaatttttatgtctgtgtacatgagggatattggtttatagttttctttctttaaatgtctggtattgttggcttcataaaataagctgaaaagtgtgccttcttcctctgctttctaagagactttgtgtaggattagtattatcccttaaatgtttgacagaatttaccagtgaaatggagtctggagttctctttgtggaaagatttcaagttaagaattcaagttattaggccgggcgctgtggctcacgcctgtaatcccaacactttgggaggccaaggcaggcagatcatgaggtcaggagataaagaccatcctggctaacatggtgaaaccccatctctactaaaaatacaaaaaattagctgggcacggtggtgggcacctgtagtcccagctacttgggagactgaggcagaagaatggcgtgatcctgggaggcagagcttgcagtgagccgagattgcgccactgcactccagcctggatgacagagcaagactctacctcaaaaaaaaaaaaaaaaaaaaaaacttcaagttattaaatagatataggactactcagattttctgtttctcttcatctgagctttggtagcttgtatcttggaaggaattttccaatttcatctaaggcatcaaatttattggcataaaattattcataatatttcctgattatattttcaaagtctataggtattctagtaattgtctttcttttatttctgataccagtaattcatttcctccttttctgcgatcagtctagctggaaatttctaagagtcgttgatgttgaaaaaaccacctttttcttcccttgatttttctctattgtttgcctattttcagtttcatttacttttgcgcttgccgttgttttttccttctttctactattttggatttaatttggtaatcttttctgtggtagaaggttgcacaattgattctagatcttttctaatatcggaatattggctatacatttccctctaagtactgagttacctatgctcagtttttttggtatgttgcatattatttcactcaaatgttgaaaatattttatttatcttctttgacccttggattatttagaaatgtgtttgtaaatttctacatatttgggttttgaccaacatcaaaaggtcaatcattgacttttaattccattatgatcagggaatgttctttgtattcttttaaacattttcaatgtattaatgcttgttttgtggcccagcatattgtctatcttggtagatattccatattaactggaaaatcatgtttattgggctgttaatgggtagaatgttttataaatgccaggttctataaatttaaccaagctgattgatagtgctattcttttgtatacatactgattttctttctacttgttttatcagttatgagagaggaatgttgaagttcccaactatacttgtggattgatttatcttttcagttgtgtcagtttttgcctcatatattttgaagctttgctcctggatgaattcacatttagggttgttatgtttccttgatgaactgatgactttatcattatgaaatgttcctctttctccctgttgatgttctttgttctgaaatttattttgtccaatattaaggtacacctaccttggaaagaccagttttagttgggctttattgttcactatgacaactctgtcttccagttgaagtgtttgtgtcatttatgtttgggttttaagtctaccatcttggtacttattttctattttttccatctatttgttgttccttttcccctttttctgccttcttttagtataattgaatattctttgacattccattttatttctactcttgccacataagctatatctattttatatgtgtcttctctgtatacgtgtatttaccatttatagggctcttcatttctttgcatagattcacatttccatttggtgtcattttccttccatttgaggactttgctttaacttttctgtagtgtatttctgttggcagtgaatcctctcagcttttgtttgttgaataaacttcattttactctcatttgggaagatattttcactggatatagaattttggattgacagtttttcttgcagcactttaaagatgccattctatcgtcttctggcttgcaaagtcagaactttcttttggccaggaactgtggctcatgcctgcaatcccagcactttaggaggctgaggtaggaggattgcttgaggctaggagctcaagaccagcctagcacaggcaacgtagcaagaccccatctcaacaaaaagtttaaaaaattggctggggatggtggcatgtgcctgtaataccagatgctctggaggctgaagcaggaggattgcttaagtccaggagttggaggctgcagttgagtcatgattgcaccactgcactccagcctgggcaacagagattgagaccttgtctcaaaacaaaacaaaacttttctttgattctgtgtacataatgtacacataaggtttttttcttcatttgatttcaagattttttcttgatatcagtttttgggtacttgattttagtgagaggttttctttgtttattcacctctggatttattgagcttcttggttatgtgggttatagtctttatatttattaatttttcaatcattattattttttgcttctacccctctgcccagaacttcgattacatgtattaacccagttgatcttgttcataagtcattgagtttctgttcatcattttaaaaaccaatctttaattaattttggataatgtaaatgtagccatgttcattaatcttttcttctgtagtgtctagttcaaggataagcaaatttttttctataaaagatcagatagtaaatattttatgctttgtggaccagatggtctgttacaatcacacaactctcctaatgtatcacaaacacatgcatagacaatacaccaaaaaatgagtgtgccagtaaaactttatttatgacaacaagctacggtctgggattaggtctatcggccatagtttgctgaactctggtctagtccactgttaattccatcacatgtgaatttttaattttaaacatcttcatttctagaaatttcatttgatttaaaaaaatatttgatatttcctctttcattatgcatgtttttaaaaatacttgaataaaattatgatagctgattgaaaatccttgattgctaattctattacctcctcatttctaagtctgtttctgtttagtaattttccaaaaactgcttatgggtcctattttcctttttcatgacaattctagtaatttttgattgaatgctgggtattgtaaaaattatattgtggagcatctgaattttcttcctttaaagaatgtgtaatttgttacggttgacagtcaagttacttgttgctcatagtgatcctttcaaagactgtctttaagcgttgttagggtgggtttaggatcaccttttagggtctctgcctaaaccccaagggatcaacaacatcttttgactctgatagttggaaaatcaaatgaatgctaaccctatgcgaatgctgggatctgttcagctcacagtttcagagttgctttttgcttagcctcatggagttttgtcctcacatctatgacttagtattcagcaaagactggagggtttccctcttcagatttctggattctttgccctgcagtgtctagccacctcagactccctacattccagactgtttcctcagctcagtgagacctttgtgttctgcttggcgcccccactctctgcttcacgtttcagaatgaacctccaggcagaaagctggggcagtcgtgaagctcacttggtttgagagaagggagcccatctctcaggcattacagtcttcactgtctgtcgttgaatactagaaatatttgttttatatttttccccagttttcaagttgtttaaggcaggaggataaatttggtccattttatttcatcattgccagaagtagaaggcagtcgtcacctttttaaaggtgatcatttataaacaggccgaaaaatgcagttctgtaggattaaagggaaatttcagtttgagtttttaaaagtgagacagttaataggttatgtaggtaagagggcactttgcttctgtgcaaacaccacagagtatgctgctgagttgctctgattaaccctaaatttgtgaatttaagcttataaattaaattctctataatgtatttatcaagtgccaggacagagctattatggtttttctatgctttgcattggcttctgcaaattaagtttcatttcccttttgaccacaaagaagatggccctattcaagacttcctcgttcataatgcctcagtttgttatccctccctcttccctcttcttcctgtacttcctgcttctcagtaatgatagttgttcttgtgatctagtagagtggaaagagcgtagtatctgaataagaaaccagacgttgtaattctggagccacatctgactctgtgacttgggatgagacactccagccctcagcatctgcttcatattccttatttatataattggcacggccatctgtgtgtgtgtgtgtgtgtgtatggattcaaatattttaaaaaggatgtgagaactctttggaaaccataatacatgctgtgagtgtaaggtgtttttgaggtcactgtgaatttcctcactgagactcaacctaacaatggaaatgtcttcttgtcccactaaacgctcctgcagaaatacccagcttctgcttggattgagaactgtcactttctgacacttcttccttatattgtattgatacaaggtttcgggcagtttctgctttttgtgatagctgtgctgttggatctcacacttgctctatcaatctgtatctgtaaccaggagacagaaatcacgtagtaatttgaataactaaagttcaatataagaaattattaaccatagtggaattggagtaatgaaggattggctagtaagaagtagaactctaaagaagataggaatagataataagatacagctaggtgtgctggcgcatacctgtagtgccagctactaggaggccaaggtgggagggtcacttgagcctaggagttcaagaccagcctaggcaacatagtgaagcccccaactcaaaaaaaaaaaaaaaaagagagacaagaaagtacccttagggctgagatagagcacttgaggaagacatcgtcccggggctgagatccagatcttgttgcacagagcttgactgtggttcactgaatggcatagaaattgtttttgtgtcatgaggatggtggggaagtctctctggtcctgtgctggtagaacttgctggaaacctatcctctggaatttgccagaaatccgccctctagggtgccaagggaagatgtgggagatatctcactggaggcgctccatttagaaactccccgaggtgtaggaggtggggatgctggagaaagtgctggccagtgggtgctgttgtccacaggcactgtaggagctggccctggagaaggcaggtacactgcaggagtgtgctgagtgagcacagtacaaccaggaacaaaatgctttcttcctgttaaagcgtcacactttgccagttgacaaaggaagaatatttataaggcccacattcgtttcacagaacaagcaaacagggtgtacttggaatggagaggtaatcagtgtataactggtacacctcatggctactcagcttccatacgtcccttttgtgtgaactcctgtgtgtcataacaactgtctctacctagcaagatgcagctaacttggttacaagtgaagaagttatcaccattccccaaaatgaggagacacacagtgccaagagtcaccatactccttgctggctatcttaattactcctcaaattcatcacactcctgtggaatagtctgttatctacacactaaattgtacttcagtaagttaactatgttaatttcccacaacttgtgtagaagatcaaaatgggaaggagagagaagaaaatgactaacacatttaaataagatgcaaagataacaggcaaatagaaaatatgcaaagttgctgcagccttcattttttaaattggtcaccagaccatcattgacatccgtggcttcattttttccactatctattttatgtgtcccctgctctcagccccatcacctgctgttcaggcttcttcacctggtagagggacccaaaccttccttcctcaggggttcaaatcttcagttctcctgcctggttttggttgctgtaattctctattaacctttactagaagccatggaaataataagagatgcaccagaggatcacccgggttccagacctggcctctttgcctagattgggtagaagcaacccggttgccctgtgctaatcataagcaatcacaacagacagtagattaacccaccctttcctgcctgttggtttggtgacataatgggaccaaagtgtccaggtgctcatcccgtgtttaaattcggtggaaccactgctttatagcctggtggaagaatccccatttcctcccttggggaccaagatctccaaaccagtgggcttaaagttgctgagacaggaatgaaatattctgtgcattgtttattagcgagaggagccaccctcactttcaccctttgaattctggacccacatattgtagctgtgagagaggctgcaccatatatgggtttctggtccaaagcatatgctgcattctatgaaacagaattctactcttcaggttattttgttccaactggcgctgtaacttgggtcttttggaagcctttctacttttcagttagggcagccacttctgggtgacaaggaaatgtcaaactcctccttggcagttcttttttgacactgtatcgatagcaggtttgctgcagtttctgtatttttgttacagctggcctgtcagttctcatacttacctgctttccagtatgacttgatgtgtgacatcaggtaaatcctttcctctctgtggacctttgagtctccacggaagagtgggaggtttagacttgatgatccttgggaaactttccccttctaaagcattcttgctccagtgaccctgcagggtgagggtgagctcagttgggatggtgcaggtgaagtgaattgtgaatgctaagggctgtgcacgtagcagggttgaggtatgatgtgttcttctcactatcagtggttgtgatcagcgttcgactttgaacctacctggagctgaagaaagggtaccggccccccggttcatatcatcatgtctctgtttcaggacccctagaggcagtgctcattctgtggaggtgggggaagggacaacattgtggagagaaggctagaaaaggaatgaggaagaggttgacattcccagtctgtgtcttcctgtcccctctttctctgctctccctcacagaggctcacacgcacattctgtctctctgccatccaaacagatgcagctgctctggagtcaaccagacttaacgaggagacaactcttctgctttcttccgtcttcttcctacccaccccctgacctaatgctgtgcttgcctgttacagcaggcctaggaggaaatgcactatgccttccctgtttttgttttgtgtgtgttttgagatgcagacctaaaaatattctgctgtataatcggttatccaatcagccatgcgaataatcactgtgccagagcctataggaaatgaggcaggagcctgaaactcagaagcatgccagctttgccttgcctttttttctttttttttttaaatgtgctcccttgggatctgggtttgagggttgagataggaggatatgctgggtgggtttccatggaggcaggtgcaggacactgatggtatgtctccctggtgggttgaggggaaagaatggttggtgtcacagtaggagttttgcacgtagttgaggcagtttgacttatgcctcttgaacctctattccctcctctgggccttgcttccagatgctgcctccctcccccagcacacctgcctggaatgttctctctcctcctctctgcttttccaagtcctgccgatcccctgaggtctagccctctatgttgtcagcaggaccaaccattcatagcggctgttgtctcacgatactcactgttgatagcagaagcatccagctcccatacctctgtgtagggcttgtgtttccagagtcactgtgtgctctcctctccactgtctcccccaattctctccaaagccctccgatgtcagtgggtggggtggaggtagtgaggggaggcaggaggaggtaggtagtttagtgtttaggctaagagcacaggtcttggagtgacagatttgctacttccatgtaacctctgttaaattctttaccttctaagcctcagtttcctcatctgtgaagcactgaaagtagtattttcagtttcataaaccctagggtttaggggtgttatgacaattaagtgacgcattgcctgtaaagtacttagcataatgactggctcctaggcaatgctcaacaaacatgaggtatgacattgtaattatcaccatcccactttacagctgaggaaaaggaagtgtggggagcatgggcgacttagttcacttgtacagtaattgactacccagcaaggactatgggtggtcaactaacaggattattcagggctggctctaagcccaaccaagtgctagatgctgtactggaacagtgactcaggcactcagctagggacgcagctggggaggtagatatttacatgtgagcctcaaatgtactgggggagatggaatggaggcatgtgtgcagtggaaagagccctggacttggagaccaaacagaagccctgtaaggagagtcacttgtctatcatttccacccttttgtccccagcacccaggccaagcccaggtatgttttaggtgctccatcagtctctgctgaaggaatgaagaggagccccgagccacagctctggctgggcctctgacctggggaaccttgaacagctctttgcatccaccaagtcacagggacctcctcagtacagggaggggttggacctgtagggacccgccagctcttgtggtcccacttggtagactcgacagctcctagcagctgcacagtacccagtgtgtgtctttacctcagttgtgcttttggagaagcagttggagaggtgagggcatgaagggctgggctgacgggcaccaaggtcgcccaggtgctggcagtgctgcagacagcatgtagctgtcctcagatggcccaggtctggctgggctctgcaggaacacttcagctcatgggcagcctggatttgtgctgatgcggagacttccctggcagccacagttgctgctgttgctgctgcctggtcagagttgagggctctgacaacagccaccacagctcgcggtctgtccactgctcagaaacctcacacaagaaaacttctgagactgcctctgaggccctttagatcctgagagccccacactcacactgcagcctccccaaatacagccagaacccacccgcttctggttttccatgtggaccatttattgcacctgcccctcctctaggcatagcactgcactttgggctccacccggtcctgctcagatgttgtgctccttaaggaatctctgctcgttggtcagactgactgttttcctccaagagtgcactagagtgtacttgcttctgtctggcgctttatcatctgtaaggcagggcactacagtagttgacgggctggctttgctgttgcacagactgagattgaaattctggccctgctgctccctagctgtgtgacctcgggcaagtcacttcacctctttgacctcaatatcattattggtgaaatggggttaataactcttaggtcctagggttttgtgggatgatgcacttgtacccctttgcaggcagcccttacccggcagcccccactgccaacgtctctgttgtgttcaagtctgtttcatgagccagtgtaacctccctccatgcagaaacaacgctgtaaagtattagcataacagtaggtccattgggcagaaaccacaccaataaaacgggcacaccccacagtggctctgatttccacacccttcccaaccccgcactcccaagccttgcccagggctttccatggactgagcctcagtagaaagaggttgaattagattttgaattttctcatgcctcctgtctcctggccctcagaaaattaaaatccagcattggaattagtcatggaaaaatccccattttctttcctttcattcctctgtgaagatcataggttcaggttatttctttgaattaattggctaagcctcagtgaaacatgggtaatttacctggcactgtgaggtgctggaaattataaccagtgctcctaaatggatatgcagcaaccaagcaccttcatggtgctgatgggtttgtcctcacagtgctgggagatggctaagcgggtgctgtggctattaccatccttactttagaggactgggactcaagccctcatcttgtggctctaaggtgaatgtcctttccctaacatgtctgaccttctccttcctcggcattgggaccctgggtaggagggccagtagaagatccctcagcagaacttaactggccaccagtccagagtggaaggctgctgcttgtttaaaattttaatccctttctttaagtgtgaagaatactgggcaagtgtaaaagaagggaagacatggtctcttccaaccagaaatgtataaactcgctgcagtgcctaggacacatgcgtctttattgaacaaatagttattgaatgtccgcttggtgcctggccctgtgctaagcattggtaatatggtggcaaaatagaaaagatacctcttaggcttctggccatgggcacagacagttaacaaggataatcaagttacagattgttacaagtgctatgaagaaaatttatgaaaaattaaatagcaatgtaagtaggacacactaaaataatacactaagtatcatgtatcagctctggctgcctccctctctttaaagcagagaagtccaggctctcaggggtgcgacagagccaggacaggtgtctagtgagcggcctttccatgggcagtgtgtatggaggggcctggaggtgtgggagtggccattttagaagggtgttgagattaatttctaccgttagaacccagttctcgtccatctctcttttcttcttctttgtttttgagacagggtcttactctgtccaggctggagtgcagtggtgtgatcatagcttattgcagccttgaattcctgggctcaagtaatcctcctgcctcagcctgcccagtagctaggactacaggcacaccaacacacctggctatatattttttctgtttttgtagagatggggtctcacagtgttgcccagactggtctcaaactcttgcgctcaaaggatttcccctcttggcttcccaaagtgctgggattacaggcgtgagccatgattccccacctggtccctctgttaaagcagaactcacagaagaaagcccaaaggaacaaaatttgtactttcatgatgtgggaacatctcttccagttgagaactctctaaagcatttgcaatcatagatttgtgtaagaacttgatttgcaccctaaattttgggatgtatttattacataagcagatatacctggatttgcataacagaaaggactattttggggtgacttatgacagatctgctatgtgaaagcctccaggaacttttagcatcagttgagacctgggggaaacagagaggaaggagcgtgcaggcactgaggccagaggaagaagggatgtgcctgtcctcagtggctagccatgacactgccagaggagcactgagaagggagcaagaagagcacttcctaagtggcgagaatacccagctgcaaacaaaacctcagacacagcctgaagctctgtgtccttttgtgcagccccttccttaccccattgagtagcagcttggagaagagctttttattacagatgacacctatgaatgcaagtgagggaaaagaaccgactaagccagagctgtgaattcccagaaatcaatatggacgggactggggatgcagctccctcagcttctctctccatggcccctatttgaggctgaatctaggaggccctgtgtttttgatacagtgtctcactctttttctgaggcacttttcaaaatttctgtcccagtgctaagcctgggcgagctccacagagctaacctgtgtgtccagagccagccctggctgtttttccagcttttccttatgccaatagtaagattagggctggggacagtggtggcgagagagtcaagtgtgtgtttctcaaaagttgccttgggagaggagtgaggtgaaaggaatcaaggcaataagtgtaacataggcttaaacatacttgcatgaagaaaacaaaggacttaggtataaacaaatgtttctaagacagggcacaaaaagcaatcatcataaaagtctgatacagtaacttcatcaaaatcaaaacttgtgttcatcaaaagatgctgttaagaaaaagtaagtaagccactaattgggagaaaatatttgcaaaacatctatctgatgaaacatttgtacgcaggacaaataaagcatccatgcaacacaataataaacaagcgagcgatttttttaaatgggcagaaaatttaacagatatttttaatagaagatataatggccaagaggctcataaaaagatgttcaacattattgttttcagaaaaatgcaagttaaaaccataggacatgctactacacacctaccaaagtgactaaaatgaaaaagctaataaaactaatgttggtgaggatgtagaacaactggagactcttaacgcatcatcggaggggctgtacaatggtccagacactttgggtaaactttttttttttttctttttttgagacagagtctcactctgtcacccaggctggagtgcagtgacacgataatctcagctcacggcaacctctatctcctgggttcaggtgaatctcctgcctcagcctcagcagtagctgggatcacaggcgtaagccaccatgcctaactaatttatgtatttttaatagagacagggtttcaccatgttggccaggctgatcttgaactcctgacctcaaatgatatgcccgttaggcagtttcttataaggcctgtgacccagcaattttattcgtaggtatttgcccaagggaaataaaaacatgtccacaaaaatatttatacacaaattattatagcaactttattcataataagaaaaataatgcggccattaaaaagaacaagatcatgccctttgcagggacatggatggagctagaggccattatccttagcaaactaacccaggaacagaaaaccaaatactgcatgttctcacttataagtgggagctaaatgatgagaacacatggacacagagggcaacaacacacactgggtccttttggaggttggagggtagggggcgggagaggatcaggaaaaacaactaatgtgtactaggcttgatacctgggtgatgaaataatctgtacaagtttacctgtaacaaatctgcactcgtacccctgaacttaaaaaaaggtagaaacagcatagatgtccgtcgggagaatggataaacaaattatgatatattcatacaatggaatgctactcagcaagaaaaaggcatgaactgtgatagagggaggtaacataattatgttcaatgaaagaagcctttttttttttttgagacggagtcttgctctgtcacccaggctgcagtgcaatggctcgatctccgctcactgcaagctctctgcctcccgggttcaagccattctcctgcctcagcctcctgcatagctggcactacaggcgctcgccaacacgtttggctaattttttgtatttttactagggacggggtttcaccgtgttaaccaggatggtctggatctgacctcgtgatcagccggtcttggccttccgaagtgctgggattacaggcgtgagccaccgcgcccggccgaaagaagccttaaaagagaaagcgcggtgtatcaaaactcactaaatgccacatctaagatttatgcatttctcaatgtgtatattttactttaaaatactcataaccaaatattaaactctagatggtgatatacatgtgtcagggtttaggggttgagtgtacagaggtctgcaccttcttttgaaatgtatctaaaaataagatagattgatggatgggttgagggatgacaaggtgtgtgataaagctaggaaaatcctagttgcacaatttaggtagtggaattgtgggtattcactgtacaattcttgtagcttctctgtgtatttgaagatgtttgtaatacaggttggaataaatatgctcaagtggaggatgcaagttgcagtagcatgaagggaagataattatgatttatcaccctttgttacacagtgctattttgtttatcttctttaaaattccattaaaacccaccacaggagcctttgcaatgtagctgatttatcaaattcagaagaatacttccagcgtctctgactcatttgatcacctggatacctttgagttaatcttccagccacagctctgattctccccttttgactgtgatcatcctgaaggtgtttccctcaatgctgagtgcttggagccgctttagaattgctttcactctctgttaatttggagaacaaagaatcaataagtagaaggagattgggaaattagtgatcggggacggtgcagagttcataaataatttaaaatatacagagttctggcttttcaacagagattttaataaaagatgaacaaggtcatcttcttccttctgatgaaagttacccatctgtagtgccatggcggatgctgtgtacaagagctgaaatggtggttcctgttaactttgagagctttggacaaaaatgccagatacatccttctagatagcaatatcaggcgagcctttgagtggggaggggaagttataaaccactgtagagaatcacagagtgaaccgaggacagagattggatcaacactccattccttttctgttttcttggaatgaagtcagagcaacattgttttcatttttgtttgcagtgaacctaatttttgaactgatctatgtagtaataagcacaggaaaggaaaagtggaagaaaggagattcagcacattagctagtgaggtcttgcgtgataacgaagacaacacaagcctgagccctcctggctagtgaggttggctctgcctgcctttgcccatcccaccaccttctcccgtgctgagcctttcccagccagacagtgttttgaggggcctttactacccctctccctgccagccccagcctagctgtaatcacccatctggaaggcgtgttttcctggcatttacctcccattatatggcacttcacttgggaagtgctccaacagaggcactctgctgtatcccaagaagccctcaatggcattaccgtaattctgtttatatgacgcacccccaaattcttgagctgtggctgtgacagaatcagtaattggaaatagaatttctgtgatagtcactgagttcccccaagtattaggcctgggagtggacttgtccaggtggtatccgtgggattgtgtaggggcaaacagcgatggataccctgttgatatactgagagatgctaagaaatccaaagcattccagtgacagcgaacattgcattgatagaatagggatgtaagaaggctgattaattgccacatttgataaagggttggagaggggatgaagggggaagaacgtgtgtgtgtgcatgcacgctaaggagtaccacgatagtttgtgtgtttcttccattgttttcagccctggataaagagggcccacctgtctccaaatccctggtagcaggcagagctcagtacagtaggctatattgggtatagggcatctatgaggcaaagaccatatctcactcacatccgggtcttgaggtcctgacattgagagtgtgccctggaaagagcaccgaaggttagtgagggcagctgcgtctgagcactggtgctgatgctggtgggatggactacagagtctgtccccactacctttggaagagctacccaattaaaactgagttggtggaggtattcccactgtgtctcccacaccttctctcgagggttcagatatgtcgcgttctgacttcccagcagcctgcatcatgcctcttgtctccagcacttccctcactgtgttcttgctctactgagtactctcagctgtgtggttgctttaggacccaagcggtgctgttccctcccctaggaagatgtgctcttctgggatttgggagcattcatgacatcgttctctgtaccaccctacaagcatccctttccctaccaggtttgtaatatagtcaacttttagggagggggacatgtgttcatttattgttttattaattattaagtgcccttgctgtgttgggaatagacaaggaatttgccgaaactataatccataaccacccagatttctattagaccttcatgttcatttacagataggacttaattttcttaatcagttaccaattgttgggtgactggttccctgttaatgtatggttgggtgagtgggccagctgggtatacagaggttcagggtattcaatgcagaaaggacctgaagatccatggaggtcatgtggtccaactttctgccttcagaggaggagtgtgtgtggggtgcacatctgagaaaatttacagactaggctggggtggggataaaggagagtcttatctgtaggtctgctgctttgggtttctttagattagcttagaagctggaaactggccaacgaaatgcacagaattgctggaattctggagaagagtttgcaccttactctgtactttctaattaaaagggggacccctcagaggtgattccgattctggactcccactggtgtagtgtggcaggttgagtttgccgccccgggcacatcccctcatggtcagagggatgaagaggagggggtgaatgtcaggttccagaaaagcctgctctaaagtcatttcctggtcatgctgatctggaaatagctgagaactgtgattgagacccaagttttgcccccaaagctagctttatatatggttgtagcagtcaggacctaccagatggaggggacctgtgggatagggataacaggtgccgtgtgcattggcacacaggagggcaagaggggagagagggaaaggctgcgaggggaaatggagagagaaaggaggctcttaggaaaatccctggaggagggaagacttctaacctgagccgaggccctgagccagttcctctgattttttttttaaagtcaaacatggataaagtcacactcaggtgtcactgtgaggggaaaggtggagaaaagtgactgtggtttcagtttcagctttagccaccatcttggcttatgatgttagatcagttcttgcctctctctgagcctcaatttacctatctatattttattagttgaggaatcctgaattgtaacatgaaatggttgtatgtttccaatctctgcttttacctgtgccttgttggatctccctctccccttcctagatgacctcttgggcagacttcccattttcagttaacgaaacgtcagtgttttcatctgatttaagactccttcttgctcctgccttgccactgtagtaagggggcgtgggctgctctccctacctctcagctctgactcctccattagtgagaaggaggcagagggataggagcaagtacctttatgcttaactgggcacaagagatgttttcttcctggttggtttttgcagcttctctagctgaaactggccaggcagcagcacccttggtctgacaggcatctacgtgcagattcctgctgaaattctgtggagacctctccacctcacaggtcccaatagggatttgtggctctggttcagccactctgatccctgctgcacagcctctggttgctagagtaaccttgcatggtggccagttcccctgggtgagatcccagagagagctcaagcctagccaccctgtggggcccacttaacttgcaggaagctcatgggtctctgccaggtcaaaaggtagcatggcgactgtcctagcacaggcgagcggagcagcggttcaggactgtagccaaagctgagagttccctggggtctgaggtgctagtttatccatcttgcaaacgtgattgtcttgatgattctcttaagtccccgtttcttagatctaggaaggggacctccctctagctgttatcctcttccacaaggctgccaacatgctgatgctgtgttccctctcaagcctcactagcctgtggctgtggatgggtggggggtgggggatggtggaaaagggatggttgattataaagggctggcttagtgagccctgggctggggagatgtctagttccatctgttggtttcttagaaaatgaggtattcaggccgggtgtggtgactcatgtctgtaatcccagcactttgggaggccgaggtgggcagatcacctgaggtcaggagttcgagaccagcctggccaacatggtgaaaccccatctctactaaaaatacaaaaattagcccagtgtggtggtaggcatctgtaatcccagctactcaggaggcagaggctgaggtaggagaatcgcttgaacctgggaggcggaggttgtggtggccctgagatcacaccattgcattccagcctgggtgacagagcgagactccatctcaaaaaaaataaataaataaaataaaataaaatgaggtattcagttcttgttttcagcagggagccctgtcttctctaatacctgggtaacaggaagcagtcacccaactctcctttatgtacagaatgaagaattttatcataacccacactactataccttagatacacacataagcacaagtgtcagatgcagaccctgtgccttttatttgtgttgtctttctgtgcttttgctgttctctctgtggttatttgtcaaagtatgagggtaacttcttgtggaaggacagatgttaagtattctttaaggccattgtaagctccccatcttccaaaccttagagagtcaacacacactgttctgagtctgctgtgtgcttacatcagtgctgacagaccaaattatagtactccctaacccaattctaaaggatgaatgccatggcacttaaagtattttgcagaaactattattttaacttattttcacagtggctatgggttttttatagtcttgtaggaactttggttaaatacagagtaaaaactgaagctgctatgggaataatgagggatcaggtccttcaaggtcttaaaaaaaatctctaagtagcagtttcttttgtgcctgcaattctgaattgcagtgtgtccctccagacaaagctgagcgccatatgtgactgtgcctgtttgtgttttcgaaagcctcagcggtcactgccatttcagtgcctgcaagtcttgacaggaagcagtggtaaaagactgtcagaacctgtttgtaaaaatgtttgtgtttgcaaagatttttgctagtattccatgcatatcttagctattaagcaaaaatattataccattcatcttagaagaaggaacaaggctaggtaatcactagcattctcttttctttttctggcagagaactgaaagccaagagcattctatctcatgagcactacaggtctagggcaggggtgagcaaaccttttctgtaaagaattgaatagtaaatattctaggctttgtgggccgtgtggtttctgtcacggctactcaggtctgctgccacagagcaaaagcagccttagacaagaaaacaaacgagcgtggttgtgtggcagtaaagctttatttacgaaaacctggctggtggaccagaggccataatttgccaacccctggtttagtgaaaagaacaagtttcgagttgtcaccgatggttgaatttagcccaagatggtagctttgcttgtctgattaccttcatgccaacccacattttctctggctgacactaaccaggacagaagcctaggctggtcttccattttctcttaagaaagtgatcagtttatgggattgtatgcactttacctcacccacagcagatgttcaggaactgagtatccaacataggataaaatacagaatgaaagcatcctttaacattgagatgaggttgtggtgaaggggaggagttagcagtctgtcactggggtgactttctggggagctctaatcagtcatgtgtttctgctagcagcagcatcccctcctcattcctcatgtggcatacattgcaggtcttcctggcgcagatgctttctttgctcacacacattccctcccttctttcgtttttctccccccagcacacaatgctgctgctgccacacaccatttcaccccatgctggcccacaaagaagacagaggttgatgacatagcatgcaacttcagaaagttcaccactttgagccccgatgtataaatggtagcagttggtactaactctgccagtgcgttcaaaagtcatcataaggacaatgtgatatttatttaaatacatattgcattgctgactgacagtgtatttgcagtcattatccatttctagagacaagttcatggcaagcatggtaaaaagctggacctcaggagggaactgaggacaaagtaagccctgatgactctcactggcctcctgctgcacctgtccttatatttgacctgttaggttggttactttaaaaagccagttacggggaggctcatttaaaaagacataacacctgtgaaagattattttaacgtggaatatatgactggacaattatttgccaatctgatgaagtagggccacaggttttgttttcattattctgtatctactgatcagcatatccacttgcttgcacaggctacacctataatgtccacaacttccagttgcctcttatgtaacaatagaacaagaacataaagatacagaggaaagctgagagcaattctaaatgtctatggttttttctttatctcttgttgttatacatccatatctgattcaacaataaaacatgtaacattgcttatccagtacttccaatggattcagcctggtgttttggaagaaacaactctttcttttgcactcgtatctcattatttgagacagtacttaattaatttaggtagttactaatccaactgacataaacttgggaaccaaccaccaactcctgataagcaaacagctcaactcttggggaacaaaaacgtgtaagctctttagaaattaacaagtcatgagagttcagtatggcttgggcgttagtcattaccttttagccagagggaacaaagaatgccagttcaaatgacaagttggttaaaaggaaatctgacagcttctagagtgttggaaaagaggtcaagacctgagcttctaccctcaatggctcaaacaggcataccttggagatatggttggtttggttccagactaccacaataaagcaaatatttgcagtaaagtgagtcacacaaatgtttttgtttcccggtgcatatgaaagttatgtctatactatactgtagtctgttaagtgtccaatagcattatgtctaaaaaatgcacataccttaattaaaaatactttattactaaaaatgctaatgatcatctgagccttcagcaggtcataatctttttggtggtgaggggctttgccttgatgttgatggctgctgaccgatcacagtagtggttgccgaagaaggctggggtggccgtggcaatttcttaaaacaaggaagtttgccacatgatagattcttcctttcatgaaagatttctctgtagcatgggatgctgtttgaccgcattttacccacagtagaacttctctcaaaattggagtcaatcctctcaaaccctgccactgctttatcaactatgtttatgtgatattctaaaccctctgtttcatttcaacagtgttcaccaggagtagattccatatcaggaaaccactttctttgctcatccataagaagcaacccctcatttattcaagttttatcttgagattgcagcaattcagttctaccttcaatcttcacttctaatacttattctttgctatttccaccatgtctacagttgcttcctctactgaggtcttgaacccctcaaagtcatccatgagggttggaatcaacttcttccaaactcctgttaatgttgaaatgttgactttctttaatgaatcacaaatgttcttaatgacatccagaatggtgaattcctcccagaggttttcaatttactttgcccagatctgtaagaggaattgctatctatgggagctggagacttatgaaatatatttattaaatcataaggcttttcagagtcaaaattactctttgattcatgggctgcagaatggatattagcaggcatgaaaaccttcatctccttgtgcatctccatcagatcaggtgcattgttagtgagcagtaatattttgaaaggagcttttttctgagcagtaggtctcaacagtgggcttgaaatattcagtcagctgtgctataaacagatgtgctgtcactcaggctttgttttccatttatagagcatagagtagattgagcatcattcttaagggccctgggattttcagaatgataaaggagcattggcttcaacttagtcaccagctgcattagcccctaacaagagagtcagcctgtcctttgaagctttgaagccaggcattcccctctctagctagaaaaatcgtcgatgggatctccttacaatagaaggctgttttgtctacatgaaaatctgtttagtgtcaccaccttcatcagtgatcttagatcgtctggagaacttgctgcagcatcctcatcagcacttactgcttcaccttgtacttttatgttatggagatggctgcttttcttaaaacttatgaactaagccctgctagcttccaactttctctgcagcttcttcagcctttatagaatttaagagagttagggccttgctctggattagactttggcacaagagaatgggctggtttgatcttctgtccagacccttaaaacattttctgtatcagcaataagggtgtttcactttcttatcatcatttgttcattggagtaacacttctaatttccttcaagaacttttgctttgcattcacaacttggctaatggtttggtacgaaaggcctggctttcagcctgtctctgctttgaacatgcctccctcactaagcttaatcatttctagcttgtgatttaaagtgagacatatgagtcttcctttcacttgaatactgagaggctgttgtagggttattaattggtctaatttcaatgttattgcgtctcagggaatatggaagcccaaggacagagagagagagatggagaacagctggttggtggagcagtcagaacacacacatttatcaattttgttcacagtcttctatgggcgcagtttgtgatgtctccaaacaattacaatagtaacatcgaggataagtgatcatagatcaccgtaccagatacgataaaaatgaaacagtttgaaatatcacaagaattaccaaaatgtgacacagagacacaaagtgagcacttaactgctggaaaaatggtaccaatagacccgcttgttgcagcattgccacggatgttcagtttacaaaaaattgcattgtctgtgaagctcaataaagtgtgaagtacaataaaatgagatattcctgtataataataactattgtgtgcatactatgtgctgaccattgcacattatctcatgtactccttttaaccgtgctttcactgattagaaaaccaaggcaagggctgggtgtggtggctcacgcctgtgatcccaacactttgggaggctaaggtgggcagattgctttgagctcaggagttcaagaccagcctaggcaatgtggcgtaaccacatttcttaaaaaaatattagcctgtgtggtggcatgtacttacggtcccggctgctcgggaggcggaggttgtaatgagctgagattgcaccattacactccaccctggggaacagagactctgtcttaaaaaacaaaaacaaaaacaaaaaggctgagttagagaagagcaaagtgcttgcccaaggttatatagcttagaccgagtggggattttgaactcagactgcttgactccatatttactgtgctctccagcttagggcaaactggtagccgggaagtcatccagctcgatttcagcttgcctcctcctgatttcctggatgtctggtttttaaaaagttaatagcaaactagtatagtgttggctccacagacgtgcttttcagaacccacctatttgccctttactggtaatcaggggtaatcctgtcccatatctgtaccctgatatgtctgggttgtaaaaagtgtaagactggatggtacagttaagctatttgttctggatttgggttttttaagtttggcatttgagcagaatcacaagttgtagaaagtagtaatttccagacatttgagatctgattcaccaacattactgtaattaaagaaaaacctatatttgtttgctccgttttgtctcactaggatgttttataaataataaacctagacatttagaaaatagcatctattcagctggttaagctttcgtggcccttcatgttcagatgtctcaaggtgatatgagtgtgcctcaatttatagggagtgactatggatggtgaactatattgacatataaaggcagctttaaaatacagactacagaaatcaagtggcttgacaattcccttagaacatatgtttatgaagtatagagctcaaatgtaatgatttcagttggttacagagtattaatgaattttgaattgaggcaattgtgatcaagcttgttgccttttctaacatgaatcattattaaaatgatgattgtcctccatagttatgaaagcattaaaaaagcatctacctatgcctgaattaacgggacagatgtggttttcagctttcacctggccaacaggacttccatggttgtgatttcaaggtgcttgtttatgtatatggttttgctggtattttctgagtcttcaataccatttcttgtaatagggtgtgaatgggtgtgtgtgtgcttgctagtatgtccccttggtccttagcattgtgggaatgtaaagtgaagctgagtaggatgtctcaatgtcctagaatcctccagcctttggtttttaagaggtacccctgtgcgagagctcgtggaggcccttctgtgtaacattcacaacacaaccaccacattcagtgacagcaggtgctgagtgcaaaccgtgtgccaggcatttcccaccatcagtatcaatcctcaattccagaaagttggtactgttgtgaccattgagaggatgaggagaccgttgcttggagactttcagtgccttgcctagggccacacgatggaaaagagcagaaccaggaattggactgctcttcaccatcctcatggctgcctggagggcaggcagtcttgggcttccttaaaagatttttgttttgggagggctcttcactgtctcaagaaagctgagggaagaattcgtctcatttagtggatgaggatacaaaaacatatgttaaaaattacagcctcgggctctgtggaccctgttcaggtgccagagggcttttctcctatattgagcacctttgccacaaagaagctagaggaggaaccctcccccgatttcaccttgtgagttacaggtgtctgacagccctgttcttagctaagaagtgtgtgtgcacctgactgcaaacagccgccatgcctgctggaggacacatgtgacacacagtttctggggaccctcctgggcctacagactgcagtctcgggtgggtacccatggcccaggacttcacattcctcacactgccctgccctgcttctcttctgtctgacctgatgccccaggcttagggtggggaggggatgctggtgggtgggttgtcattttcctgtcccagtcaggtattttgtattgtttctcaatgagccatttcccatctggatttgggggggatcagggaagatgggtgggttatgagttagtttgctgggcatcttcccttttttctctgtccagctcccaggtgtttgaggctttttcctgcctccaggtgctccaaatgtgggggctgccctttctctatctgggtttcagcctctccagctcctgcaagacagtgctgttggatctctgtagtgcctcttggtttggccactctgggatttgtgagtcatagtcttcagtttggtgctttttcctactccatcctgccttctgctattcatgccccattgcaagaacaggcattcttccttcccgtataaacttgcaacctggttccacccattctcctctcttcttctccagatagtcgtagagatcgctgcctcccaaaatagccccatttgattccttaggacaggcaggaaactcgctgcccgaccctgcctgagtctccgtttccttagctggagagactgtccttgctctagaaaccaaccaccggaaattcacctccatccctatcacttcctggggtagttctttctgaccattgggtttgcttcttgggtgtctggctctgcatacagttagaagctctttaaataccttttaacttcagggtttttgtggatgtgtatatggtggagggagagagtgtataccagtgagcatgagagcaagagttactatttatcacaactggtgtccaggggtggctaaagattatcgacttctagagttgtgtttttcaactttttttttaaatcttagtgagcagtaataaatacattgtaactctcaagcacacataaatgtcatctgaaacacgtttgaaaaatatatgcgatttatttgttttttgagatggagtcttgtgctgtcacccagggtgcagtgcagtggtgcaatctcggctcactgcaaccacggcctcctgggttcaaacaattctcctgcctcagcctcctgagtagttgggactacaggtgtgcgccaccacgcccggctaatttttttgtatttttagtagagaaggggtttcaccctgttggccaagctggtctcaaactcctgacctcaagcagtccggcctgccttggcccccacgaagtgctgggattacaggcattagccactgcgcctggccgaaaactatatactcttatattctgatatttcctgtgcaatgtgatattttccatacaattttatttcatttttcaaaaattgctggatacaaagcactgaattaatttcatatgtattttatttaaacaatcctctctcctccattacagtatacatttcatggagacaggaattccatgttattctacttcctataattgatgcttaatacctattgtcaactgattcttttctctgtgcagatcctctggagaaatattttgttctgtgccaagaaacagtttcattcaacggttaaggtgacttgtgtcactgatctgatttccttcttttacattaactatcaaaaatctcagacttattaataaagacatgtcttcacaggatacatctttacaatggtcttatttttattttattttcctcgctctttttttttcattttaccttattcttctgtcctaaatatttaaagtttcagctgattttaaagtaaaagatgctcaatgggaaaagctcacacaaatcagagctacctaaaagtagagttggaaagtcccaaggatctttttctctgaggcaagcctctttgcttctgggtgcttgccctgcagactggcttatgaagaggtcaccatcttttcagattccaggggcctgtaatgttcataccactgcagtattcgtattacacactgtaataatctggaataataagatcgtaggcactctttcttgccctcacatgtggatctgccttctccttttaaacagccatgtaacgttccctttctcacctactttgaatttttatattcttgctgctctaaggttttttttttggagcaaggaaagcaatttaaaacataaaatttactttcaaaagaagagtagagataattaaccagcccttgccacctaactcaatataatcccctagtaactcctcttggagccaccaggttccctgggagtggaattgcctgtggaaaggcctgtgtgggttctgagcttgggaaatggtgacggagccctctctctagcctctgggaggtgtcaaataatggatgagagtgaccttggactggcaagagcaggtcagtgcaagtgacatgggtttcttagatactcctcagctcagtgtgggtctcccgagactcagttctgcctgctgacttgctcattcatttccattgcagggctgcagttgggtcatgcctggttttttggcctcccaatgtctcttaattaacttaatattacttggtaatactaaagcaatgatgaattatgtgcatggagtcattaatcttctgtgtaaatatctcaaacgctgtgtcttaattatagactccatacttaaaatattttaaagcttctattcatatatttacttagaaaggtatgatccgtgtttctatggtgtcggcacactcagtgggaaaatggtgtccatacattggagacgttcgtatgaaagagtagtttctctgatgagatgagtgctgcctgttctccactgacccacagacattcttagccttagcaatgaagggagttggggtaagattgggcctggggatctgggccctctttcaccttctgactgttctgtctatagcaaaccatagagagtttttctggacagtccaggaaggtgtaagagcagctttagatgaggcagctgtctccctcatagcagagccagccctaagccagggcagggcctcctccgggaagaattgtgcacctccttcagggtcatcagtgagttaggtacattgtgagtatactaacttagtatttagcagttactctgcaccgggcaccatgctgttcctgggtggtggctggtggctggggcagggcagtgagtgttacatagactagacacagcagtaatagccaatgttccatgagaacttgccatggggtttgccacacgaagacactggctcttgtttacataggctgcctcatttgcacttaccaacaaacctgggtagcttctggtgtctgtattctcattttacagtgaagaagctgcagtgaggaggggtaaagtcacttgcccaagtctgcatagctaataagtggcagagccagaacctgagcccactgtccaaggtgaaggtgcttcctagcatggtggccacctctaggtaggagctcagctgtgccacccactgggacagatacactcccaacagctgtgattgggtagggtggctccacctcccagatgggtcctcggtttgctgagtgttggttggataacttgactaactttctcagcagtcctttgagcagctgaggtcatacttagatgtgacttacgtgagacaacagaggagtccaggtgagagctggcaggcatgggaccagggtggagttgtagttttccccaccaggtgggtggagccaggtctcttcaaaccagagggcacaattgctgtttgtattgttcacgttgactgtagcaaaaataactcagtgcctgtgaacctcatctgtgaaatgtaaataaccccttctctgcctatttgttttttgagacggagtcttgctctgttgtgtaggccagagttcaagaccagcctgaccaacatggtgaaaccctgtctctactaaaaatacaaaaattctccacctatcttactctgtagcttgggaaatcaccgagataagaggttggaaagtgataactgtccaggcatgcaagtagtatgtttataggaacatgactgagcaacagggaaatgagatttctctctctctctctttttttttttttggagatggagtctcgctctgtcaaccaggctagagtgcagtggcacaatctcggctcactgcaacttccgcctcctgggttcaagtgattctcctgtgtcagcctcctgagtagatgggactacaggtgcatgccaccatgcccagctaattttttgtatttttagtagagatggggtttcaccatgttagctaggatggcctccatctcctgacctcatgatccacccacctcagcctcccaaagtgctgggattacaggtgtgagccaccgcgcccggctgagatttcatttttaactcagacgtcaatcaacgtagccatatacagatttgaaaagcttttctttatctctgttaatggagaaaaagaatgactgctttcttgtcaaaatgaaagtgttcagttttaaacttaaccagttcctgccattttgaaatgttcactcatttcttacttttttttttttttttttttttgacacagagtctcgctctcacccaggttggagtgcagcagtgctatctcggctcactgcaacctctgcctcccgggttcaaacaattctcatgcctcagcctcccaagtagctgggattacagactcgtgccaccatactcagctaatttttgtatttttagtagagataggtttcaccgtgtttggccaggctggtcttgaactcatgatctcaggtgatccacctgcttcggcctcccaaagtgctgggtttacagccgtgagccactgtgcccagccaccatttcttactttttggcaaaggaagtagacatattggagggttgacctgaactccatagattcccagggagacagtgtatgactttgatcagcccatgtagggcacattcccattgccatccaattttacctgagccattgggatgggatgcaaaggcctgacatggtttagaaataaagcataactctgcagtgccaactaggatggggtaaatgggattctggcctgggtgacaactaagacaagattgctggcccaggtgctgagaaatgtagcccgagataatggttctgtttctccttttgtgtagagatgggatcttggaatctagtgaggtgaagtacccagctctctgctttggtactgtgaggggattctgcagaggtagatggaatatggtttttgtcctcaaggcactgacaagctgcaaatgatacgagacagtgtatcaataggttcaccttcccaacccttctctgctcttgtacttggttggtgctcaattgtttgttgatatgatttaccttcatgatgacatgtcaaaacatgtgatataatttttagctctggatggcaaacagtttcaacttggatgccaactctacccagtgggtgctgcctgaatggcaaaacatgtgacactgcctcagggtgccaggagaaagagtgccgtctgatgaccagtgggaatgtctgttatggccgggggatgggggttagaagcagcaggcatgtggtggtcattggttcatcctaagtacattaggctttcaaaaggggaaaaatgatgctcagaggaaatgaaactccttagtcttcccttaaagggtgaagcaggatttagacaaacaggagtgctttcagtcttggaaaagagcagacgtgaagaccgtaccttccagtgagtatgcagatatgtgggaggctgtgggagctgagggactggaggcacgtggaggaggaaggggcatcaggaggggcaggggcactgtcctcgctggacccatgacagacgtcagttggttgttggtaggttgagtgtagacagattgcagaggtcctcggggatgccagatggaggaatttagatgtgatgcagtcctgtgcttctcaagaagccttcccagatgctccggacacgattagctgctccatcctctccgccccaaaggagactcctagtactctgcttgagcttggattcttgtctgctgtcctgaaatgtttatatattatctgccatcctccttgaggatatgaacagtgttgtagccatctttgaatccccagtgctcaggatcatgcctggtatggagcagataaccagtgagtggtgttgaattgagctgaaatagggtccctgaactgccaggcgagatgggatggaagtgggcagtgccttagaggtgaagctgggtgcggaagtgggaggctgccaagcatagaatgtaccctctgccaagggagctcagagtccatgtccctgggatgcacgggatgggaaggaaggcaagtctgaagcgtcaagtttacaagagtgtgcacagcacaggaaaccagttgaaattgaagatggcaacagagaacggaaaagattgaaggagggaatttggaaagctgagcctagatgaattcccagaggcagtgacttatagggctcggaggccctgtgtatagggaaccaccgctgaacctgtgggtcagagggagtcatcaaagatgttgtctcttgagaaatgaggagctactgaagattctctctctcagatacctcaacattttagagacatggagtgatcctacagcccattgtattaatatttaggtgggactccttcatttgcaggtgacaaaaactgaacccaaactagcttaatttggtggcttttataactgaaaagcccaaatggggaggggaggggagagaagggaatttttgacttcaggctcaacttgatccagggatgcatacagtggcctcagggccaggtgcctgcttctgagtttcgctggctggctggctgactggcacactttctcttcattttttggcttggcttcccttggtgggtgttagctcttcatctctatgtccccctggcaactctaggcttgtggtctctcagggctgaatccagccaacaaaagaacttcttacctagttaccccagggaaagctcccagacttgctctcttcggacccggttggtgtgggttggagcttatgcctatccccgaaccaataaccttggctgcatgccaactcttattgcccctgggatgagagcaggaatggagcagttcctgggggaaggtcagggtgctgttacccttggagttttgctgggtggcaaggccatcattactgccccatccaggctaactgttgtagtcttggcagcaaagcagaagctgcctttgctctgccggtgaggaggagagctccctgccagcctctgccgccccaggcatgctgctgccctcttcccacagaccgcatgtccttgaagctgggctccgtagagtggtccaccaggtcaccctgctggccacctccatttgtcatccctgggcacattctagacagcatcttgggccggggccttgccccacctgggtgattgtggggtcactgaactgtcgtgggatctcaggagaaacctcttcagagagtctgcatccacagggagaagtgtattcacacttcccacaggctggggagctgtctcacctatccttagtcagggcgagccttccattgtgaggtgctttatagtttgcacagctctatccaacttgttacttaatctggcttttaccataacactggtgggcaaggcaaagcaagaatgattgtccctgttttatggatgaaagaactgggaatcaggaggggtaaatgtctcaaacggggcaacacagctgtcgagactagcattagacttgggggacacaaatgtcacataaaatgtgtacttttaaaccgaaggtgaagaaagatgagggcaaacagactactgtagccagtttcttcatgtaaatgtggtgttaaattacccattgttgttcctctaagtgcatacttcattaatacctgcaggggaaaaaatgacctctatttacagccaagcatctctgagccgacgcctgcctgcccaccagcctcctgtggtttacccaccaaaattttactagaggttgaatcggcttgtagaagctgtgtgatagcgctgcggctcccctgggtcacctcctgaaacgtgtagggtcgtgagtgggagggtgtctcagcaagcccagcctgaatgtgcacgatggcctcaatcgacccagccacttgaaaaagcagccgctgctctcggttcttgctgttcttgcttggtcagctcttccctggggtctctgcgccctcacagagcctccctgtgaagcctgtccttggagactttgctcaccaggtcatagacaattgttgttttccaactggaagagatcatctgatttagtctgttcatttcacacatgagaaacgaagaccaaaccccgtaccgtggcacctggggccctttgtgtctgccctccactgtgtccctgcagcctgtcccttcccttcccacctgtcctcataccttgtgcttcagccatgtggactgctcttcgccctgaacagcttgccttcgtgcgggctcctcttctggatggaacaccctgcctggagcagggagggccatgatgagggagcaggtggctgtgctgagcctttccctgacatgcactcatggatgttttcctggaacagagcaaaaccagggggcgctggtatcatagaacttcttagtgggaagggacatttaataatagttggtcaaaacctctcattttgcccatttatttattcatttataaatgcggaatatctatttttgtgacaggccttgggaatgcaatgatgcatgaaatagaaatgatctctggctttaaaggaatgataatttattaggggagacaaatattaaagaggcaatttttaaaaattgacaaatagctacataattagggtgtacaacatgatgttttgatatatgcatacactgcggaatggctaaattaaactaattaacatatctattacctcacatgcttatttttttgtggtgagaaaatttaaaatgcagtcttagcaattttcaagtatgcaatacattgttgtaactatagccactatgttgtacaatagatctcctgaacttactctttctagcttttgtatactttgaaattttttatatgttgatcaacatctccccaatcttcctgacccccacctctggtaatcatcattcttctctctgcttctgtgcgttcagtgtttttagactcctcatataagtgagatcatgcagtatttgcctttctgtgcctggcttatttagcttagcatagtgtcctctaggttcacccatgttattgcaaatgacaggatttccttctttttaaaggctaaatagtatttcattgtgtatctataccacattttctttacccattcatccattgatgaacatggaggttaattccatgtcttagctattgtgaataatgttatgaagaacatgggcgtggcagacatttctttgacatactgatttcatttcctttgtatatacattcccagaagtgggatcactgcattatatggtagttccactcttaattttttgaggaccctctgtaactgttttccatagtggcagtactaatttacactcctatcaacagtgtacaaagcttccctcttctccatatctttgccaacacttatcacttgtctttttgacaatagccattccaatgaatgtgaggtgatggctcattgtggttttaatttatatttccttgatgattagtgatgttgagcactttttcatgtatcttttggctatttgtatgtcttcttttgagaaatgtccgttcaggtcctttgcccattttaaagtcagattgttttcttgctattgagttgtttgagttccttatctatttttgatattaaccctttatcagatgaatggtttaaaaatattttctcccatttcataggttgtctctttattctggtggttttccctttgttgtgtgtaagcgttttagttagatgccatcccatatgtttattttggcttatgttgcctgtgcttacagactcatatctcaaaaatctttgccctgtctaatgtcaagaagcttttactctgtttttctgtagtactttcactgttttaggtcttaatgtttaagtctttgatccattttgagctgatttttgtatatggggtgagagaagggtctgatttcattcctctgcatgtggatgtccagttttaccgtaccccttattgaagagactgtcctttccccactctgtattcttggcacctctgtcaaagatcagttgaccataaatgcctggatttatttcttggctttctgttaaagaggtaattttttaaaatttaaatttctattgtgaattacggctgtggaaaagtataatgggctttgacagcatgtaacagcaggctctaattttgtctgggaggtcagtaaaggttttgctgagaaagtgtcatttaagctgagccttgaagggcaagcagagtgtagtctgatgagaaagagggttggggagactgttttagaaagaagggaacaggatgtggaatggttccactgtggcccagggccacagcatgaatcagtggctgagttgggactagcagaaatcagatctatggctccaagccctgtgttccttgcattcaaccccgctgggtgcgtttttggccctgtatcacagagctctatgcttattcatctaaagagggaagttcatgtccatggggcaggcacccttggtggataaagcagggacggcaaagacatggaggtgggaaggtggctggcatgtgtgggagggagcaggttggcccatgacttggagtgaagcactctgacagaggagaggtgggaaagttggaagaggaatctaggcaaggatgaaaggatgagatccttaaccaagaagctgcaggttgggatagcaggggaggccaggtgagatattgagatcagctgttgtcctagcagtttgactctttatttcaggcttgttctaaaaagggtttatggtaacttagatacatacatatgtatcctgttttttgtttttgttttttaaatacatatgctaggatcataaaacctcatgctgtaatagcctctacatgtctagatctatagctttattcctttcggtttttttcttctctgctttctagtagcacctatgagtgccttacatatgtctgatgctacagttaaagacacaaagagagggcccctttcaatagagaatccaggactgcagggcacagaaggaatggaaggtgtcagtgggagagggggacttctggcagagtataagccagaaagccttcccaaagccttggggcacatgggtggaagagcaaaacagagaagtgactcttacctggctgcatcaagcctctgttcaccttttgacagcagcttgggagctctgtgaggacagggttctggctttgctgagaaggatgcaggtgctcggggatagatggatagacagatggacaagtattcatgccacagcactaataagaggattcttaaaataggaaaggaaagtaccaagtctaatgaaggattttggcatctcccacctcctgctagttgacagtttctgtttctcaagattctgtacagcattaactggtttggagattattaactagtttagagactactgatttagagcctctcctgttggtgaaatttcactgtttaaagaagacacatcaggttttagaattagatttcagcctttgtttctctagtggcttgagttctcgtgggcggggtagggggagggagtggggggacatccgtccatatacagggtagtttctggacgttgttttctaaaggaaggtttgactggccctgcctactcaggatctcctgccagggagaagaaatccctgctggtgggtgactgagtgccacaggtgtgactctgcctggcacacagagggggatgagatgcaagaatcatttactctttccctgtacctggggaagggctgttaaggtacagctcctgctcaggccttttataccagggacgcctcatttcatgtatggttctagagggttcctgctggccccttcttctgccatcccagtctttcatccttgacagtgcttcttcctctgtgcttccatcagtcgtggccacagacctcagtgtcctctatgtgtcacctctcacctagctgttttggctgggcccacagtcccaccttgcctgttaggaacctgactttcttgttggcttccttttcaaattgttaattcaacattcttttctcaaatgaacaatccttttgtaaggcgaataattatcccacttctcctgaacgacgttttgcaagatttaaaaataatacttcatttgttgaatgtggagggatacctgtttcataggattcctttttagtggcaggattgaggaccgggatgacattggcttctagacaaactggtctgcctgctctccaggctgtgattgttcagttggcatcatggtagaatctctgtaataaagaattgcattaaaggaagtttgtatttcttatgaagaatcccatcaaataattcactaaggattttggaaagagaaaccaaattctttaaaaagcagggagagggcaaaggagaaggaaaaagaacgttaaacagttcatttatactaatggcccttgtgttattgtggcaaaatttcttctaaataaaagtcagagaggaaaaacaagctttgtttgggaggtgtactgtctgttctctgccttgtttttctgctctgaagtatagtgtgctgtcttgacgtaggtatgtaactgctatgaatattgatggcagcaaaagcttttttttttctctctggcctagtaaataaagcagcaaggataaaaagggatgaattgtaaaatcagtgtgctgtttttagcttctctggttcccttagaactcttaagtctcaaacatattgacaatctgcctttggtggtcagggtctgatgtgagcactgtgggttggcattttcagggatttttgcctctggttgaagtaacagagttcctttttctttgagctttcagagttaatgttatggcttcattgaggccttcctgtatctttccctctatccagtggcaatgctggtccctgctcctcagaataccgcagtggcctgagtgtgtgatcgttcctccagcagccacgcctcgcatgcctcccgagcaagcactcctctgggggatatggcagggaatggggcaacggggaatctggacagtaagcaaggaagggcatcctcgtagctctgagcgtggcatttcatgtagctgtatgaagggcatgggggaagaaggcatgggggcatgggatgagcctggctaagaacaggactggtctgaagtctagagggggcatgagtatagaggttggagatgagctaggctttctaaattaaattataaacacactgatgctggctaactctcaaaacacacacacacacacacacacacacacacacacaattcgttcactagactgttataatggtgttctgaggagcaaagggagctttggagggcaagtgtttagaaatgacaggaaccacaacagccctgtccttggaaggaagccctgttatatgaccagtgaagagtggagaatgggggcaaagactgggatgcatggccatggctgcatggtggtcaagagggaggatacctgtggcacgacaaagggatgttctgcctggcacggccggtgacagaggggaagcgattctggcagcagacagccggagcccaggggcagcacaggcaaggcttccatttaaatgcacaagggtgttggggatactgcaagcaaacatttaataggtgacggttcctcaaagggtcaggcttatgggaatcatcctaaaatttgtgtttttaaaaatgtttctgagtataaagtgttctcttcagaaacataaaatttattttcaaatacacatttgcctattgcataaaaatatataatagtgataatatatagcaaagtgctttttttccccctggaatccgttgtgaaaaggcaggggtggcctgatgggagggctgaagatagagaatcgctcttgtcagttactacttttgtgactcttgagaaattctctgtgtgtacattcaaaacttccccctccacacacctcccccccacaccaacagactaaatgacaggtaccatagtggggacatttttctggctcctggtacagtgcctgtcatttagaagtggtgttcacgtgtttcctgagcctattttattttgacctcttgccctaggcattttaatgagtgaatttcatgacctccatttctctaaggtattggtaacttttcgggtcccactgatattagtataggactctatagttcatattggaaagttacagttgctgatgatactttgttatttaagtagcttcatgccgaggaatgcctcttgcaaagttaattacacacatctctgttggtccatgtttctattgaaactgaagctgtataaagaaaacatttgtaaaagaggaaggagtcaaagtttttagacttgctgattggtatgttttccacagctcatggagttgcatgggttggaactggaaaggttctacgagtcatttagcccgtgagcagcacctgtgaggtctgtggcagtcagatgggcatggctgctgggatggatactagaggaaaggtcagaggctctgcctaggtttcctgggaaagtgcatgatgacctgtcacaagttcagccgggagaggcggcatgccaataagcaggcagggtgtttgccatcctgaatttacttcccttattgtgtggatgcaaaaacttatatccagaggaggagaaggacttgtccaaggttaccttgctactcagtgacaaagctgactgtgacttcgaactcagacataaacccaagaggaagagagggtcaaaacagatgcatcttcattttttccagaggatgaatttcttctgttcaaagacaccattggaatctttgttgtacccttgtgcttttctgggcctgatttggcaacctcaggaggaaagcatgctgcgttttgcaaatgtgtgcaaataacaaacatgcctgttatgtcctaggcagactcatcacacgcattggggcagttggcaaaatgcagtcatgcagcctggaacgaaaagtgttgcacacgtagttgcttatgagaaattcagtgttagaatgtaaatgccttcctggcccaggggcagtgtaattgttccatttctcataatgaaactttgtttggagggaaatgcttatatgtctaaggtgttgattctaatctctgttcctttttctgtctcctcttcctcccctgcccctgcttttttggtatgtttctttgtttttcttcacaggaaaaagtagaatatgccttcctgattatttttacagtcgagacatttttgaagattatagcgtatggattattgctacatcctaatgcttatgttaggaatggatggaatttactggattttgttatagtaatagtagggtaagtctcttttactttggggaaatgttgatttggaaaatgggaggtggaggttggggggggtggtggtaacaaaacagtctttttagggaatgtggttgctcttttatgccagctgttgcaccagaacctctcaggagttcttttaaggctggtgatgctgctgtcagtctctgggcagatactagtttgaaattctctcgttgttactcccgtttttagtaacatgttatagaagggagtctgaactcctaatatgagaggctttacctaacacggtcttggatctccagaaatagaccaaccctgttggtgattagagtcaaatgagtagagcttttaatacttagtgccaatgttaagttaaaaaaagtaaaaagtaataaaaccttcatagcagtaaggtactctgctatttaacatcccttgagcaaagctattaattttctttttttttttttttttttttgctgacttgcgggagaaactctggcatactactgttccattttaaataatgaaacaagtgtctggataatgtcacatatctggcataaaatgaaataagctagaaaatgcagagaagcaggtgttccaccaaaatcctgttgcaggaagaagacatcagtagttttagtgaaaggagaatgttaaaataaaaaatagtggcctgtgttattttagtccttccacacctggaaatgttgccaggaagagaaaaatgaatccatgttacaggaatgctgggtctttggaccaaatacccatgtaggaagataagatatatcctttttcccagtcttagttatgctagctgtaaagtgagttgctcctcaaattatgtttctgtaaatagcctctctgttttcatcttcatgacttcagtgaactgccttttgcagttgagcaaggtgatttttcttgtggattatccttttatcatgaatcttttgccttttcattggagactaattctgctgggtattgggagagtggaattggttgtgggccttcctaggtcctttcaacctaggaagttaatatgagatcctaattgcccagtgggacaattagacttgtgggaaacaagttagcttttcaaaccgcccccgccgccaatacattgtcatttaaggcatcattgcaaaagaagtgtaccaaaatgaacaggtagcagatatgtgccgtactttcctgtatttggtggactctgtcgaggaatggcaagccgaagccttgcaggtatgttggttctgggataatctggctgtgcctcttctgccactggactttttgttcagctaggaatggagatgcttagccccatttcttgcgtcaccgtgctatgatcacctcatatttctgcctggagacatttttcacactacagcacagcacaaggacagggaaccaagtggagcatggtggtcttattgagttaaggagacagacaagagtttggggaggcagaataggggaggggagggagctatttagagaaagagcttcataaatatgccttagagtactcttcagttttggctgagggctaagctacgcctacacggagttgtgagtccatgaggccaggaaagaccactactagggaaaagagaaagatcagggagctgtaaaatgaataataaccagggctcacaaaggactggaaggcattcaaattctgactaattagggtggaaagacctcattgaacaccctggactgtcagtagagaccccacagggccactggtagtagtgctaaactggctctagagcaggggctggcaaactgtggccaatgggctaagtcctagcccatctagcctgccacctatttttataaataaagttttattgtaacatggccacactcatttgtttacatagttcagtttgagtagtttaggtctacaaaacctaaaatatttaaatatttactatttggccttttacagaaaaagtttgccaattgctgctctagagtacagagactacctgaaatccttgcttacaatgtttgaaaagaagtctgaaaagaagcaaactaggctgggcatggtggctcatgcctataatcccagcactttgggaggccgaggtgggtggatcacctgaggtcgggagttcaagaccagcatggccaacatggtgaaaccccctgtctactaaaaatgcaaatattatctgggtgtggtggcgcatgcctgtaatcccggctacatgggaggctgaggcaagagaatcgcttgaacctgggaggcaggggttgcagtgagccaaaaccatgccactgcactccaacctgggtgacagagtgagactccatttcaaaaaaaaaagcaaactgatatgctaactgaactgcctgccagaacataactcaacattctttaaaggaagacaacaaaatccagacactgaacatatgaagaaatgtgacccataaccaggaggaaactccgtcagtagaaacagatcctgaaatgacagagatgatggaattagagaaggacttcacaaagctttaaaaactgctgttataaatttatggacttaaagggatacctgattatagtaaggaaagatgggacaatataaaaaaaaacaaatggaactttaagagatgaaaaatatatccaaaatgaaaaattctctggtttggcttaacctcagcttaaacactatagaaggaaaaaatatcagggaatttgaacatatggcaataacatgaagaataatgattgaggagaaaatgaatactgcctctgtggcctgtgggggaataacaagtggtctaacatatatatatatttggagcctcagaaggagaggagagaaagaggagacagaaaaaaaattttgaagaaacagctccagattttccaaatgtgatgaaaaatgaaactcacaagaagctcagcaaagcctgagcaaaataaacatgaaaaaagccacatcaaggcacatcataattgtaatcaaattgttaaaaaccaaagataaggagaaaaccttaaaacagagaaaagaaaatctcagactatttgtcaacaactatgcaagccagaagacaatagagagacatctttaaagtactggggaaaaatgtcaacctaggattctcactcagtaaaatatctttcagagttaaagtcaaaatcaaaattttttcagacattctagagtttcagaattcatgactaatagacctgtacctcaatcagtgttaaagacagttcctcagggctgaaggaaaatgacacgaggtagaaaagtggatctacacagaaagaaatgaagagtaccagaaagtggctctacacaaaaaagaatgaagagtaccagaaagggtaaatacgtgggtacatatacagatatttctcccctcgtttaaaaatttctttaaaggtaattatttaaagcaaaaataataacagtgtattgtggtgtctatagcttctatagaaataaagtacatgacaatggtagcatgaagaataggaacagggaaatagccatatggtcttgtgatgtacttatacagtagttggaatgattaaatattatctgaagatagactgtgatacctttaagatgtatattgtaaaccctagagtatggattggtgagctacaacctgtagaccaaatctagtttgagcctttttttcccccaccattgacaaagtattttatttactgcctactttggcaaataaagcttcattgtaattcagccacattcagtcatgcctatggctatttggtattataatggcaaagttgggtagttgtgacaaaccctatggcctgcagattctaaaatatttactattcggcactttatagaaaatgtttactgacacttgccttagagaagccactaaaaaagaaaatcccaggtctatctaataagcctattgtagagattaaatggaatttaaaaaaaacccctaaatccaaaacaggcaaggaagaagaaaaaaggaacaaaggacaggacaaatagaaaacaaacggcaagttgctagatttaaacctaggtaaatccttattaaaatcattatcatgaagaaaggataatggcctttctttgtgtccatgtgttctcatcatttagctcctacttataagtgagaacgtgtggtatttggttttttgttcctgcgttagtttgctaaggataatggcctccagctccatccacgtgcccacaaaagaaatgatcttgtccttttttatgactgcatagtattccttggtgtatgtgtatcacattttctttatccaatctgtattgatgggcatgtaggttgattccatgtctttgctattgtgaatagtgccacagtgaacattaacatgcatgtgtctttatggtagaatggtttatttttctctgggtgtgtacccagtaatgggatttctgggtcaagtggtagttctgttgttagctctttgaggaattgatacactgctttccacaatggatgaactagttcacactcccaccaacagtgtataagcattcccttttctctgcaacctcgtcagcatctgttattttttgactttttaagagtagccattttaactggtgtgaaatggtatctcgtggttttgatttgcacttctctaacgatcagtaatatgaactttttaaaatatgcttcttgaccacatgtatgtcttttgaatagtatctcttcatgtcctttgctgactttttaatgggatttttctttttttcttgagaagttgtttgagttccttatagatgttggatattagacctttgtctctcattctgtaggttgtctttttaccctgtttcttttgttgtgcagaagctcttaagtttaattaggcccatatgtcaggttttgcttttgttgtgattgcttttggcatcttagtcatgaaatccttgctcattcctatgtccagaatggtattgcctaggttgtcttccagggttttttatagttttgggttttacatttaagtctttaatccatcttgagttgatttttgtatatagtataagaaaagggtccagtttcaatcttgtgcatatggcttgccagttatcccagcatggtttattgaatagggagtcctttccccattgcttgtttttgtcacctttgtcgaagatcagatggtcgtaggtgtgtggccttatttctgggctctctgctatgttctgttggtctgtgtgtctgtttttgtatgagcaccatgctgttttggttactgcagccctgtattataatttgaagtcaagtagtgtgacacttccagctttgttgttttgcttaggattgccttggccatccaggctccttttttgttccatatgaattaaaaaaattttttttctagttatgtgaagaatgtcattggtggtttgataggaataacattgaatctgtaaattgctttgggcagtatggctaattaattgatattgagtcttcctatttgtgagcatggtatgtttttccatttgtttgtgtcatgtctgatttctttgagcagtgtaaaaccatgaaatttatagtagaaaatattggataaaatctttatgacctcagtgtagccagagatgtctcgggacacaaaaagctccagccatgaaacagtaattgaaaatgttgactttatcaaaatttaaaacttttcttcaaaagacagtgtgaagacaatgaaaaagcaaggcacagattgtgaaaaatattcacaatacatacacttgtattcagaatatataaagaactcttacaacccaatagtaagaagacaacccaataaacaaataggtaaaagatttgaacagatcttcacaaaagaagatatgtgaatcatcaacaaacatctgaaaagatgctcaacattgttagtaattagagaaatgcaaattaaaactacagtgacagtactgcatacccactagtattactaaatgtaaaaagactgaacataccaagtcttaaccaaaatatggaacaactggaactctcatacaccacttgtagaaatggaaaatggtataatcactttggaaaaaatgcgcccatttcttacagtgttaaacatagacttaccatatgaccatattaccagttctactcttaggtgtttatccaagaaaaatgaaaacacatgtccccaaaaaaactttattcataatagagaaaaactggaagcaacccatatatccctcaacgggcgaatggataaactcattgtgatgtatttgtgtaatgggatattacagaacaacaaaaagaaatgaactgctgataaaacaacgtggatgagtgtcagaaacattatggtgagcaaaagaagatgagccaggagaacatactatgtgattccatttatatgagttctagaaaaagaaaaaaaaaaactctaccgataaacagccaatcactggatactcaaggctgagcttcaagggaagctctgtacaaggctgtgcaaaaggggcacaagagaatcatttaaaatgttgaaaccttccctatcttgatcatggtgtttgttgcttaggcttatgcatttttcaaaacccattgtacactttaaatgagtgtgttttattatagataaattaaactgcaatataaagtgatttaaaatgcaaaaaaaaggaaactgaagtagaactggactctaagaaaaacttcagaacatcagattattttttatctaaaatatgtatgaaattggagtcaaagaacagaagaaaggttttaaaaaagaaaaggaagaattatgatgtcttcatttgaatcaaattcctactcactacagtttccaactacagtctgtatctcaatccactggatttttccattccaacagtgacctattgcttttgtcaagattcccaatagtcaagacattaagaaagtaattgatatttctaaaatgttaactgttaatgtgaccacaagaggactcagtgtgtctgccagagctgaagttattcctttagagaaaagtttgatctaagccaactcttatcccatgcctccaaatttcaataaagatatatttcaagcattcaggctctattacttaagctttttttgaagaacgtgaaggcttgtatgtgactcctcattctggtgcttctgactttagtcagtttagacagctccttgtcttttttctcccaccttggggtaaacttttaataacaatctagagtcagttactcctttctcatcctgtccttatctcttcaggcccgtggcactttttttttttttgagaggcgtggtggtgaggaacagaatcacggaatattagagtggaaaggtcattctctgagtcgttaaatccagttttgtcattttatagagaggagaactgaggcccagagaaggagagggactttcctaatatctcataactcttaggagtggaaaccagccccggccccttgcagccctgcactgtgtgggaacacagcctgcttctctctctgacttggcctctttggtggcaagagagagacatttttcatgtgttttcaaggacattgctgaagaacaaggaataaagggaccatgatgtatatgttgcaaaacatggatacttgaaagcagtcttcagtcactacctgcataaattactttgctaaccctttggggtgaaaattcctgtggcttgcacatttcagaagagtttgaggttttctttctttctttttctttgtttttctgaagctatgaatttgttttggaggagagacttttcactttagccttgctgcagggatttacagtaatcttttaaaaactatgctgaagagagagaagcctgtcataaatttgatctatttcctcagtcataactagggagagctcaccatctgaagctttgtaaaggtagagaccgggcttgttttccctcctggctgggttcgttgctaattgctgtactgttattaaaacaaagggctgatctataaatgccccagaactacacaactatacccaatcagggctgtaatcagaccacccgatgttttatggactcggtgtcttggcaatccagaggcacgccagtgggggcagtttctgctttgtctgctcattaaactttggacaccttttctttgttgctgggccagtcattcccacaatctgattggccagagttgatgctgtttgaaatgggcaaattttatacttactctgaaaaacgagcaataattccaaagagtatttgtttaaaagagcaaaagtcactgttaaatgagcagattgcctgaaaatagatttatctgaacgttctgagactaggaaaaaatttattgtggctgccaggtacaatattattcacatttcaagagagagaatgatgatattaataccttaccttaggtaactgcctttagcctttgcacagctccttagtatctgtgatttacatcctccaaatatccctatgaaggtgaaggttggggtgtgtgtgttagtgactacattgactacatataacatattaagatgtgagactttgaagtcattcattgattgattcatcagatatttttggagtacttcctatgtgtcagatactgtaataggcactagactagaacagaccacatgcacaaatgagcagaacagactaaaactccttgctgttacagaacctgtgttctagtggggtccacatgcctgtgtttacatgtgttgctgctagttgtgtgaccttgggcaagctacttattcctatcgagtttgttttctcgtgtgtaacatggtgttcataattgctgctgcataacattttgtgagaattaatgtgacaatgtatgtgcagtgcttagcacatagcaagtgctcatgaatggtagccaccaagatggctgttgtcattttagtttgcagcagttccacttgtcatcattgagttcccagggagtcccctcttctttgggaacagacttgctctctgttgctccattgcggtaaaaacagatgaggttaatccctgtcccaatcattttggagatggcgtcgtttgtattccaattccacagcccagttcttgtctttgtcttccttttatttaagcagcagccacacagaattagcccttttcaaaaataaataagattatcatcctgttttgcgtccctggggtaacagactctaacatttctttctctttctcttctttcagattgtttagtgtaattttggaacaattaaccaaagaaacagaaggcgggaaccactcaagcggcaaatctggaggctttgatgtcaaagccctccgtgcctttcgagtgttgcgaccacttcgactagtgtcaggagtgcccagtaagcacttattgtttcctagagtcaggagtgtgctggttttttcttccaggtgggtttcagaatcactggtgctttgaggtgagttgctctgtgccagccaggggtcagcagatgaccatggcctccttcacagttgacaggacactttggcttgcactgtcacgttggatccccatgacagaatgacaggcagttattgtcattctgattttgtggacgaaagaatcttctcttgcagaaagacaaggtgaggtgttggggtgagaccttgggttcaggcctttaattccagtctatttttcctctctggcaacatgctgccatccacgcctccactcccaggcctgcccctctgaaagtggtgggtttgtggatgagggtgttggagtacttagctgcgtgcctttttttttttccccaaatggggagcatcagagggatggactcctggaaactctgattagatcctctactatcaggaactgtgctacccagctctgggggaagggatgaatgcttcttacctggtgacagggcacaggagtacctgccttgaaggctgttgtgagaactgagtgagataatggagggagagcccctaacaggatgtctggagcacagaggctctcagtgggtgagagagagagttttagccgttaggccctaccataccactcagtgccaggccccagtgtgcttctggctccaggcccccaggccaggttaaatcatacctgagttggaatagatgccctgtctgtgccctggccaacagctgcagcctcttatccttccataaggtgtttggggttgcctcactgggctctgcccctgataggactcctgtgttggggacttccatgggtagaagtcctaacacctttctgagggctggtgcgtctgagcaagaatatgggattgcagggtgtgcctgtttttcacaactcataaagccatcagaagaacacagatcacattttttgcctctccagaagttcttcatgaaatttttattaaatttgttggcacttagaatgcaccaaaaatcctctggaaaaaaaaatttccaaatttaacattttaaaatgtaggaagtggtgttttatgtgtacttgtttttccagatggttcatttattttcattgaaaaagatcagcacaagtcaaaaccacagaactgtgtggaatcaattgagaaaaacagaaataccttggaaatgactggctctgttaagtgtaacacgattaaatgagaagttcagtgagcaaacatgttcttccagatttagttgttatagcttaatctaatttcaaagtaaccacgacagctttttcccccaaagagcaaataacaggacagcctgtctatggtatgtgttgtgtgcagactttgggggctgtggctgtgtgcgtgtgtgcgtgcgagcttctggccagtgaaaaatccaagaactcacatagcattgtgtctgcttccttggctaatgaggtttttactaaactagtgcagtgctcctagatattgagaattagttttaaactgtatttcttcctttccccaacagacatcactgtttgaaatttgatagggagatttgtatgtaactctcccccaggtcagcagggaaaaatgtgagtctgagtcttgtatgaggacttttgagcttatatttttaaccacctaggtagggaacatcccagtctctcatcaaactcaaataggcttttgaagaaaaggatcagaggttgtcggatgtgctgtttctagtgctggttggcagccgtggcctgctgatttcttctctagtacttgaagttgttaaaaatgtccaggaatgtttgactgtttacacttatcttggaattgtttagtccctgctaaagagaatccagactgttctgtaagacataattttgtgtgcatgtgtgtatggaaatatatattcattcagtgaaaggtaaatttatttcacaaggtggtgaatcaggcatttgtggagttcttaagcacccacattaagagactgagggagaatgggcaggaaccgagaacccaccctggagaccaggccttctgacccctgtgttgacgtcccccattctctccacagccccgcgacctcagcactactgtgctgctcactgtttaacttcttaccttctctttccctgtccttccgtgttggacagggaaacatttatcaaagttcaagaccatcaaagtggaaaagaatcctaaagatcatctggtctacctgcatcttttagacaaggaaactgaggcctgttggaggtagtgactagtgtaagttctcacagctagtgagtagccagacagaaccagacccacgatctccacatttctgacccggtgttcttcccacttctgcctccttgactagagtcccatgagatccactgagatctaccgtacatgttgattatgtacaaaggagcggaatgcaataaagtatacatgttcacagtcggatacaactttatcatctcataaatgtgacaaatctgaaatacagtagttactctaaatgtaaaaaatattcacaaagcttactgccatggaatttagaagagctaactgctgggggttagttttgcatggcccattggtgtctcaagaaaaccaaaacaacgatagaaacctggccatggggattggaacgggtgtcgtcttttcctttccatgtgttccttgtaggaggtaaaaatattgaaaatcatcctaattgatcatttttgaaaaaaccatgtggacatttacatatccaaagatgtagcacccagagttttagttgtaatagaggttgtagcaaggcagggtcgtgctgagtctgaaatcctcttactgctcttccctcaccatcctctcccctgcctcctcctgtgctgcttatcacggtaaagatttgtcattattgctaagtcttctctttgcttgctgtattctggtttccgatgtaagcatctcagcttcttgcattctttctttcctgactatgtattgggaaagtgagatgatagcagaagatggaaagtttgaaggtggagagacaacagggaaggacagggaaggagaaggtaagaaggaaaagagtgagcagcacagtcgtgctgaggtcgtggggccatggagaggatgggggatgccaatgcaaggtcaggaggcctggtctccagggcaggttctggattcctgcccattctccctcagtctcttggttcctcacaaccaatcctaatcctgagtgctgcccccatccttcttttcatgacctctttttctgtcccttggcgggtagccttacccacactctggcactgagtatgactccatgggtagcttctattaggttggtgtgaacgtaattgcggtttttgccattgaaagtaatgggtctgagtctgaggatttcagactcagcaagaccctgtcttcctaagacctccatggcagcaaaagttttaaatgtaggaaataatcgtctctctctctctctctctcttttttttggagacgaagtcttgctctgtcacccagactggagttgcaacctccacctcccaggttcaagtgattcccccacctcagtctcccgagtagctgggactacaggcgcacaccgccacacccaactaatttttgtatttttggtagagatggggtttcatcatgttggccaggctggtctcgaactcctgacctcaagtgatccatctgcctcggcctcccaaagtgctgggattacaggcgtgagctacctcacaagggcagaagtaatcatttctcatgtgcctgtctctcaagaccacatttcagcttcaggacacgtctaccttaatgttacataataccaacatcatacttaacaaggctcaagtcagtctcaacctcccccttcccctcccacctccctcattcctggagaacctccctttggaatgcttagttttgttggggacactgggattttgcctcaagaccctggctcaaataactggtgtgctccataggtaccttcctctcattctgactcagttgctgagttctggtctcatcctgatcttcaccctcacctaccccagcattcttgaactacctctctgtgtgtctggcctgctgctgtcctgttggtctttctaaagcagctgccttttgctagtgatctaaagtttggcttcatgacctggattcaacacccacaaccctggctgcaatctacttttctttcgtgattttcttttccactaaccaccaatcaagactcaccaccctcaagcccatactgtgctactctcctctgtgcttttggtactctgttcttcttccctgaagttgcctctctcccatgcccacctgtggaaatccaccccacctggcctttgggctgtgcccagagagaagctgcctcaggaccctttcttcaccccattcatccctacttgtcacctgcatggaccttgggggactgaacaaaggatgatgaacatgggaataaagacaaagacaaaagagtatatttggaagaaggggtcagggggctccttgcttctagtgaacaagagccctgagcttcagagcctttcacattttactgggtaaaggagatagggagagaggggagttgttgtcggtcagcagcttgatttacagcagacttgcaagactgcattcttctaacaacaggctctagatgtcccagtagataacctcaatgagcacggtgccagggagtgattgccctcagcaaacctggcggtaggcacagtcgtgagtttgcccacatcctgcattcatgataaacagtttgctgtttgatcatatagcctccagtggaatgctgagttggtcacaatccctttggccttttcaactcccaacacctattaattttaactattgggatatttatatagcatctatgtgctaccccagggtagagttatttgtgtttaattctatgtctcctagaatataattttttgagggaaaacattttacataaaccgtcttcatattgctccaaagcaccaaaccttatgatttccacatggtagatgtttaagagattttgtcagatggatgaagaaatgcataaatgaatgatgaactttgacattgggcagtcccctccctaggccttagtttttccctctgtctagtgagggagtttgactagatgatccttaaggttccttttcagtctatctcacatccaggcttaatattaatgaaaagctttgaaatacctctttgaattttattactatgtgttctaagtaaaggaggcatggttaggaattatatatatgattcattggagtgccttcctggctcacaaacttatttttttttgtctttcctaggtttacaagttgtcctgaactccattataaaagccatggttcccctccttcacatagcccttttggtattatttgtaatcataatctatgctattataggattggaactttttattggaaaaatgcacaaaacatgtttttttgctgactcaggtgagtaatgagaattgtagctaacttaactttaaaatttttttgttttccccaaagcaactttcatggtttggggaaaatctaaaacaaaataggaaaaaaaatgcccaatataccagcacatttactgagccagttctcagtgtgagctatgttcagaatagatgagaattcagtctccctttccaccccgatttcctgtgtaatgtgtcctggcaaacaagataagagacctccaaagtaaaaacatgaggcaaaccaacagcattgtgctatctaagcctaaggaggatgctgtaagcgcaggtgcagaggaaaagaaccatggatgctgacaagaggaaatggcagattccgctaaggagggagcatttgaagggaaccttgaaggacaagcaggatcctgaggcaacgcagatggggcggtagggtgtcccgggctctggcaagggttctcaccttccgctggcttggatttcctgatgtttctgtcctgagcggtacagcctgtttgctctgtttgcagatatcgtagctgaagaggacccagctccatgtgcgttctcagggaatggacgccagtgtactgccaatggcacggaatgtaggagtggctgggttggcccgaacggaggcatcaccaactttgataactttgcctttgccatgcttactgtgtttcagtgcatcaccatggagggctggacagacgtgctctactgggtaagtaccctggggagagagtttatggagtgttctttgcttggataagtgggttttgtgagctagagccactggagaggtggctggaaaagaaaccctgaagtcagttatttgggaagggaagcagatgctgtctttaccagcagtcttcatcatcctgctcctcgagggccttagtttcagttgcaggaagctgctgcgcgatgttggcttctggctttagtcctctacttcccagtgctgcctgaagacctggtgccaagggtgcccagtggtcccctttggaggaactccaggaagccagggctatcctgattcaactcttaagagagccaaagggtcactttccaggtaaggaggctcctggactgccacaggctaaggttaatcatttatacatcaaggcaggttgctctactagatcctaaagggaagaaagggaatgtaaatcggatccctttcatgcttttcataactcagtataaccttaaacccagtgtgagtttctcccatgataatatttcccattctttagtattactataaatcatcccagcacaaaaccttagctgtcttcctttctatttgaagctacagacctctggcagaaagggtaggaatggcacgtagacttccagggctggtggacccatccagcctgccatgaaaacagttggacactctttcaaggcgagggtctgattcctcttgttcctgatagagccagaaagatttgctgtataaaaataagtgctatagcattttaacagccatttcccagggctgagtttgttagaatgcaaatgaaagctcacagaagtttagaaattgtttttcacggtataagagttgctggtaaagacagctaacatgtagattttgagcctaaatccaagtccaaaggggagtaaccaggattccaatcatgagttgttaaaaggaaattagtaataaagtagttctgaaatcagcagcttttagacagaaggcctgtaaattgataagtagcttctggtagtttctaaattttagatacttttcaggatttcctatactccataacttcaaagaatgtaacatataatggttataaataggtttttgctgcccttcagcagctcacaggattgtagatgtccctatatatttaatatgaggcaaagaagttatatttttatctttaatccccaaagtcagtctagtttgatcaggtttaagcatcaccaacatgttatatcttgtttttcctacttccctttctttttctgattgtcataggagtgtgagtgtgtgtgtgtgtgtatgcatgtgtgtgtgtgtgtgtatgcacatctgttatttatattcataaaacgtcttttcataaagaggaaggaggaaggagatgatattggctgagccaggggcatggcttctgtatgcaggagggccctcaggttaggtgaagcattcatttttgctattatttcctaaattgcaacttctagtcagattagttgagatctcaattccagtcttcccttgaagtttttcataaatagaaaaagcatcatcaaaatagcccaaactgatacttcccctccccaaacagtacataaaacaacattttgatttttttaaaaatcaaaatctgtgactcttctcagctttgtttttctctctattgacatggtgaattgtcagctgcagagccaacatgccttgactgatgaaaaattttatactttatgttatattccttcacatcgattctcagaattttcctgttgccaagcaagtgtaaaacctgggagtagatgattaaaggagagggaacttcaggctcctagaagcaaaagtttccgcttactttcctgagaaggtttaaatatcatctaggatgatataattattatttttattattaatatgacaatcacgtggttaatactttgacagtataattgcactctccataaattacacagcatctttattctggtggggatctcaagccattcataaactttatcccagtctgtatccctttatagaaggtctgggatcttgaagatggagacagtggcgtagagaccatggaacattccccgagttctacagcaaatggttgtggtccttgatctagaacagtggtctataaaccttttcataagggggcaaatagaaaatgtatttggccttgcaggctacatggtcacctcagcaactgttcagcccttccactatagctaggaagcagccatgggcaatacataagcaaatggatgtggctttattctaatcagacttcatttatggaccctggaatttgaattttgtatgatttttctgtgtcatgaaatattttgcttttgattttttcccccaccaactatttcaaattgtaaaaatcatttttagcttgaggccatataaaagcatacagcaagctagatttggtctgcaggtcatgctgtgggaccccctggcctagactagaacccagcactctttccttggcattcttccacctgtcagcagttgatgaatccttccagaacactagggggcagctaagtaatgtcttcccgactgttctctaagattttactctctgaaacacatcaggattgtttttaattacctgttgattgcatttattagctcatcatagagataggcaggggccaaggaaccaagccttcctaatatttcatgggccacagtcagctggaagccacaccgctgtgatacacagcagaacatccctgcccagcatggtgcctggcaccgagcaggcactcaataaacacaagggatggtcatcatccttcaagtgtaccaggcatattgcctcattagtgtagatgtgccatgtttgaatatctatttttatccacaactagggcataaaggggacatcttgggagataaaaagagattagattttaaatattgactacaagcacatttctgaatcctttaggcacttacatatggtggacaaagtctttgcgggtcattgttttgcatctagtcaagtttatattcagtcagcgttctcaagctcatttatgccttgcttctcactagtgtctggaaaatgtctggcagggtcttgagaagggaagtaaaggtgggtccaatatgtagaaaggcacacttagaacaggactatttggatgtgtgggaagtgggatcattaagttctggtggaaagaaacctatggtagagttctttgataaagtgagttccataaatataattgagctgttgtttgactcacatgtgagtgtttgttgctcacagaggcagtagggtgtagggcagggaaagagtgtttatttagcctggttgtgtgaccttgagtagttcatggaacctctctgggcttctcaagatgcagaaataaacttacatgatttaatttttcccttcaacttagaggaaattttttttccttcaattcaaagaaattgtttttaaatgcaggaaataaaaagtattggtttcaggagacagctatccagataaataatttcggtgtcttgtcttagcaccaagctcttttctcagtgcacactcctacggaggtgctggctgtcagaccttcacgggaagtactcatggtcaagctgacagtctccttcattcagggcacctaggaaatctctctgtaaccagccgagggcttgcctttttcttattgcatgctctggggtgttaaaaccagtataccaagtttccagaagtgttttcagcagctagaaaaacagccttgcattggtctataacttgagacatgaatatgcatttcaaccttttatttttattttttacatttttttgagacggagttttgctctgttgcccaggctggagtgcaatggcgtgatcttggctcactgcaacctctgcctccggggttcaagcgattctcgtgcctcagcctcccaagtagctgggattacaggtccttgctaccacgcccagctaatttttgtatttttagtagagacgggtttcaccatgttggccaggctggtctcgaactcccaaactcagggtgatccacctgccttggcctcccaaagtgttgggattgcaggcgtgagctgctgcacccggcccatttcagccttctaaaagaaggaaaactgaagctaaaaagaaaattatttcctgggcaccagatgacaccccttgatgactttgatataagttttttaaaaattagtctaaattgaagtccttcagtggaagccagtttcttcattgttgataaagaccatacaggcaaaatcccaagcagtctctattttcacgtgggtatttttgggaacagcttgcatgttctgatttttcttttgtatatggtaagatccaagaaatgcttggctctgaaaagggacttggattgagaagggttcaatgggagcaagaccgttctcagagccgaagcttgtctctcttgccccaccttctgacttagagatttggaatctccagtggactgtattcatctccagccttcccctccaggcctcaactgtcattccaagtgatacttctgatttgagcaaatgtgaatctgatgaacacctactcccaagaaattaaaagggttttaaattttttaaaggaaaattttccctcccaagtagagaagacagctgttactagagccattctctggaacaccagactgaggcctgaaggagggttggtgaagcagatggctcagcagatgacggttgctagggtcatggaagagtgaggtttcctgatgggagccctggacctgtctgccctcccgtcaccttgttgggcaccttctcccctgctgcatgcacctctgttccaacacagagggaaacaagcccaggtggggctctgtctcaggtgctgacccaggccaggcacaggccaccacaccaggcagccagttccttcttcatatatgggtttttcagtaagtttagtggtatagttgctctggatgaattaccctctgccttcctgctgaaattagtttatccaacttaattagatcaacaattgcagccacagcccaggctcattcattactctaattgccaatgtaagatgtgcagactgatatgagttctattaagcacatcaattttcatgtggccaaacaggtgtttcataagggatttaatgccctctccctagacttcagcaacagatgttaggtaattttttttaatgttcactttccctatttggcttctcgaggcaaacattgtgaaatgcacgagcctcattctgtaaagttaaaacctggagccagatcatatgcaggaaagcacatgcttaacaccctaagggcttgcacctgcaaggcaagagcgatggctctatccagactgtttgcagttctcattggctgaaaattctgggtgttgtggcagggtcataccttgggccatccattctgtcccctgactggttcttaacacctccttcctgggaaaggtgttttgctgaatttaacattgacctgtgctgctggaaagttccatccagctgtgatccttaaagccctgtttgctctagcttcctttggccaggtctgccagggagactgtgtctgaatgtgcagcatgagcttgtccgggaataggggaatggggttcctcaggccacaccctttcacctctaaacccagtcagctcacagctggagccagtctcccaggggggtcatctagatcaaagctaagtgtggagaataagggctgcttctcctttctgtgggtgcagctaagaaaaagcccattccccaaagagcccgtggcttgtgtcagctagttgaccttgaaaaaatttctttttcacattcattttgctgcattcattttgtttgcactcacaggttgcagataatccagatctaaggtgggtttggtttccttgggtaggttggtttccagtagaagattattttaggagtttttaaaaagagtttatagagtcagatggtacaagtttgtctctataattaagacttttccaccatcacaaactttaaacacaaagtctaaaatcttgggcagcatagaaaataggttctagctaagcaggagttttgtcctctaccaagacctttcctgaaaatcacttatcaagacagtttcctgtaagaaaaagccatatcccagctgattttccttcctggggccaaaatctgctattattcggcctgaaagccttgatgactctgtgtgtgtgtgtgtgtgtgtgtgtgtgtgtgtgtgtgtgtgtgtgtgtgtatggatgcttgtgtgtgtgtatggggaatatgtgattaatgtgtgttggctgctgttgtctctgatttggctactgttgtttctgatttaaatctaagtaaatgtttaattaaatgtatagaatgctgtctctaatgtgaccctctctccttattaaatcctcttattaacccactcctatgagaccatcttatttcttgcagatgaatgatgctatgggatttgaattgccctgggtgtattttgtcagtctcgtcatctttgggtcatttttcgtactaaatcttgtacttggtgtattgagcgggtaagctacacctctttcatcttgaaagcagagtcctgaggacagttgccaagaccacacaagctttgctggatgagggccgccaagaggggttgccagacattttatgtgtcctctgagatgctttcttttctgctgaggcttcccaaatcaagctgtttcctggaacctcaccaggcttcatgaaggagaactatagaacgattattgaccagaaattaatcagcattgttgcttgagatttaaacaatttccatagcatgccctttttttgtctgttctaaagtgagatacatttataattgctttatttgtctggatccaaatataatgcagattaattgttataaaacgatagcaaaatgagctggattgggtgggcttttggtagtccccatttgtagatttcagccgctgagcttgtccttatttgcagaaaaaaaaaaaaaagggaaggacctaggcccagtccctgtcctaggagcactaaccttcagcaaagcactgagaggtttggcagctgcaactggggctctgctctttagtaaatggataactgataactgatctccttacattttacaggtaaatgatgcgataggatgggaatggccatgggtgtattttgttagtctgatcatccttggctcatttttcgtccttaacctggttcttggtgtccttagtgggtaagcagtcggatccgtgttgcaccttctcctgctgccacgtgtgaggcaactctgcgtgtctcctagctgctccctgacagcttctctgcatgtgtttggactctgatgtcctctcagtgtgttgcttttggattgaactgtgattctttctgcctgtatctgtctgtgagattccgtgtttccaatgcttgccaaacactgttaatttaatgaaaacgttcccccaaagccagttgtgttagtatgtgaacgtgtagaggtggattacaagtgagttaaaggaattccagccttggtctcccccaggaaagaggcttttgtcccttgtcattttgtgtctattagtacataactccttgtcgttttgtgtctattagtacataacctggcccctttaggtcaccacagtgcattataaatacttccaggggagttttagattttactgtgaaggagaaataagcctcaagcacataaatactggacagtttcaaaatcttccttagattgggattctttattagcttggtgttctagtgctgtcattgtgagaactgtccctgtgattcagttttaaccgaaacttacagaatccttctcttaatgcagagtgatgatcgacttttgtgcacacatttcccatggccttacagagaccccgtcattcagtcacgatttttgaagtttgcttgtttatcacttcctctctatggattgactctccataaagagggtgcaacagattctggcctggaaagggaactccttatgttgcaggctctgccttgcccgtagctggagatgccatcccagaacccttgtgggcagccctgcatccacaccgcctctcagacacccccagaaggtggggtgctacagagaagggagctgggggctgtatggctctctcacaatcagctccttcatacagccattgccgggttgtggggggcaggcaggataccaggaggccaagaggggcccacgtctcccagaggagcctctgtcactgcgctgcgcccaggcaccctcaggaagtagtgttgatggatttgattccaggcaagtttatctcctcctcactcactttatcttgctctttccgaggctgtatctcggggaagtgatgtcttcatgtatgctgagttagtgaaaggctttaatcgcatttttggaaacactgccttttccagagcagaaagcagagtgcgtttatccatctcggcttcctttctgcatcttcccctaaacctgccctggattgaatgtagtcagttccacaccagggacgcatactgtcacaggaagtccctatgtagagttggcccaggggccagtgcccgccagagagaggagtgggggctgagcctgggatggggccacataaccctcccctgcctgagccgcctcctgtagatgagtggctcctcaagcctccggcccttccacctcaacgtgagaagtgtctctctcctagtaaacctcagtggccttaggctagggttggacatgtgagggtggtgtctattcctggagaaataacatcgcatttgattttgccacaggagctttctatacaaggttaacagcaatcctgttgtgaattccttggcgcctcatgtctcctaaacccagctaaactgacggaggccatggaaaccactaattttaacagtgccggtgacatcccttatcttttagctttcccaggcaggaaccgttgccccagcagacatgatgaagtagaggcaggagccagatcgtgaggtgcttaaaaaaagaaaagagaaaaagatgggcgggggggcttcccactatcacaaatggggattaaacctgcaactccgtgggaggtacccaaagctggaggataaaaaaggtacactccttcatggaacaaccagtttactgaaatatattttggggggaaataatttttttaaaaaatattttttcatcaaaacaaaacttagatccctgatggaggagactggaaatgacacatgaaattataaaagaaaacccgagacttctctgcgatttttaactgtcagtgcgggctgtgctcaaacccctagaggctgcacatgacctcctctctactcccccagaaggcctccggtagggctggtttgggtaaaggcagaaccatgtctgcaaagcacagcctcgcagctttgttcctgatttggccagtatttcctgagatcctgtagagtgcccggctctggtccagaggcgaggggtgccaggatgtctcagacacagacagcggccttgtgcttaggcgttcattatctcatggggtagcccattttgaagcagtgcagaagggcacatattcagtagaggtgcagacccagaggctctgtgagctgcactagagagatgaggaggcatctcccccggcgactgacgatgggctggcatgcctccacctccgcccctccgccccctcgccctcccaaccaccaccttccctctctgcctgctactcccctcttactttcccattgatatttttgttgttgtttaagcaaattattattatttttttaaattttagcctcaagagtcttcataattttttaagggaacactagaggtactgcaaaaccagaaggatataaatgttgagaggaagacaatttgtgttgcatagaccctgagggactgtcagaccaacacaaatgtaatccgctaagcactgaattaaaacgccctcattttagaaaggctggtcgagaccatgtgattgccttctcacgaggaaatgttagatggtgctgtatgtcttcaagtctgtcagccatttggaaatacctgtatctgtttttgctccttggctccgtcatgtgtgtggccatgccatcctattgtattcttgaacagactttaatctgcacattggatttggtgtttatttgtaaagtgttgtaacactgatgctttgggaaaatctttggttttataacagtcttttttccctcaaggtaagtatgaagtttatgaactgtaaaccctatgcagccatgcatgaatatagatgaatacttccatctctgatcacagtgctctgtgggaggggctgagaatgtctatgtctaatgttgcaatttaaccttaagttgtcattgaggatatgctcccattatgaccaggaattggaaagaatgtcttctttaagtctgcaattcagacatattacacgtggtcttctagaagtttggcaatttttcacttttcaaattgttaattgaactcccttttgaggttttcatctttagaatcatgctagattcccagggggaccatgggggtcatgggtggtaggctggttggctctgcctccttctccatttcagggcccacctgccaccagccatccctatggtggcagtgtctgagcttgcaagatgggggacgccctaggctcccaggatgtggctccaacccccaggaagggggctggaagacttgggttccgtcctgctggagtcccgcgttcactctgggacttcactgagttaccctgagcctcggtctctttgtccttcaggatatcagcgacatcctgtcttgccgtctcccacacagggtggttttcaatcagctaatgactgtagaagtgcttctaaaaatacataaagggtttttctaatttaacatatccttatcttaaatccgtggatatcccccactcccctcactgggttaggtgggaagggtgcagggtactctttggaaattctggagtgtagcattttctggatttcccagcaggtggccacactttacacacacatcaacgttgtactcaatgtcacccaagaggtggctctggagaatgtggaagcactgtgtcagctgcaaagtattacgcaggtctaagtcattgttattatatatttgacaatgtttttttgcacaaattgaggggaacggcatttctattacatagtggttaagcacaccagctttagaatcagacaaccaagtcttgaatgtttgttctaccttttccagttgtgagatttggggcaagttacttacctctttgagccttactttcctcatctgtgaaatggagctcatcacagtagcagcttcgtgaagttcagtgaggactcagtgagctgaagaatgtagagggcttggcctattgaaattatgacagttcaggaagggtgcatctcttcctggatttgatgcaagaaaagaatcgaatcaattcagtcctttcaaactaattaataatagctggccaagataggtctgtgttagtgaaaagcccaagttatatttttaaaatgttttattatatatataatgacataagctactgctgactaaaggatattactacataaaccccctcctgggcttgctttaaagaatagatcaaaatcatttataattcgcttatgaattcaaacctttggttttggcaacaacttatgaaaaatatttgaaatactttgttaagtagatcttgtatgttgttagacaataaatattgttattaaacccactcttatgacataaaattgaatgtaaacccagcccaggtctataaattcaaaatcataccaattaatttgtattcttggtgttctagtaagttccagatcctaccagatcacaggtatcattttaaatcaatccaattttgtattactataggcctatttatctttagaagtttaagggaacatggatgaagcgaagcattatagaaaactgaaggcaattttcaaactagtttatgtttttgaatctcgcctcctacatcccattctggctaattggataccaggggcctagacaaagactcaggcatggctacttttaggaagctttggtttcctaaggcaaagattcatgggatggagaatgtgaagagggaaggtggtgctggtgccggtgtactgtggactgactataccagaattttacatagtggaatcaggtttggtccatttaaattcatactagtaatagccagacaatctctgatttcttctacttgaatggtggctcaagaggcaaaacacaccaatagatagtagttgtattacttgtgaatattttctaagtggagacatatcctctgggaataggcattcttatacatttttcatgactgagattagatttttctctcatttggccaggcacagtggctcacgcctataatcccagcactttcggaggccgaggcagctggaccacccgagatcaggagtttgagaccagcctgactaaggcagtgaaaccctgtctctactaaaaatacaaaaattagccaggcatggtggcgcatgcctgtaatcccagctacttgggaggctgaggcaggagaatcacttgaaccagggaggtggagattgcagtgagccaagactgcaccattgcattccagcctgggtgacaagagcaaaactccatctcaaaaaaaaaaaaaaaaaaaaaaaaaaaaaaaaaaagacttttctctcattcaacactttaccagcatctactgacagaaaatggacaattgaatttcctccaatatatatacctctgatatgtctgctttgtaaaagagtagtgtaattgcttacaacattgaaaaggttgttattggggtcctggggtagccaggatatcggcatgatttgtcaccatattcagaataaaactgtactgcaatagtgagttaattccatatcttggccaacagagaatttttggccagtggctactaaggcacacggaagtccagtctaaaagggacaggggaggactctttgtagatagttcttatgattaaaaaataacttcctatgtgttgtagtgatgattaagctgacagaatgctaaagacacccttaatgattacttgtagcaaagtacttccccacatttagctggatttgtctttggtttgaagaggctaatacgtgaaagatttgttcacagttggatgtccccttttctgaaccatgaagtaatattgtgaatggagttgaatgctgaggttagggtgccggaaagattcagggtccttcggtaccctcacatggcttggctttggtagaacaagaaactaagctctgatttggctttaaatgagagtgctaaatttcctttttctaataaagaacctagctaaacatttatatatacttttgaacactgaactttcttgttgcagagttaacagctgttgggggtagctgacagctggatcctggtgctgttggtaccatggtacctgaagtgcacaggctggtagccacacctgacattaacaagtgagtggtaacctctctgccgctggcttacagctactgtttccatagaaatggctgtcgggatcagtggaaacgaggtaagtgaaagttttcgctgatccttgtttccatcaagctgacgtctgtttccctggcaacagcagtggacagcagccaggcgctagcaacagattcagtagagctctcacttgtcagctgtggctatcatctgttcctgaccaagttctttttttttttttaataatgtacagaaagacctctgaggacccaggaggcacctctggccacatgtgccctcctggatgctcgttttgcagatggagagctgtgtgctgagttgacttctctgtccgcagttccccctccacctgtgctctgggttgttgatgtgcaggttagaagagggaggttgttgagggtattagtgttgcaggggaggctgttgaatctgttgatcccaaatcctaggggaagagaattcattacagtgctttcatgcacagacccagctctttataaagctgttgctaccttaatagttgaaattaaagccataattttcctgtggtccctattcaattggaggcattaacaattgccattacttttacaatgaaaaggatatttaggagtttaataatttggcttgtgagaaacaaattgatgattgtctctaagatgctactgtcaacattatgctttttttctcttttgtgtaatattcttttacaggatggtaaaattgcttttacagagatcaaatattggtattgcagggcagcttggtatacaaagaccagtagatctatagtgtagggaactcttccttgttaaagttcaacagctccttttctggatttcattttaatgtttcaacagatggatgcacccaagccctagccctaagtattctccacccatatgagacagcattgatggtgccacagagcaaaggagagccactgttcctgccctggtgtgtgagatgagaggcatggaatgaggtgttggttttaagcccttactgataccatttattaaagagattttctctggaaaaaacaaaacagctttgatattcagagctgtatttttgagactcaaatgaacataaagatccacggtcttatgagaacttagatcggctgctagaagagcattggagaaccatggagttttgtctttggagggctttccggatgacattgttccacagctctctggaaatagggcaactgtgcttggcctgcaggcagttgaatttgatataacagacgaataagaagcagaaaatcctgctggatccttttttctccctctctcttaacttcctaagaatgacttattcatttaatgaattttttttcagttcctacacagtggtagatgtatgccaagtgccctgctaggcactggggttacagtggtggaatgtaggcactgggtaggcaccaggattacagtggtgggatgtaggcaccagggttacggtggtgggatgtaggcaccgtgtaggcactgcagtgacagtgtggaatgaaatggtttctttcttcgtgaagcttatatctaatgatggaggccaaaatgacaattacaaactcgtataaatgctttgaaagaaaggttcatgtgctgtgagagggtttaacaggcacaactgctgtcagtttattgggtaggagcatcctggaagtgaagaatgagtagtccacatatccaggcaaggtgggacaagaagctagggcaagggtattctagtcaagggaaaacccacagaaaggaggtacagtaggaaggagcagaggatgctggaggaactgaacgaagctagggtgacaggaactgggagagctggagatgaagtcagatgaaaggaaagagactggccggcagaatccaggtcacgtaggacctttagactatgtcacaggttttggtcattagctgaagggtaagagaatgcatggatgaattttaagcagggagtgatattcaaatttacattttctaaaaattatgctgtattctcatatcctcaacttaccttaaaatgcttcaaaaagataagatgattaatagatggatagggggatgcagagataggtgataaagaaaatgtagcagctgggtgctgtggcttgcacctgtaatccgagcaattcagaagggtgaggtggaagggttgcttgaggccgggagtttgaaaccagcctgggcgacatagcgaggctttgtctctggtacaaaaaaaaaaaaaaaaaaaaaaaaaaaaacagaagtctttttagctgggcaatgtggtgtgtgcctatagtcccagctactcaggaggctgagacaggaggatcgcttgagcctaggagtttgaggttgcagtgagctatgatcatgcttctgcactccagcctggggagcagagtgagaccctgtcttaaaaaaaaaaaagaagaagaagaaaaggtagcaggtgttaattatggaatctaggtgaggtaggcatatgggtgttcattgtataattgtttctacttttatggatgtttgaaattcttcctaataaaatgttgggaaaatctgcatatgaaaatcactgtggctgcagtaatatgaatagattggatggatacacaaatggatgtagagagaccaacttaaggctcatataatctgcttccagccacaacatactagtgctaccagactggacctttcaccataaacaactacaaaagactgggcaaaaaataggaagcaactattttcagaaaatggaaataggatatacaggattgcaatccctacgagaagggaaacacatgaggtaaactccgcaattgtcctggctttctgcctggagacagttttagaattatggcagagagggagagcccagcagagaacgatggtctatttgctgaggggtcaaagaacagtgttcagggctgctaagatagctgggattttcagggcagagtatgggtgagaagtatgcagagaaggggctccagtactcagagtggaggttctttgaaatctgaccatatactaagctgcttctgtgccaggtgatacttattgaagccaggcagagaacagctagtagaatgctgtaagtggttggaaatctctccatgctgggaggtatatggttctgctcagctgtagtggaaggacctaattgaatacattgggtactgagacttcagaaacgccaggctttagggttggagctactttagcccttgagtaagcctactgtagacctgacttaaaaagcatagaaacaagcttcaaaaggatcagggaaatggccaataaattaaacacctgtcaaaaagacaaaaatcaacactcgttaaaggaagagaccaaaactcagatgttcccagaatgtttttcctcatgacccaaaactataagacatgaaaagaagcaggaaaatattcacgatcaaggagggaaaagtcgatagaaacaaaagatgacagatgttgcaattaataatcaaagactttgaagtcactactatgagcctgtttaaggaactgaaggaaaagatggacataataaaagaataggtaaatctcagtaggtaaatagaaacagtacaatatctgaaaaaagtagactggacattgcagaaaaagttggtgagggcttagtgatctctaaaacaacaataagcaatctggtgtatatgaaattggagtcacaggagaataaagagattgaggaagaaaaattttaagataaataaagctgaacatgttgcaagtattgaaaactaagttaacagatccaaaaggcccaacaaacctcaagcaggggaaacacaaagggaaccactgctaagcacatcaaatttagatggctgaaagtaaaagatccagagaattttaacagaaagcaaatgggaaagggcacattacatactaggagaaaataataagaatatgcatttacttgtttgcagatatagtgcaagttgtagggcaatgggtgacatcttcaaagaggtaaaaggaaaaacgattctgtatgaagcaagaatacccttcacaaaagaaggaagtagaaaaactttcaggtaaacaaaatctaagaattggtcaccaacaaatttgcactctaagaaatgttaaaggaggttcttcaggctagaagaaaataataccagatagaaacgttaaatgtccgctttaaaaacgaggagcatggccgggcacggtggcttacacctctaatcccagcactttgggaggctgaggcaggcagatcacctgaggtggggagtttgagactagcctgaccaacatggagaaaccccgtctctactaaaaatacaaaaaattagctgagagtggtggcgcatgcctgtggtcccagctactctggaggctgaggcaggagaatcgcttgaacctgggaggtggaggtcgtggtgagctgaggtcacgccactgcactccagcctgggcaacaagagtgaaactctgtcaaaaaaaaaaaaaaaaaaaaaaagcatcaaaatggcaaacaaagataaaagattttttctcatttctaaattttctaaaagataatttaaagtaagcacaaggtattatgggaactgtaacaggtcaaagtaaattataggataaccatacacagaagatagaaggaagttaaatggagcttcactgtgataaagttactacattttgaaataatatgaattcatggtagactgagaacttaaggatgcatatgataatctccagagtaatgacttaaaaggggtactaaaaagctaaaagaagagataaaatggaatattaaatagtactaaattatccaaaataagtcagaaaaggaagaaaaaggaacaaagaacatatagtaccaacaacgagatggtagacaaacccagtaatatcaataattgcattggatgaaaatgtacacaacattttagttaaaagatagaaattgtcagactaaataaaaatttaagatgctataaagacatggattaaaaataaaaaatggatgaactgtactaatccacacaagttggactttagtataaggaacatttccagaaatagggacatttcagaaatagacattttattctcataaaaaggtcaattcactgagaagacacaatgatcctaaatgtgttggcacctaaatacagcttgagagtacatgaagcaaaagttgttaaaattaagtggagaaattgataaatctagaaacatagatgaaaatttgtatcattccttctcaataattactaggttaaaaacagcaaatatagataatatctagattatatttagattggttaataaattcagccaacttgacctaattgatatttataaaatactgtgttcaataattgcggaatacacattcttttcagagcacgtggaacattcaccgacatagaccatatcttggccatgaaagtctcattacctctcgattgaaattttacaaagtatctttgttctaatggcagtagatttaaaacagaagccaataacaggctgtttataaaccttcccaaatgtttggaaattaaataacctataactcaaaaaataataaaaattagaaaatactttgaaactgataaaatccaactgggaaattgtatgatccgttgaatgcagtgcttggagggacatttatagctatatcagtaaggaagaaaggtttaaactcagtagttctacatttccatctactaatctagaaaaagaagaccaaataagtccaaggtaagtagaaaaaagaataacagaagtaaataaaatagaaaacacaaattataaagttatttagaaagcgtaataaaaattgataaatctctaacaaaactaatcaaaaaaggaaaaagagcaaattaccagttttataaatgaaagaggagataccacagatattacagacattaaaataataagagaataaacttggtaacttaggagaaacaggcaaattccttgaaatacacagcctaccaagaaataaattgggagagtcctatatttgcctttttaaatggaattcagaatcgcaaacagaatcgcaaacagaatcttctctcaatcttctctcaaagaaaattagaagcctagatgaggtcaaaagtgaattatgtcagccgatttagaaaaaaattataccatccctagaaattctttcaggtagtaaagttggagggagcatttcccaactcatgaggccaaaatctcaataccaaaactttacaaagacataataagcacagtgtccttcattaatttggacacaaaaattctcaaatattagcaaatagaatatagcaggatgaaaggaataatatctcatggccaagtgggatttatgccagaaataagttgattcaccattggaaaatcaaataatttaccatattaatagaatgaaagaggaaatcatacgatcacctcagtaaatgcagacattactaacaatattctataatgatttctaataactctcagcaaactaagaatatgcaaaaacttcctcagcctgaaaaaaaaactatagctgacaacatacttattggtgaaagactcaatcttttcttcttaagattaggaacaaagtaaccatttttctatcttcttttattcaatgttttattgaaagtctgaaggtaagacaaagagataaaaggcagaaagattggaaagaaagaaaaaactatttctatttacagacataattgtctacatagaaagtcccaataattgaaccaaaaacctgctagaattaataaatgagtatagcagggtgacaggatacaaagtcagtatacaaaattccattttattcctgtatacaagctgcaggtgttgaaaatgaaattttaaaaaattaccatcaaaaattatttacaatagcattcctaataggaatgaatataagaaaagatatggaagacctctacactgaaaactacaaaacactgattagtaaaattacaatgatctaaataaatgaagatataccatgcccatggattgaaagactcaatattgttaagatgtccatttttctctatgcattgaatgttgtcccatttataaatctcaatagcctttcttttagaaactgacaagcttattctaaaactaatatataattgcaaatgacctctaatgaaaacaatcataaaaaataaagaaggagggcttatactgctgatttcaaaatttactgtaaagctgtaataaatacaatgtttgacataaagatagatgactagaataactgaatggaataacaaattcagaaattcctttatatgttcaattgctttttgataaaggtgctagataattcagtggagaaaggatactctttttagttaaaaaaaaaaaaataagctggagaaactgggtatctgcaaaaagtgtgatgctcaggtcataccagacacaaacattaaacttgaaatcgatcatagatctaattaaaaagctaaacatataaatattttctaaatagatttctgctcttcaaagactagaaatttaaagggaaaccacactgggagaaaatacaacacttacatctgtgtatctagaatatgtgaagaactcttaacaactagataatagatgagcaactcaaaaattggcaaaacatactttacacaagaatgtatatgagtagccagtaagtacacattaaagatgttctatgtcataaaccatcagggaagtacaagttaagaaactgctacatagatagtacaatagctaaaatcaaaaagactatttccaagtgtcaccaagagtacagagcaactgatatgctcatacattgtttatagaaacataaaatgatacaactactttagcaaagtttgtcagtatctcataaagttaaacatatactcaccatatggccaagcaattccatttctagtatttgcccaagagaaatgaaaatctatgtctacaaaatgactagtacatgagcactcatagagccttattcatagtagcccctgtggggctgttggaagcttcagtctccacagactcggccttgggtggaggtccgcccagctggggtgaggcagtgatctggctgcgagctgtgccaccctggcctgtggggtctctgctggctgagggattactggtttctctgttgtagtgaggggagcacaaaggcaggggtcagaagtgctggcccgtgtgcttgctctgtacttacagaggcatgacttctttggtcagtatacttcacgtttccaaatcaaggctttttcttcctaaaattggagcgccccatctctgacttttctcacagagccatcctaataaccaaggagagaaatggatgggaagggcctggataaacgggaagacctttccaagtatgtgggagctccacactggcctggttgtgtcctcctcctcggaggtcatttctgtgagctggaaaagtcatctcatttgcagtctggatgtttatctgcacttctctccagggcctcacatccttccaagacctggagcggcacttggcgcattagcctgatttctctaagtctgactgtcatgagtttggttttgggttcagggataaaacattaatccacagtgaacccatcattccttcgaatttctgctttaaaataaatcttggtttaagttgcctgctggcagttttgggcctctgagtcttggagacccttgctgtgtctgaaggattttaagtcagtgggtgagagtacaccacctgctgagaggtgtactgtccccagaggcccacctgtccttaaatcatggactattacttacaaacaggcccacagacacatgccaagaattccagggcccagtgtagattccagcagctgcactctgtccccctttggctatcagtcaaggatgtttcagcgtcaaacctgtacctatcagtatgccctaggagcacagcagagggttggcaagtcagagggcctcacccaaggaagctgggctccagttgggcattgaaggatggacaggattcgttaggatggtaaagaaaggaagcaagttgtcaggagagtgggacctggtgcctcctgcctgtcggaaccagtgagtgcaatggtgaggctgccagggtgctccgtgctggctggtgagcagtgggcagagcagatgtgcagttgggaatacccactgagagaggcagggtttttttttttttctttaagctgcgggagctgtcagagtgtttgaaataaggtgatggttgacagctgtgcctggaaggtaaagctgccacctcccagagtgcagtggagttaggagagcctgggggctgggggctgggggctgcagggatggggtctgcatggaggtgcagaggtggagatggaagtgaaggtatagatgtgggagtttgttgtggctcgtgcctctcagataagaagaggtctctggattttgattgtcaagtctggggatgtggattgtatgagagaatttttcttttttcttttctttttaaaaatattttttatagagacaggtcttgctctgtcacccaggcagcagtgcaatggtgcgattgtagctcattgcagcctcaaatttctgggctcaagcaatcctcccacttcaccctcccaagtagctgggactacaggcatatgccaccatgcccagctaattttaaaactattttttgtagaaacaggatctctctatgttgcctggctggtctcaggttctggcctcaagctatcctcctgccttggcttctcaaagccctggaattacaggtatgagccactgcacccggctagatttttttttaattgcttataatcctgtgctttattcagtttattttaatcatctccactactttgatgaggtaagtgttctttgcctcagtttacagatgaggaaatcaagactcagggaggtttatcaattttctcaaaatttacacagctagtaagtagttaaactaggaattaaatctagatctgtctgtctccagagcccaagctgcttttctcgtcagttggaagctggttctaagtctggtgagaggaaacccgctgtgggaccctgtcttcccagcctgggtctgtgctcgtacatcctcagctgctgtattctcaaagctctatgctttgtcgtttttgtttttgttttctcttcctgaaattaattacccaatgctgagtggaacaatgggatacagaggcttcagagaaattggtttagttttcctcttgaatctgcttttggacaagtctcatttgagctcaggtggtccttttgggtcctgttgctggagggtggatctctcagtctctgagcccagccctggggtgtggtgctctgccccttgttctccgtcagccaagtctgggtgctctgggaaggtacttcccacccaccgtgcctttcagtgggcactccccctgcggggggatcttctctatccctctcctctctagatgcagctcacagggtggtttccgtggcctgcgagtgggatttgggctgaatttcctacagtgactgctttagggatatgccagtagggggttcaatttcagccccttccttgggtccacagtgctcctccacagtgggaacccctagcagctctgaacagcagatccagcctcgagcttattctggcagtgtaaccaggcccttcacacagcaaactgtagtgacatgtcagtagcacatgccctgcggttgctggtgccttcaaaagtgttcattttaggtggttctgccaccctcccaagccagacttcatgtgcacatcttccttattttttcttgaaaaactggaatctgacaagtctagcagagtgtgtttatgaagtgacttcttaagtagcagtatttgaaacctgtcatgaagatatgtgatgatattggtttggctcatgtgattaagtgatctgtttcgttcagagagagtgatggcagaaaagagagcccatggttttgaagaatacctctttttttttttttgggggggagatggagtcttgctcttggagtacaatggcgcgatctcagctcactgcaacttccgcctcctgggttcaagagattctcctgcctcagcctcccaagtagttgggattacaggtgcacaccactacgcctggctaatttttgtatttttagtagaaatggggtttccctatgttggccaggctggtgttgagctcctgacctcaggtgatctgcccgtctcggcctcccaattgaagaatacctcttaaaacatgtttaagttttaaaaagattgaaacaaagtctgtaacttttagcatgcaaccttcatggattctcatcattgggaaaaattttctactggaagcattggcatgtcttttgtagccatggaaactaacccttcaaagagagagaagctcttctatcctcaaacaaggagatacagtgaaaggaaggcatatttcatactcagatgcctgaaatactttatttctgtgtgagtgtgtgtgtgtgtatatatgtaatatatatattgcagatatatattacatatataatatatatattacatatataatatatatattacatatataatatatattacatataatatatatattatatctataatatatatattacatatataatatatattatatattatatctataatatatattacatatataatatataatatatattatatatattacatataatatatattatatatattacatatattatatataatatatattatatatattatatatatattttaaggcttatacaagactcctgcttgtttttgtttatcaatggcacgatgggtgtagttttaggtgattgaagttacatatgcactgtggccaaatacacccagtacaaagcccaaagttgcatgtctttgatcctcattagtgtaaagtccatgtttgtgaaagcaattatttaggtgatttttatcgagcaactactaatggccggggtttgtgataaggaaccagtatacaaagataagacagacacagcccctccttaacagagtttacagtctggtaagttaaagaaaatagtgaaaaaccaattgcaggactgtgaagtaaattctgcaaaagcggagttctaatctggaggactctaaggtagagaaaagtctttatgtcttgagccagccgagtgggatagtatctggaagagcaggaggggttatgcaggcaacagcatgcacagtggcctggtgttgaaagagctccatgccttggaggaactgagtgaactttaggatgtctagagtacacagttcaagggggaagaggtcagaaaggaggcaggagagatctgacatgaccagataggtggtgcattccttcactccatccctaccgcactctcctgctcagggtaagtgccacatgtaaacagttaggtttggtctgtgcagggtggcccagctgctaattcctgtgttctgttcatggtggataactcaacctagtcattaaaagctaggaaacaccgactctgaaaatgattcatcttcccaaaagatgaaaactgttttaaacatcatcaccgtcttttatgtcaatgaaagcatcaacaaccctggctgggcacagtggctcacgcctgttttcccagcactatgggaggctgaggcgggtggatcccttgaggccagaagtttgagactgccctggccagcatagagaaaccctgtctactaaaaatattaaaaaattagctggacatggtggcgcacacctgtaattccagctgcttgggaggctgaggcacaagaattgcttgaacccaggaggtggagggcatgccactgcactccagcctgggcagccgagcccagaccctgtctcaaaactaaaagtaaaaatagaaatgtgattgtcaaatgtttttcttcaacatattttactgtgtaaacaagggacccccattttctcgtcctttttgcccaccagcggttcccatgcatttcttggcagctgtgtttcatgactgctgctggagaatgctgtcccaggccagctgtcttccccccacagacattacctgcaaaggagcaggtcttatttatggggtgctgtattcctaatccctccccaccccactctgcctattggtctcatgcagagagaacatcctttggctatcaccagcttttcatggttgagggaaaaatggaacaaatacaatgcttttgatgaactatgagctgagccagtgccaatgattaaaaattttttaaattgtgaaacatcacacattgctgttattttttttttttttttttacaaaattcctagtttccttgaacagaaactgaacctttatgctttccaagaagttatatttaaacaaaaaagttctttgaatcaaactacatttgcattctgtttcatttccttcatgtctatgtagaggaaataatttaggtctaaagaaggctggactcccctgataaaaatcagtgggttacttcttcaacttcccccttctctttgcctttataagtgttgcctttgtttttttctgaatttctgagccttctgttttactaaaaatctgagtccctagtgattttcgtggcagttttcaatggaggttatgttgttttttgctttgtttcgagggttttttgttttgttttgttttttgcatgtgtatgtaaatatcaaagtgttttgtttgtttaaattttatgtgggtctaattaaaacagatagcattgcaacacaagaaaaaaaaatcctgtatctaaatcaagatgacttccagtggcccatttattttatgggacgtttaagaaataaaagttcccacagcaaactgcgtgtcctcttgcatctgcggcagtcccattccacctgcacctctgtttgtgtgtgatggctggctgcagcctgggcgtgctgtctccagtagtgttggctgagccaggggtccaggagatcaggatgtcagggcctgtaaatcctggggcatgtgagtgtctggtggcctctctgcagaacatgaggcgtgtgcccagcccgtgggggctccactggggctccttagatggaggctggctgggtctggggcaaggggttctctccctggagtggtgcttactgagtgggagtgagggacagcaggtggagagatgagcggaaagggggctgtcacctttctctgtcctgagttggggctcttggggaaaatcagagtgcagtagtgagcagagctgggctttatgccctgtcctccctccctggtcctgattcatgacctccccgtgagccacagccccacggaagggacgtaggatttggagcctggttagtaacgctgttgttctgttgactgggcatatgatgtgggccagcaacaatgcctcgttgagcctccgtgttggcctttgtgaaatggatgtgaaaatcctcctcctgcctcttccactgaggttgtgagcagcccagggggcagtgaatgtaaagacatttggaggactctaggaacaatctaaataaatgaggggcttttttctgttattgttagagaaggggacatggcagagactcaggctgttttgccaaaacccaggtcgctttccccagctgtgcaggctcgtattctgctgaagctgctgttggttattcctgggaccctgggcgatgcagtcacaggtgaaggaccctgggcgatgcagtcacagtggggtgggctcaggctgtgcttgtttcagagacgattttggcttgttctgctgtgtttgtctattccatctaaaggtcttttgggggctggatgagtatggggcgcataccattgttctgtcgtcagagcgccctgcagccatttctcgtgaactcactcagcacttatgcttcttgggtgtcaatgccaccaaactacttggctgccaggtccaagagcgtgccaggctgttgcccagggaaagaaatgggcaacaaaaaatggactaagtcacagcagtcaggtccccgtggaggaggtgctggggaggctggagtcgcagcagcagctgaaaggtctttagaacgtgctgtgatctggtgtcgctgccgagtcattagtccatctctactgaggatccctgtctggggaagttgctgcatcccagggcaactgtgctgaaatcagttgtcttatttcaaaacttgtgcctgtgccctgagaccctcagcaggcatccttcttccttcatatggcagcccttcagatactggggaccagcctctcttctccatccctcctcctgccccgcccagcccgtccttcttccctgaacaggtggacaagaaatgttcatgtggcagatggggtgtcacggggccctgacaaggaaggtccacatgaggggagatgattacactggtgtgctagacccaggggactggtgtggaaagggcagaggtgacagtgaccgtagcatggtggtggttgggggtcagtgacaggcgtcataggtgtttttccaaatagtcgtgtaagaaagttggggcttcatgagaagtgtgtttttgaccacattggtattgatgttaaatccaacccatcacccagtgcttactgaatgtctctggtcttcctcagcaccattttcttcttattttcattttctgttcacgcataacacctgtgaaagctgataggagtcctatcaaatttctgtctgttcctccttgcctacagagaagcaatccaggttccttagttttgtatttaagcccctttctggactgacaggaagcctgttttcgttagtttttttgtttgtttgattgtttttgagacaaggtctctgtctgtcacccaggctgcagtgcagtggtacagtcacagctcactgcaacctcaacctcccaggctcgggtgatcctcctgcctcagcctcctgagtagctgagaccacaggtgcatgccattgcacttggctaacttaaaaaaaattattttgtagagatggggtctcactctgttgcccatgctggtctcgaactcctggcctcaagcaatcctcccaccatcacctcccaaaatgttggtatttcaggcgtgagcctctgtgtctggccttgtagcctggttttgatcctcatcctcctggtgtctaccttctccttcctctgctcctgcttttccttccaggcatcgtgttgaggtgcttagggtagattcagcagctgcatggccttgtgtgcccacgtgctgtgagcctcagtgtctatacaagagggtgatagcagcccctgcctccccatagtcactcaccagcggggatggggtaaggtgttgctctgggctctggttaggttgcaaggctgagggggccacccagggtaggggacacatgtattcatgttttggtgctcaatgagtagagttttctggtgaattagaggcaggcagaatgcatttggatggggtaagccagagaatgtgtcaccaaaagcatgagacttgagcttggtcttgaaaggtgcactggattcaaagatgggagaaggctgcccaggtggatggaattctgtagacaaaagctcacagggttgcggaattgagaagagtgtggccagagtataaggtgtgcatttataggatgggtgaataaggctggaatagcacttgggagaaggctggaaggccttgagtggcaggcagaagcatctgaccttcatccttgagggaggcaacaaggagctgtgagacattctgagtaggatgccaccagggggaagtctgggtctgcagcgacctggagcagagagggaagcaagctctgatgaaatgctctggccgcagctcctgtggctgcccagggaatgggtgtgtgcagacaggcctgcataagacacttcacagctgtcctgttaggctgttagggagattccttactgagtaattgcttctcaaccaggagataaaagggaatatcttaatgacctagagacagaagatctaccacatgaggcctgaacacaataagggaaaatggcgagctggccgtggaggctgctccagatgatatgtctagttttgggcacactcatttcatgcttctgggcgatcccagcaattgtgggctttctgtcctatagggacattttctggcctcctgaaggagtaggagtagggcttgttttgttggatacaattttttgtacatagccttcctgcatgcctatatgaagtggcgccaaggggaaatagagacatgggaagaaatacatgagaaatggacagacaacattgtccgttcctgcctgcaaggagcttacagtctagctggtaagctgaaatgaatatgtaatagcatgaatttgaatttggttagtagtggagttatatcttctaagcattcaaatttttttctatttggaaataatttcaaatatatagaacaaccccaagaatagaaatagcacagtgaataatccatgtaccccttaccccagttcacctaatattaaattttacctcatttactttttcatttgttatctatccataagacatgtggactgatttttaaaaatattttataatttattactgtccttagttatttcagtgctcaaatttcctaagatttggctagtaggagctacttctctagctcctgtatccttatgacatatctccataatgtgttttggtttgtttttgttttttgagcacttccttattttcttcatcttgtacctaccctacccttgccctggaatcacccagttctccaaagtcccctggttccttttaatggggaatgttattagagaccaagatgtgggtaccaggtgtgcttgtacctgccagagcatctttgcttctaagtcctttcaacaggcagacctaggaaatatatgcatttccgtacacatattcatacacatacttacattgatacatacacatactcacatatcagcctcttttaaaaatcagacattggaaatcagactttaaaataaacatcttttagaaatcatcagttcacacctataccttcaattccagcctgtccccagagggttcttctctgttccgtgtttctgtgtccctccttccacagcgagaactctggctcccagcagcattagcacatgtactcactggctaaatcctgtaatatgtctaagatagtttcagaatggtctcatccacatcactgcaaaaaacaaagctactgaaaagagttcagcatttgtttgtagttcatccctcactccaatcctacccaagactgagagtatgtcgtcaaatattcatgagctatttgaattagttttgtctttctccttcagtctggttatggtattcatttgaattacagatttgtttgtttcaaatcactttcagtttaggggtattttcccttcatctcatccttactgacttaatttttaaaaatttaaggtgaagaacattaacatggttcccaaagtcaaaactatagaaaaaggtatacttaagagtgtcactccaaccttgattcctttggcctaattcattcccatcccttgttttctgctctttcttttagatacacctgagagaaatatgctccttttatttcccagtttttcgtgtgtaaagggtagcacactttattgctttttttttttttttcatccaggcacttcttatttatcttttgatcagacacaccataaccaaaattctggtttggaacaagaagactcctagcatataacagttgttggatttttagtcacttgcaaaagtctgttggtttctaccaatagctttattaaataagctttgtaaaacaatctcttagtaataggattcttagaatatgatgaattcttatgcaaagtggagtaacttttttcccatcattgcaaagtttgatagaaggtgcctcggacttgaggtgtgattttcaggatcagagggtcagttgtgatgggaatgggttattctcaactgagcagatagtgtacaggattggcagtgggtttgccagctcattgcgatcactctgagccttgggacccatgtgtccttctatgtgtctcccaatcctaacgggtttgtggcagcttagagcccattcacagctagtgctaatttttctccctttgataatttgagaaagctcttccatttgccttttgaatgtctctcttatgtctggattcaacaactattatacatttgaacttcacgttgataccactctttgtgttttcaaagccttactgaatgtcttgcttaattcctgtgaaacagcggaacaggtattgttgtgtctgtttggaagtgaggaaactgaagctcagaacacagcagtgacagagctaggactagaagccaggtcttcagacgaagagcccagagtggtgtaggagggccaaggatttatctgggtttatcacagggactctacctccctgcccccttcctccatcctgccctgtggccaacagatttctactgtataaacctcacctctgtccacatcaataaataataccttcctgctaaatattcagccattcagaactgtctaaaatcagttcagagggtctatatcagcagctttgttatatgagcttttgtgatagtgaccatcattgtgagtgggccataaaccaggacttggcagggttttttactcctaggaattttagtcagagtagagttttacttatgcctgcttacctgtgtcccagcagtggaaaatgtacaacagtgatgcagcttgttagaaatgggatttttatatttgtaatgttaaaaaggcataaaatattacaaaagaaaattagnnnnnnnnnnnnnnnnnnnnnnnnnnnnnnnnnnnnnnnnnnnnnnnnnnnnnnnnnnnnnnnnnnnnnnnnnnnnnnnnnnnnnnnnnnnnnnnnnnnnnnnnnnnnnnnnnnnnnnnnnnnnnnnnnnnnnnnnnnnnnnngtagaagttagttcatcaatggacgttcattttataatgtatgtaattatacattataaaatgtatataattatataatttaaaaataaaatataattatataattataatacattataaaatgtatataatgtatgtaattatgcattataaaatgaatgtccttaagcttctcagggtaactcttttactatcttcataatttttttcccaagaacccatatatgatatggacccaaagtaagaataccttgtttgtatgtaaccatctgaatttagtattctaagttcggaatcaaaacatgcaaacagatttgtactaggatacttttctggtgaataatagaactgaaggtccacttttctttgagatgtatttaagaaaacagattatataattcattttcctgcagatacatgacatgccaagccctcttactgttgctcagggatgtgattctggattgagttgtgattttttcagagttcagagaatcatttggtgaatttacctagagctgagttatgtatttcccatgtgtcaggaaaccccggaggcctagaaaccccaaaccattctcagggtgtggtacatgtgaatggcgagacactggagtccttacttctttgagacagcaggtgttctttgggctgggaggtcagagcacgtgtctgggctcagatcggctcctgctcactctctagatccacaaagcctggcctccttccttattcacagggggtggagtggagactgacagccctaacaggaccaaggataggttccagggagtctggaaagtggggtgatttagaagctatgagagggatcctttctttttcttttctttttttttttcctttctttctttcttttttatttttatttttattttttttgagatggagtcttgctccgttgcccaggctggagtgcaatggtgcaatctcagcccgccgcaacctctgtctgagtgggattctttctaattgtgggcagagggtggcacttggtgaggattccagtttcttatctgaagtattagtgtcactgggtgtgcaagcatctgttcagcccctcgacagcctagagttaagagacgggtgtgaatatggggttagttttgttgttgttgttattattattattattattttggagacagcgtcttgctctgttgcccaggctggaatgcagtggcatgaacttggctcactgcaacctctgcctcccaggttcaagcaattctcttgcctcagcctcctgagtaactgggactgcaccaccatgcccagctaattctttttattttagtagagatggggtttcaccatgttgaccaggctggtctcaaactcctgacctcatgatccacccaccttggcttcccaaagtgctgggattacaggcgtgagccaccgtgcctggctggggttagctttatgaaagcaggtcacttccccattcgtgggttgggttgggttgagttgggttgggttggcttatcgaggtaggaccctgaaagagacatgctggctttgactcggaacaaaggcaagaaggcagacagaagtaacctgtgtcagaatctcaaggtctgtgtgcagaaactgcattgctgtaacctcacctgcttccttggcagctttttactaagtctctaactcacatatcttggctcctataacaactcacggttggagatgcagatggttcctcatatataaaaattgggtaatcgtccacctgactctcaggcttgcctgagtatgtggggttttgtatatatgcatagtcagaggcttgcacacatggtggaaagtagcataaacaccccacaattgggaacatttacctgtctgccagatcttttccagggcaggtgttcctataaatgggcagaaaatcatatgcctcttcccctcctgcagggaagacttttggggaagaccatgacaagtagcaggggttaagaaaaacagtaatgcttcatcagtgctcgagttcccatctgggaagggagaactgggttgtggagggggtggggactgccctgactccatgcactgctctggcccgaacctgcaggtgatgggtagaggagcctagtgtgggcaccagcaaggactgctgcctgctcagagctcttggtttggacaaaaggggtagcacacaatattaatgcaaagtttgtccaaaagcattgaagaagttctaaacttggtactctttgaccacagcttggcccatttgggtccctcctctttgaggaggctctggggaaagtggggcgtctctgagttcaggccccttgttggggggtgtcagaggcctgccatgacagcacatggtgttttgggcctaggccccttgagatcgctgtcatcgaggggagttcattttctaagaaatgatgcatgtgtgttggtgtgggctctgcgactctgacccccatagtcttgctttggaagacactgtcttctgtcctgtccaagtgtgtggctccattgctgtgctcatgtgactatactcagtgctgtgtgtcctgcccacaagactgttgtgcagtagggcagtggctcaggatgcaggtccccaaggatgtcctgatatgtgcttgtcctctttgcctccttcagagaattctcaaaggaaagagagaaggcaaaagcacggggagatttccagaagctccgggagaagcagcagctggaggaggatctaaagggctacttggattggatcacccaagctgaggacatcgatccggagaatgaggaagaaggaggagaggaaggcaaacgaaatagtatgtagcgcctttcctgcccctggctagacagacccagtgtgcggttcagacgcctagcagtaggccttcctcgactctgacccaggctgtgagtgggacagcctcctcccagccatctggtcccttctgcctgcacacatcacggagagaacaggtgcattggtgctgactctggatttctgcctgaggtttggggtttagagttgtatttggtaaggtggctttatagccaaggaaggtcaaacggacccactgttggcctgggaaattcagtaagcgcatttctgtgcgggcacaggggtgatgagacacatattcttgtaccacaggagaagaagctgtggtttccctcacctcagagtgaacagtgttattggacaagaatttgaagtgcagggttcctcttgactcttactcttaggccacctgacatggctcctacatgtgctattcatatgaagccatatgcttagcccatcaggggctgggaggaaaccggctcaccattctaggcaggtgttaaggggcacgtgagtcagtgacagctgctttgctgtcacccatcgacaccccacactgtgacactaagcaccctagagcaccttctgcaggaggcaaggcctgagaactcagtccatcactgacattaattgccattgtcaaccacggtgtctctttcactgcatacttttcccacagatgcgctcttattctctctggggccctttgtgcctcgggtcagagtggaaactggaatccagcaatgcatttgactgagatgtctgtgacttgcttcaaatctagaagagttggataggaaggaccaagaacgtacttcaagtgcacatgtccattgagaggcctggggacccgaggccggccctacgttgtagaagatggccgagcaagtccctgcttgagcagagcgccttggatgttttgctctcagcaaggcctgttgctgggtacaggggaaacccagagctggagaggatgtggagtgctgcctcctagggagagacaggcctgtcacactaaatgcagccctggggagcagagctgcagggcacacatagagggcaggcaccgccgacgagggatcgaggacagggctggagggagcatttggcctgggccctgaaggatggatggattgcaggtgtgaccattcagtgtcagaagaagcaccctgacccaggggactagcgtgagggaggcgtggaggtggacaaaggccaggtttcagggaggaagcagtgggcccttcagctggagcacagagggtatgaaggtcggggtgagctgccataggaagggtgggtgaggtgcaattgtgcctcttctggaggttgtggagtgtgtaagtgggggctgagagacccctggtggagaggcttcttgactgagagggcccttacctttcttcaagcctgggctctgtgcctccatggggagggagtgtgttccgtgatctcagatgccctggctggtgcaaaccagtgtgctgactgggagtgggcagggtcaggcctctcttctctccctccctgcttcttgccaggctcaggaaggggccaggactttagcacctgaggatcagaagactgagggagggtttctagagctaactgtttgctgaatgcaagttcagagtttataaatagacattcatgtgagtctcagactcagcgatgtgcctatgaagtgatcagatgtaagagtgtctgcctgtcctctgcacagctctccccttggcagttgagccaacgtgaaccccatggctttcgtggagcttctgcacctgcagtatggcaacaggccatgtaggtgcagcttggagatgcctgcaccgctcttttccccttcacttgcaaactgtaactcagatgctgacctgccccatctcccctaaacccaacatgttatttgtaaacgagaggaggtatggcccctttttctcagcagagtgtctttctttgctagtttagctgtgtcccccagggagctgagtgaggccttcttacaggccagtggcctttcctctgtttatttctcctcctctagaagtagacaaggtttcgtgttctagtgttgctaacattagtcgtggtagagttgtttatagggcctatgatttgaggattaagggttttcattggatttaaggtgatatcttgagggttaaccattttatctcagcccagcatttcctatgacctatcactgtaaaaacctgatgatgacagaaatcaatgactctgcctttcagagaacttgccatgaggggaagatggagaaggagtggcttagtgtgagaagctgatcccattgttaaggcccagcactctgctgtgtgagcccaggagggcgcgatgattctggctggtgggagtgggcaggctggggcgatgtgaggaaggctccgtgggaggagcagccctgggcggcagaggttgggggtgggggctttttcaagctggggaaatggcacaaacaaggtgtgcgaagtgacaaatattcagggcccttaagtgcattgctcagtaatataatctaggaaagaaacaaaacctgtttaaaagccttgtagatcttcagaattcactctcactggggctcccaagcccataaagctgcaatgtgtcttgggaacatcagcagtattgtttctgctatgcaccgtgatgtgtgactcaaaatgattaactagcttaacgtttgatccagaatagcaaatatttctgtggtgcgcccttgttctttatggagctcgttttgccaggtgctggggtttcctgtggagtgaggctcacagtgcttcccgagtcatcagatttccagagccttgctgatgagggttttaaataaagacagaaatcttggctgtggaggccatgatgggatttagctgacttgagagcaccaagtctcctcctcctctgaggagagaacctctctgatcacagacctcagcagcccagaccctctggaggagacagcactgttgaggtttccctggggcctcctgtggctgccagccattttcttcctgtcacagccagaaaaccacacaaggagagggtttcagtgaggcccacatggtcctcctcaccaaataaacagtcctggattcaccacatgcacatgccaggtctggggctgtctctgtgcatctgattagcaggcagtagaaatgtgggtgttgccagtgttacggtgtctgcatcctccctgggggtgtgagatcaccccacgtgccttccactccaaccctgctcctctgttacctcttgagaggaggatggcgcagggcccgggctcctgactttgtccataatggctaaggatgctaattcaactgagagcccttttcagctgggtcctggatgtgagttgagcagtttcctcccagaccttgaggattgaagtgacagtgtgagaagaaatgcttcctgatagccgagcctcagcctagatgagcagaagtgggtgtaggaagtcattaataacagcagatgtctgtgagctcacaggaggcaaaggcttgggctggagggcatcttgatgccccttctccggatgtggctgcaatggagttttgtgacttggaatttggactttagtattaggcaaattactcaacctctctggaccccactttccttgtctgcaagaaggggataaagatatatctccccatggggctgttgtgacaattgaacgttctgtgactgctaggagtagtcatagttgtagtatgtgctgctgctgttttcatcagacaccagtaaaagttgacctcaacagaattttaggggtataaatttagggggtacaaataccgttctgtgacatggacatattacatagcggtgaagtctgggcttttagtgtaaccatcacccgaaaagtgtacattatacccagtaagtaatttctcatccctcatgcctcttccaccctcccacccttctgtgtctccaatgcctattattccatccacaccctatgtccatgtgtacacattatttagcttctgcttatcagtgagaatatgcagtatttgactttcctaaacataatatttttgaaggttctcctagaccgctaaccagcctcagggtggggcctccctcttaggaccattgccctgtgcttttctgttcagaaactataaagttctgaagtattgatggaaaacaaatctgttaactaggtcactttcgagatagggcagcacagctttcaggctcttgaagtccatttctagtttggcggtgcttgctgtcagggaacagatgtcaaatcaagtacttggagatgcgctcacattatcttttctctctgatctgctaaatgtcactgcatgcgtctgcgatgcccaacactggctgtacgttataatcacctggggagcttggatgcttcttgatgccatactccaccctctaagactcttgattaatcttggggtgggagccaggggtggctctttttcattaaggttccctggggattctaatgtgaagctagggttcagaactcctgagtccaggatgctatcagtggctgaatatcacactgttccaggcattcacttgaaagaagaggagaggcaatcaggcctctaactgagctgtctggtgactggtgacaggtagctccagctttgtgcattcatagaatatttaaaatgtcaatttcataaatttgctattagaaagctggtgttacacaattaactgaatggacaaaattccctttgaagtgagttcctgagcatttggtaaattttcaaggataatttatttaactttttgctgagcttcaagtttcttaagaaaccctgccaaatctcaaagtgatttttttagacatatgcagctgcttctgagttaacaatggagttttgctaggaccattaaaatctggaagcctaaaattctattttaaactcttctcattgtcagtgattagtcttaaaaaaaaaaagcattaaaaatgaaatcattttaaagggagctcattctaaaattctggccagaaaagcagggcaattttattgtaggaactattaatgattaataattcctctaagtaaagatatttgatgcccaaagaaagggaggggcatacctgaaacttcatctctgaccacaagggcagcctctctgtcttctgcttcttcagtggtcctggaggctatgggcactgcccctgcctgcccggggactctgccaccctggggcttggtggagcaggttgccctagctgcctctcttttgcatgtgctacctagttgcctcttactgcaatgtttgctttgggggtggacagaaaaccaggacgttatagctggttgcaagcataaggcatagcaatttgctggtcctgttttgaaagactgtgttttgaaattttgatttacaaaactgctttcatcaccattgaactacctcaaggcacaagttcaaaatggaagatactcaattaaaagctgtaaagcaaacagcagcagttagagtggcatacggtaaatatgcgtccaggtcaagagccctcactggagaggcagctggaagtgctttcactgggaagtgggagggctgactcaggggctggccctagggtcagtggctggacactgtctccattggggtggcactgggagtagttgtctggacaggcagactctctccacaggggtgatagaaagcagtggtaatttctaaaagtgcctgcatgtctgccatcaccttcagcctcctaagagctgatgggagctggactcagggactgttgccccactgtggagacaaggagtgggtactccagccaagtttgcagtctcaaatcagggttgttttatttgtttttaatacattttaattatggaagtaatatttgcctacataaaaaattcatgtaatttcaaagtatataaagtaagaaaaaaattctctcttccttctccttaaagagaggcagacttagaagtttggggcctctacttccccacctcactgcacataatacatgacacagaccgcatgcatatagcttccaccctaagatgcccaacacaggtatttttcactgaaccatgtaccacagatatttcccatgtttttaaagcaaaatgttggctcttttcaataaattgccattataaaaactgctacaatggactatgcactctacagcacgtggacctctactttatagaggtctctccaccatgagaccatcagctccatgggtgcagcaggaatagggtctgtttctgccctctgttgtgtggctgcacccagcacagtgcttgtcccatacatgagcatgccattacttccttcttgaatgaaagaacatagagtaataataactagcatttgtcaggtgctttctgtgtgtgagacactgttccaaaggctgtgggtgaatacattcattcttcttcacacaactctgtgagacaggaacttgacagatggggaaactaaagcacaaagcagttcagtagcttcccaaggccatgtgacttacgtggcaaagctgggatttgaacccaagctctgccacagtctgcaggctaactatcattaacccctgcaaacacatgcccctgtgtctgcgtgctcgtgttcatggttttgtgggagaggatacaagaaaagggtctgctgtgtcagaaaggatgcacattttaggaacgtgagtattctgcctacccatagtgtgcaggtgtctgtgctgcccatgcccttgcttactccagcattcctgctgctgtctcacactgcttcgcacaaccctcccctagagcacagggtccgtactctaaagactagctggcttagagtgatcatggaatcatggggctgcaaggggttaaagatcctagagtcatttctctcgtgacctggtggtcatgggagagtcgtagtgatgacagtagtggtggttgattgtgccttgccaaagctgggcacattgcttttattactgtctccactgttcacctcttacaacaaccttacgcagtacaggtccaattattattgacatcttacaggtgtggaggaaactaaggcttcacagtatcaggtaacctgtccacagtcttctgacatggaagtgacagggctggggttagacctggcctgtcagagtccagagcccaccttttgaactcccacctgtcctgtcccatatggtagtgctgtttggaatcacatatccagtctgtacagggctcctgactccccctaaagtgccttttccttaataccctacttagatgggaagccaaaccctggaaacctttatctagcatgggttagctggttgttgatttagaacaggttcttaaagacaggtgtttgtgtaatagctgtggaaagggcacttcctctccgctgttctgatgctgagctggattcctagcaggaggggtctggggcaggcgggcgtccattgcgtgaggcaacctggctggcagggctggccgcgtggggccctggtttggctgctgttgctgccctctgctgcttcataatgaaattgcctgtgttcaacctgaaggggtcacagtggccgacttgcttaaagaggataagaagaaaaagaagttttgctgctttcggcaacgcagggctaaagatcatggtaaattgctgagactgagctttctttttccgcaacatctctgataccttttccttgcacataggcattgtgtgaagtgcatgtgccgtgtggtgtgttcagaagatgcctatattttaattgcttgatttctttcttcttgtctttttccaaaataatgtgcccttaccaagatagcattgcagttttctttttgtttgaactgtaccttataaagaagcagctgaaccaactcaaaaaatgtacttgattcggcatgaatattcttagactggaaggcagacttttaaaatacttttccccaaatgatttttttaaatttaaaccgtttagaaattccaataatgttatttgattgatttttttttctccaggctacatgtttcaaattgcttctctgtcttttagtctctggctactttgcccaggactatgccaaagctagtagtggcagctttaagaatgaaattagctggatgcagtggctcacacctgtaattccagcactttaggaagccgaggcaggaggatcacttgaagccaggagtttgagactagcctgggcaacaaagtgagaccctgtgtctaccaaaaattgtaaacaaagaagcaaacaaaaaaatcaggtgtggtggtgcatgcctatagtccccagctacttgggaggctgaggcaagaggattgcataagcccaggagttcgaggctgcagtcagcgatattgcgccattacactccagcctgggtaacagagtgcgatctctgtctcttaaaaaataaaaataaataaaaatagacttcagggatgcaaagatttgggggcacttgcctttgaaagtgagaatgggctcgtgtgggaaagttatatttccagatatgtcctaaaatgatgctaaacatacccttcctcagaatccctggagtagctgtcaggcccatccccaggcagacagttaggtgagcagctggctccctgccttgctctgcccaagtcatggcagtggttcgacagcagcacaaagctttgcctatgcacaccagcacagtcgacccagttctgccaccaggatcggccctggtcacctgactctggggaaagtctgtttaaggagattcagaccgcagggacgtgaagccaacaactaagggaacagaggggacacactgtactcttttctttgaagtggcctctggccccatgggaatgctgagctgagaggttatgggacgcagatgggaacaacccgtggatatctgaagagggttatattagagtctaggtctcatcagaaggcctaaaagtgaaaaggaattaagagattatcagatataagcccttgtcattcagcacgttgtggaccccaaaggagggagaagaggaggtggaacttgcctgaggtgggacagtgagttaggggcagagttggggctgccttttttatctgtagcattcacggaaggtttatgaacaggaggctgggcttgatgcagcacctgaaggtgtctgcaagaagaatggccttcagctaagcaggaaatagtgtcatggacataagaaaaaacatctttaaagactgacatagggatatagctctggagaggttaccaaaaggagataaatgatttctgtccccagaaaagaaaacacccctccttggttctgccttgctgaatgcaggcttgggccttgtgattctttaaggattcttgtgccttctccattgtctttctgagatctgcagggagaggaagcaggctgacacatttaaggaactttattttgagtgggaatggctttttattgactgaaatacctggggactcaggaaggactccgaccctgctggcaccaggtggggcacgagccctcatatggatgctgggctgcccctgtccctgaacacgcggagatagttattgtctgggcataattcttgcttgagacatggaaaccttggtctggccttgacctccattctccaagaagagcctggcttctttacagcagcaagaggctgttactctgtggtggcctaatgtgtctctactagcatgtgcatgtgcctttagggggtgtgtgggcttcttctggatttggcaggcctgtacgtcatggtactgctcatgtttgtcatgaaaataagatgaaaacatgaggtctaggtgtcaggtaccctgtcccctaggaaggcagccacaactcagccactgctcagttgtccagcctcaccccctacccttacctttgaaaagaatgagaagctttaggctgcttggaggtggaaggaaatgctaaaataaattcctgagtgtgcaaaaaagtctgtcctgtggagaacagaggagtgaggctctgaggccaaagacatctgtgaatgaggctactaatgggacaggttctagacgaggctggagggctctgggctcagtttgatgtgtggcaagccttcccttcggggtgccttgactggaggactgaggctctcctgtgacgccctgaggcctctggggagctactgcttcctgtgctgcaccccattctctgggacattctacatgcagagcacttggactcagttctccagtgcaggctgctggctggacccctggcttccctcctgagggtggtgggcaggggctcacttcttgtgccctcccctccttgcagagctgggggaatgcaagggaaaccccctggttgttggtagtaaaaccagccagcatgtgggcgtttctgccttcctgcagttatagcaggtcagaggtaaatggatcttagagatgatactgtcctacaactcatcttacagatctggtagccaagcataggggaaaagaggcacttgtcccattgtcacctgatgataagaaccaggctttcctgacatttcttccatcatttttgacctcatcagcctccatcactgaaggttgatctgagattttgctatacctgttaatggtgaacataattttgaggctgcctgcttaggacccacacatagactcatttgctctgtgtgtgtgtgtgtgtgtgtgtgtgtgtgtgtgtgtgtgagatttgcctccaaattcacaagcctgacacatttggctgagatgaatgtcgtccttcagcatgagagtagatggataaatgtctacaccttggtgaaaatgctagttgtgcttacctgagaagcagcagatttccctggtttactgtgtgtggcattgcccatgataacatctggcccagtgcaagatcttaaagagaagcaccatgacccacatccacagagtgctccaagtaggggcctggcccggctgcccatgctgcaaaggccttggaaactctaattacagtctgggacatgcagggctgctgtctgccaccatcctctcacccccagtggcacccaggccccccgccaccaatctcagtgcaccacactgtaagcctaagggtctgccctggagctcttcccagagatcccaatgcctggaatagattgcaaaatataggccttgagcttctccagattttcagcaggcaaattgcagtgccagcatcctctcacaggtcacaggctttcctaatgcttggtttttcccagactcactgaaagtagtttttaaatttatataaaaaataaacttctctaacaaagctctaacattccagtttcctgaaatgtgtcagggaagaggcttcacagcttgttcatgtgcagatggcccctggtgcttatttctacagtaggggactggcacttgtcggcaatgtggggaggtctgaggggtctgcctgcacctctaataaggcctagccacttgtcagcaattaacactgaatccctgctgaaggggacaaggccatcacctaaatggggcagtcacaatgctatggaagccagttaggagaagcccatgtattcgggtaatttgcccatggctttaccttcatgagtttgtatgactctttctgtctggatttttataaaagcccagtcgtcaccattgcagcctgatttttgtgctgtcgtcggtcactgagctgatatcctgtaagtgatctggttatatgccagattttgagtggttaataaaggtcatcagaatagtaaaccagcactggtagataatagactcgtttggctttttggaacttgttgatttgtggaattttaagtacataacaccaaaatgtataccagtgaaaccacagtacatacttgaaaagaatggtgagtggaagttaggagagatttctcagtgtcagctgtgtgtcccaaggcattttggcgagttctgtcctctgagaaatcaagagtttgctcacgtattctcagaagccccttctggttctaacagtctatgattcttttctttattttttaaaaacatagatgagatcctattggggctaaaggaagggaaagtcatattaattttttaacattaaaaaaatgaatgcctaatgcaagtgaagggtaaaatgctttatttttaataaatgaggtctttgttatacccactgagcctgatcttttcaaatatttttggaaaaggataagtgtgatatttcttctggaaatattttggaaaaggatcctgtgatagggagtaagtggctggagaaggtaggctgccagggccctggtcagagtgcgtttcctctgcccagatttaggggctggatcaagggctgtttccaggaccaaatgaggtctccaatttctagcgtaggcactgtcctctttctttccgtctgcctctgctcatcctcagccctggcaacatctttttgggatatatttatttattatgtgcctgtggctctttaggtgtcaaacaactatgacaggagaagttgctatgcctacagtaggcaaagttagacaataactcagctaaagacagagaaaatacaaaccaagaatgatggccaaagctgattcagaggtatggaagatggctcacactagatgcgtctgtgcaatgatgaaagtggccagggcaaaatgacactggattggtcgctttgcttccagggagctccaggagagcttttctgagatgatggagttaacatgtgtgggcctcactgatcatccagccctggggacccagcactccgcatgcctcatctcattcttacccttttacaggtgaggcaatggagatgtacagaagtcaggtcacaaacgcggggttaaacttagatctggccaacctctgcacctgctctcagccactatcccaacccagctgaaggacagaatcagctcagagagcaggaggaccctgcctcaccctcagtggagccctggcacagtgctgtgagactatcttcccctctttgttgctgtttggggagttcggttttacttcttgtctttccccacagttagtctagggagcaactagaacatttcatacactaatagttggcagggggccagaaatgctaactgatgaccccattcccatagaaaatatgtaatttatctgtttcaatcagattgtttttaaaatgaagctttagaattgaaatgctgcaactgtaccgatatcagcatgagacatgactccagagattaaaaagccacaaagacttagtcttttcagaagtttgctcttttgaaaataatgactaatgttcctacatgattaatattagaactatgagatagcaaactgttaaagatggaaatgaccctcaagattgtggagttcacaccaccattttagagacaggaaagtgaagcctggagagaggtgatccattgcccaggagactcagaaaacaggaccaggcctgtgggttccccacatcatactgccctcaactcctggtcccctcagtcactgcagtaaccaccacggaaaatgccgcacagagttaactcatgatcagatgtgaaaagggtctcccactgtgattttctttgttggatttaacaacctcctcacctttctgctgaatcagagtgaggaacagtcgaggagaattgcatgagtagcttcttgtgtgtctgtgtgtgttaatggagtttttttttttaaggtttttccatgattagagtcgtattttttgtttgtttttgtccagttttttttgtttgtttgtttctgcatgaaataatgaaaaagtaaatcaaggtttgtaattggtttcttctcacttaggaaagaagaaaattattctatgagagtaccagcaatgtaacatgagtctataattttactcacttggtcttaacttttgacacccttgcctcagtgttcctgggcatggcgtggaggctcccatgcaggcaggctcagtttctcgggcactcacaagcggaacggatcagggatcttctttggtatcctcaagaaacttctcagaccactgggttccttgagccaggttccacctctatccctgctgttacctttatgaagtctgctatgagcaaggcgggccgaacacagccccctacgcgagctgcctgatccagctcctttccccctgagcctgggctgggcctcagaatcttcgccatagcgcttccagcccactaccagtatttgcagatgaaacttgaggcatccttgctaaggggagccacacgggcagagcccatgggccaagctttcctgaagacatcgtaaggtctgtaaaaacagtcactacagttcaaagccatgcctcaggaaaaaggaagtacacgtggattctcttccgtgacttcctcttttacctctgcaccccggcagaattaatccttctttactctggaacctcctgcacagacccctgaggtagctctcttcacagctgatggaagtgagctgggggctgcctgtccctcacccctattccaggtgggtgcagtgctgtgtgccctctttttgcccctgccctcctccactgcctgggctccagcacgtgttcgtgatgtttatggggttgaatcaagtggatgagaaaagacgctcgtgcaccagatggtggccctgggtggaccctggacctccacacactagtgggcgtgtttccacatttcctctacttccgctcaggatcctaccatggagaagtgggatgggcccagagaccctagtcatactgagaccagagtcaaccttgccctctgctcactggttgataatgatcttcttcttccactcgtaacactataattccttggtgctctagttgttcttacccagcttactgggtaagaactttctgcgtattggcttcacaagctcagcagaacttcagcatcaggtaaaatagcaaaaaaatagagttcttaactctaaaaaatgttgtgcatggtaccttcatgcactgccttccccattcacaatagctcttctccctcagtatatttaagatgattgactcatgaaatgttagggttattcacagatgttctatatgcaccttttggggcaagcaaagatgtacctgtaaagtacattttggtggcttctcagtgtgatcccagagatgaggaggataaagtggtgctatacccagccacaggattcactttgatcccttagcttcctttcttggaaatgtctagggggatagaatgtcctcctcgagggggactgtgttccctacaggccatgggtgcagagactcgcctgcagtggagatgcctggctccttggcactcccttagcccagctgaggccctgagggcccttttcaccctcctcctgggttccggaggtctgcctggtggcagaggctcccacctggcctgcctcccaggcgtgcagtgtgccccgcatgctctctgaagcccgtcttctccccacagctagcatgcccaccagcgagactgagtctgtgaacacagagaacgtcagcggtgaaggcgagaaccgaggctgctgtggaagtctctggtgagtgtggggagcacttgccctctttcccctcctgttgtctcagagaagcaggtggtgaggaagaccgcccaggctgcagcagagccccgggccatcgccttgggtgtggcgggtgggaaggctcctcgtaccccacgccacgcttcctcctgtgccagggctatccctcctgcacacctccccaccccccgcccccccgccccccggcccagcatttcacatgcctcttcctgtaagtagagcccgtgaagaatgtggtggttaacctggccacctgctgtgtccattaggtgctggtggagacggagaggcgcggccaaggcggggccctctgggtgtcggcggtgggggtaaaggcctgattctccttccagcctgggtttggcatttgtgcttttgaagaagagcttctgtggcagagttgctgactagaatgtgctacgtatttaagttttcctttgctcatgggaccttcctaacctcaggcctggcggttggatgacgaggccctgccttcttggtgcctggcactttttccctggagccctgcaccagcctctcctcatgatggaaggcaccattgcattaacactcactggcttttttctagatgatttgggctgtggcagctggcgggggggctgggggggaccagcagtgcagaatgtgctgggcactgtctgccgtgggggagccctgtgcggtttggttttgtttgcttcttgctggtatccttcaggtcttatctctgtaaagtgcaggtgtcatttttaagagaactcaatcttactcttggcagagtttcataaaaatgatgtgttatgggcagaatatgcaaccatttgtgaagtgattttgcctccattctcttgctctgccctctctgagacatcatgaagcagacagagaatgggtttgtcatccccactttacagatgagaatgctgaggcccaagacctgctgctttcccatactcacccagtgggagaatggcagtgctgggactcctagtgcagtgctccctctgcggtagtagcagcaaatgctgctgtcgagatgagtggcaggagagactctgctgccttcattttggcccctgcatcactgcctgctgccagggcctgcagggaatctggccgagtcttccctgacctgggcctcgagggtgctcagtctgctcctctggccctggcagcatcctaatttctgctctggccttgcccctgctggcctgctgtggtaaccaggggtgctaagtccaggctgtatgcatggcttttatgatatctcagctgaaatgatggggagtgtgtgctcaagccctcggaaccagaatcttaacactttttgtctttctttcagtcaagccatctcaaaatccaaactcaggtcagtatcttctttctgtttcttcgtcagcctgtgtgttgcctttgtatgttctcacttctgaattttacgtagtattgctctggacttgagttttcctctgtggattataacattgatactgaattgcagtcagtcaattgaatcctatgagcctggcttagggggagatcttaggtgccaaagatctccctcaaagtaaaccaataagactcagtaacgagttttgcctccccattaatcctccttatcctctgagtcattttcctaagagagctgctgcttgtcacttttctgctcgaaagctttccatagaaagggagttcaagaagtcttccaaggtactagcatttcttgatgtgcatgcgggttacgtgttcagttggtaaaactcattgaaccatatacctatgattagtgtactttttcatctgagtgtcatttttcaacaaaaacattttcctactatatataaacactaacttaaaataggcaaagacctaaatataaaatataaaatcatgaacattccagaaagaaaacaggagaaagtctttgtgatcttgagttatgcaaaggtttcttaagatacaacacccagtatactttctgtaacagaaaacaaacagataaattggtctttgtcaaaattaaacttctgttcttcaaaagaaaagaaaaaggttagcttcagacttggagaaaaatatttgcaaagcatatttgataaaggactggtatcccatatatataaagattaatgcataaaggagagtgtcaataatagaaaaacccaataaaaaatgggcaaaatttttaataggcatttcaccagagaagagatgtggatggcagataagcacatgaaatgaccatcagttgttacaaaaatgcacattaaaatcacagttagataccactacacatctattagagtgaatcagatttaaatatctgacaatgacaagttctgacaaggatgctgattggtgggaactttcatacagtgttgatggacatgtcaaatgacacagccgttaaaaaaatagtttggtagttcctcataaagtttaaacatatatttaccacgtttatatttggcccagccatcccacttctaaggtgtttgtataagagaaatgaagatatatgcctacatacaaagttgtaacatgaatgtttgtaccagttttattcatgcttaccccaagctggaagtaacccaaaggtccatcaaatgtgaatgggtagacacactgtggttcaccagtatgatggagtactagttcatgtctgctgagttatgcatcctaggagaaacccagctgtgagcgggacagtctttagtgtccttagtagagtttttccacgctggccaacatgttagaagctgctctttccattggaacctgcacagcaagagtaataataaaatacaccttacttgatccaggttttggtaaagagttggcacaactctttctctgctcacttcctgggttacagattttctttttgcctagcaacacagctgagtcagccagggctgcagcttgggtagcctggagattcctcttgactcaggcccccagaggaagtaccccattgtcgttagtgaggcagcacagcctggagaggactgactttaccaattggctgacctttccacgggatctgggtcactgagctgcagctcatggcacactttaccaaagcatccccttgtggcagggaaggttttctagaaggagacaggctaagggagagaatattttctctaatcacaatcaggaactgaaggtaggtggaggacatgctacttgtctgtttggctgagctcattttatttttatgaaaacacgattcaatattggctcttctcctaaaggtatattttgagcatcactagttagaaagggcacctgatgactcagtatgaagattcatgtcctactcagctttgacaactctgccaggctctggaggaacctcagagatttaagaaaggattgaaaaggttccctttaaaaaaaaaaaaactagctttgtagcactttgctgcctggtaaattctgtatggtgattgagatgctgcaagagatgtgtataataagcgaagtggctctctgcactgattgcatgagcagatccacgtcccatatggtggatataggaactgcatatgtgtgcaagtgtagttttgcatctgcacgtgaatctatgaatatctagattttctaacccacttaagggctgcatatgacagattctggagttatctataagccataaggaaggactgatagcatgatcaagtcaagattatacttttaaaagtcgcattttaagaccaacataatttttatgatgaagtctgttaatttctgtgccatttgtgctcatctttctttcctgcactcccaccccaatctagacctccagagtgaaagccaaattatctctcaatcatatttattggatactcagatgctgtatctgtcatctacgtagtaatgtttgcttgtcttttagccgacgctggcgtcgctggaaccgattcaatcgcagaagatgtagggccgccgtgaagtctgtcacgttttactggctggttatcgtcctggtgtttctgaacaccttaaccatttcctctgagcactacaatcagccagattggttgacacagattcaaggtacaagcagaggccattccttttttgttctgaactagagatttctgtggctgtccaactgccatttggtcttatctgatcgctgcatgatgaagtatcgcaacatttctagtgaggacaaacttggtagaaccatccagacacagcaactaccagagcgagggtgccatctgtgccgcgtggtgaagcaccttggagccacttaatgccaagcatctaattgtcctaaccctgagccaacctaggaccaagaattcttgaagctggaagggacctcgtaatccctgctccctgccctcatcggggaagcttcattttcccctatagtacttctggcaaatggttttggttcccctgctttgaatgctccagcactggggtgtgggacactcatccctagagacagcccattctgggtttgacagttttgagcctttgaaaagtccttcctttcatccagtcaaacccgtttccctctacctctccagcctgcttggtgatattttcagctgttagaaatgacattgataggtgactgcttctgatatcgtcatgccataaatgaattcagacagatcttttctgtgtgattgaatgaaaaaatatgtataacctgatggtgtcaacgcagaatcgtaggcttttagggctggaaggcgtcagagattatgtgatgagctgccccttcccattttgtcatcagtgacactgagacctggagaaatcaagtaacttctccagagtcacacacatagctagtagcagaagcaggaccagaacctggtggacagactgtccacgcgaaggccacgtttctgtcctgagtgaggtagtgaagagagagacaaggtattggcgtatttcctgtggggcctgatagggagggaggtgtgaggggcacgagcagtctgagtgtcttgcaggagaccctgaggatgggtgcccctttgtctttccagatattgccaacaaagtcctcttggctctgttcacctgcgagatgctggtaaaaatgtacagcttgggcctccaagcatatttcgtctctcttttcaaccggtttgattgcttcgtggtgtgtggtggaatcactgagacgatcttggtggaactggaaatcatgtctcccctggggatctctgtgtttcggtgtgtgcgcctcttaagaatcttcaaagtgaccaggtaaggaaatgtgggtcccactgcaaatgttttatgaacatgaggcggcaaccagtcacatccccgggcaggtgatgttctgctctgtcctgcatgggtgttctgagctgacaccctcatcttgacttataggcactggacttccctgagcaacttagtggcatccttattaaactccatgaagtccatcgcttcgctgttgcttctgctttttctcttcattatcatcttttccttgcttgggatgcagctgtttggcggcaagtttaattttgatgaaacgcaaaccaagcggagcacctttgacaatttccctcaagcacttctcacagtgttccaggtgagtcctccctccattccccgaaaagcacttcgtgagcagcagctaaaactcctctgccttcttgtctgctcacactcaggaagacaaaaggactccatttttgttcatctctgccctaatcatagcctggtaaattttgtgccatttaagttattcgttctgcatcatcctccagctgtctatcttaagtgatgtaatttttttaaagacttctagctacattacaaaataataaaccaaaaaaaccgtttttcacactcaagctcttccaagaaaactttttgattgattttatgaggtttctttgaaatagactctaaaattcttttctctttggtactttttgatggcaggccagttcataatcctagttataatagatttacacaagaagtgaattctcatgcctccatgctttggtgtgtagttggaggaatcagagtggtaggaactgtggcagccattggtcccttctgtcctcctcctgggatgcagtgaggacacaaagattctgagggtgcctgtcctgtggggcctctgcaggcagtagctgagaagggagcggtggttgcagagaggcaccgatggctctgctgctcagagcagcagcacatgctcccctgactctacgctgaggtgctcaaaaccctcctccttggacagggtctgatggagaagtttaaaagacccacctgtcctcattgcttttcctgtgtgatgtgagctgcagagccctgccagagaggaaaggcagcagacagctgggtcctgtggtggccctttccatgcccagctctctgctgtggatgagtcacttacccatttctgaagaaatccagagaccaaagggaatgatctggacaattctctcccacttggtcattttcaggtatatataatctgctgtaagccatagtattgttgtttgaattatacttaaattttggctgctgatcagtgattcttttttaaaaaaaaatttctttcagagaaactggtgtctttttttttttttttggtaatgcatgcatatggcacaaaattctaatgttacaaatgaataataattctcccagccagccacaaatttcctcttctaggaagcaaccaccattaaacagtttcttgtgaattcttagatctgcattttctgatagctacaactcagttaagctacctataggagactttccacagacaggagctcactgtacgtgctgttttgcatcttgcttttatcactttgagtgtcctcaagagccttcctgcttggtccataaaaggctgcccctcctttgaaacgctgcgtccatgcggtggtagatgtgccgttgttcatatgaccagtcccttgctgacaagcattgagttctgtctggtcttagcccacatacacagggctccagtaggtgaccctgaacacgcatcagagggcacatgtgttggctgtagatctgtgggataaactcccagagatggaattgctgctttagagggtgtgtccattttaaatgttgacacacgtgcccaagtgctctccttatggttgtattagctcattgtcttcacactgcccattgcctcactgcctctcccctcagtggagagcatgctttgggatgcccatcagttaggtgaaaatggcatttcattgtacttttaaaagatactgttcttatcaggagtgaggttgaacgtcttttcctatgactcagagccatcagtagtgccttttctgtgaattactttatcttttcaaatcatttgcccatttttgtttggttgtgatccataacagtttaaattttaaaaatatctagttcagattgaagataaaggagctctgtctgtcgtcggaagatagcatttttttcattactgttcttattcatctgattctatttcatcatggattgaattatcaagtatgatcagtagagaagattaaatttcaggtcattggtgatatctactcttgaggtagttttgtaaatttacatgagacatttagaatttcctgcttctgtaatttcataggtataattatccatttccacagttgatggactatgtggaatgctatgcagcagttaaaagaatgagatgcaccttctgacacagagggtctccagagtatgttgttgaatgaaaaaacaagccagttgcagaaaactttgcatagcatgatatcctttatgtctgaaaactcagagaagacacctagtgcttgttttctttgtgtgtaaacgtgtttaaatctgtagttgaaggttccagagagacacagaaagagcatgctttctggggaagggactaaaactgggctggggtgtaatcaaaaagcacataaatcttggctgggtgaggtggctcatgcctgtaatcccagcactttgggaggctgaagtgggcggaacacttgaggtcaggagttcgagaccagcctggccaacgtgctgtaacactctctctactaaaaatataaaaattagccgagtgtggtggtggtcacctgtaatcccagctacttgaaaggctgaggcaggagagttgcttgaaccggggaggtggaggttgcagtgagctgagatcaagccactgcactccagcctggcaatagagcgagactccatctcaaaaacaaacaaacacttaagtcttaataataaggttattttttttcactcaaagaattatctatttgtgtaattaaaaaacagtgttttagaaattccatgggataacagatggatttgttcagtgcaaactggactgtgaaaggcagcttaaaccagatctaggcagccaccgaggggctctaagagagcggctgcaatttgtgaatccacctgctggctgataccagtttggcttctcagatcctgacaggcgaagactggaatgctgtgatgtacgatggcatcatggcttacgggggcccatcctcttcaggaatgatcgtctgcatctacttcatcatcctcttcatttgtggtaactgtatccttcaagccgaccaggctttgttgttgccgtcgttatctggttttgtttttcttcctctgcatttctctgtggtgatggtggtggtagtagttgtggcagggaggtaaatgcctttaccttattagctcaatatctgcttttcttccatgctgctgggggacagcgtcctgtaagcagaattccagagaggctttgagggatgcgctctggctaagagaagcaagcccagggaaggagcgtgagacagcacacatactggtcccagaggtcactcagtttggcatcatgtctcctgtacaggtcccgagggatggctgagcgcaaggccaggtggttctttatgttatcattattgggagcttaggcgtccatctgtgacttcctaagacccttcgtgactgatgagagccatctttgtggactgatctgtgctcccctgggctaatttcactttgctgatctgtccatctttgcggatcaagtgtccattggctagctgctaaatcatgctgcataacttctctctgccttactttaccccttttccctgtcgagaggcaccctctaatcctagacttctggaattggcccttagatctgtatttacctcattcagacccttcctgatcctatagcctttggttctcggtgttttatctccaggtcctccatgcctagcaccagacctggtacacagaggcctttaatgaatgtttgatgcatgaacgacgtacacactcatgatactacatctgggttttcacccttccattttaaaaggtcctaatctggattctgcttctaaggtggcccagatctctgtaggtgttttcttctttatcttgtctggctcactgataaattttcttcagtgtggtaacctcagtgcaaacctgcccccttttctacaaggacaatgctttgtgctataaggtattttataaaaaccccatctcaacacatatacatccttgtagtcccttgactcggctctaaggccccctccacaagagccacccctgccctgtctcccacccagagaaggttcttctacctctgagctccccctcagattttatccacgtctcttactgcctgtaggttcttctgtctactggatttttatttatttattattattattttatagaaggagtctcactctgtcacgcaggctggatggagtgcagtggtgcaatctcggctcactgcaacctccgcctcctgggttcaagtgattctcctgcctcagcctcctgagtagctgggattacatgtgtgcaccaccatgcccagctaatttttgcatttttagtagagatggggtttctccatgttaaccaggccggtctaaaactcctgacctcaggtgatccgcccgccttggcctcccaaagtgctgggattacaggtgtgagccactgcgcccggcctgtctactggaattttgagtgggcattcctccatctccctaactagatggataagcttcttgagtcaggaatctttttgtattcacatctctcaatagagtacaggatcttgcacatagttggcccttggtaaatgaaaggtcattattttctttttctgctgtcctatggttgactctttaggccacagcaacatcctggacttgaatctgcagagaagtattccctggtgcttgtctgtggttgcatgttgttttctttatagcacatgccactgtatcagaggtgcttagggagctgcttatgctctgtcttccccaactagagtagacattccagtgtgtggtgtttcttcctgtgccctcagcacccacaacagtgcctgacacattggaggtacttggtagatctttctggatgaattccagagcatgccactctttaggagggtctgagtaatgcctctcaatacagatgatggattttgctctggaaagttgttacaagcttgtaagatcttcctgtggctcatcactctggatttgctttccactacccaaaggagttgagtgtcatggcaagactagagagattattgtttcttcactgagatcatggagggaatactcagtacagctagtctcatcactagcccctgtccgagttaccattaccccaggcctagcagaggaatgctcatgttaccaagccatctccagcccaggactaattgcttcctgaggctcattgcagctccagttaaaaaataggccagcatgtcaaaggctttttgagtcttaatgtaattcacttacgtttctctcctctttaaaaccttgaatagattagtcaggcgtgctattccctcacagagatttcatcatctgttccttgttaggttatgttggtttacgtgttcagcaacccatccaagacaacaaattgcacagggcgtatgggacagtgctatgctgctcctgtctcggggtctctgggctcctgcagttttgcctgcagatggccgggcatcaggcagagagaagcatttgtcacagaagggggccttctcacttattgccctctcatccctgtgcttctcaaaaacatgcttcactgctagtgggtaagaaacaggcatcttctgatttaggagtcttgttcagaatacttgttaaaaacaaaaacattcaagaaagccatgtatacaacattagagtaagagtgaaaaaatatgataatttgttcagtcacctaaccttttattgtgttttttaactggaactgcaatgagcctcgggaagcaatttgtcctgggctggagagggcaaaaatcaagttcaggtacagtgatcaaagatcgagctgcagtgagactattcacaacagtccagcaccaggtggcagtaagtcagacacattatagtcagtcagtgtttgtggagtgaaggaatgaatgagttatctgtagactctgaaggttatttcaaaggagaaagtctcatactgtcttgtgcaagggcatcatcatttgaataacttgcaacctttgaagtggtctgttttggaaagcactcccctgaatatatatgttgtagttgtagtatgtgtttaaaaaaaaaacccaaactactttttaattataccatgtttatgttatagattgttttataaaatgtataacatagctatagatacgtagatgtttggacacacacacacacagagaaaggttgaaattagtgggttttcatgggttttagtgaatcttaattttacttctgtagactgtccttttacaggtttttacttttgttttgttttgttttgttttgttttgtttgaaaagcagggctctggtactctagttttgctgtgtgagtataacacttgggacggtcacttactaccagcttcccgggatgcagaggtgtgtggcgttgccattgttggccgcacgtagttgcatttagtagtgtgttgtgcccttaaaaagttgaaattagatattctactgaatgtcttcttggccatcgctgtagacaatttggctgatgctgaaagtctgaacactgctcagaaagaagaagcggaagaaaaggagaggaaaaagattgccaggtaaccctattttcccctgacgtgtttgtccaggggctgtgttgggagccctgcaacagttgcagcctgccaggcttacccccgcatcacggcagctgcagcccccgggttgctgctttgtggatcatggttgaccatgcactgcagaccaaaacggatggaatcttgggcagaagccaggctcttggctgtcatccctcggggctgagagtgggagtcacgtgtccccatgcttaaagaatcactgcagttaattttggtgtcataaaataaatgatgcattcaatgctgattagctctcagatgagaattttaataagatggtctgtgtaatgaatccatcgcattgagattaccaggaagctctgagtttgggttgtgctaggctcttgtggttagtgttgtttctaattaaattctgtccttcattggagcattattgattcagaatcctgattagcatttttatacagagtaacatggttatttggtttcttgtgctcttttctcttctctttagaaaagagagcctagaaaataaaaagaacaacaaaccagaagtcaaccagatagccaacagtgacaacaaggtatgtattctaagatgcttctcccctttttgtttcaaaatgatcctgttgatctccatacatgtaccatttacactgtggaagtgtcttgtgtatcattcttgtaatattttggtgtgaagaatatggcacaccatatagaccctggcttcccaggggggattctggttgaatttaggcagttagttgtgtttactgatatttcaccagaaaaccaatatgataaagaattgactagtttgaccacttatgttttctttattggaattgtgcaatcagccctgacccgtggtcaggatcacgttagcatcttctgagtgggtatgaaaatcgcggatttttaatagatgtctgtttccagaggtaatcccaggatcaggtggcctcagggctatactgtaaaactgaatcccatttatgacagccctggttgttttgttctttctctgttcatcgagttgataaatgcttactgagtggctatcatgtgtcagacactgaggattcaggaatgaagaagacaggtccctgccttcatggggctcacagtctggcaggaagacaggagtatgagatgcattatcacatggtatgagtgaatgtgctggcacagggcaaggacagagccctgaatggtgctggctaaccacgactgggtcagggttcagccttcttctcacctgccctcaggccttctgtctgaagcagaatcaccatctggggacatctgcctgtccctgcacactcaaatacagatgcagctttggggaggaatccatgccctatgctggaccaccagggtgacttttcctctctgaagtgattttaagtcagtctcccctcctcccaagacgtctttgtcatcctaggttacaattgatgactatagagaagaggatgaagacaaggacccctatccgccttgcgatgtgccaggtatggtggcggaggccggagacgctggctttgctgtgtgtctttgctactgctctgtgaccacctgccgagtctgcggccagccagcccagcagcgtgcacatgagctgctgaggccaccaaggccgtgggaccagttagctcgcctttttcccatggtcacaggcagaatgtgtcactcaaattccaggtgatggggagggaaagtgcaggtgggtcagggcagtcccagcttctgctgggagactggtccaggaggccccccggtgttagcgctcacctgacacttttatatttgactggcacatttattggctgatgtgggtgggactgtggagttgggagcctaggagctgattgagactgaaagtcccacacagtttctcaggctagtctgagcgaggaggttactggggaaacagccaggtgttgggaggttggcagtgagaatctcagcactgccacctttcatctgtggtcagatcttacgctggtgggaatctcatcattcccgcaaactaaacatgctcaccagacggggacacttctcagcaccccccacccctgcaacacacactcagtccatgttctgaaggagcaggagggttttgattcatgtaagcaggtagatgttgttaaagtttaagccaaatttgcatgtgaaattaagaataattcaaacccatatgtagtctttatttcatgcctataaaaaaagtatttcatttaaagtaggggaagaggaagaggaagaggaggaggatgaacctgaggttcctgccggaccccgtcctcgaaggatctcggagttgaacatgaaggaaaaaattgcccccatccctgaagggagcgctttcttcattcttagcaagaccaacccgtaaatactccccttctagtctctcacggctgcctcttgccagtgaccctacaggttgcttgagggtggctcgggtgggggtgaggggaagtggttcacagccctttctgaacctgagtgtccctggcgccctcacccaagtcccctccaacccctctctcctccactgttgctcttgccctcagctcatctcttcctagctgcctccttcccacaggggtgtggccaggtcctgggaggagctccattctaggttctcctccctgccttcacccctgcatggggacagcaatggggaaagccttgtccaccccagcatattccagctggagctcactgctctggtgttccatgcttcggccagccgtggaaatttttcctaatgagtggatcttctgttaggatgccttgtgggatgagaatttttgtgaccaaggtccgcatagcatcctcatcctcatagatcccccacttgattgatcagttttcccaattgagttttatctttgtaaagtcatattgcacagtgatattttatgggttgtaagtattcagttcagctctatgatagtctacttaaaatagcatttctcatgttaaaatgataaggtgctcacaaggaacagggtaatgactcacaagtactataagaggaagacgtttatttactagctagtttctaggttttaaatcatctgggactgagtggaatgccaggggaaataaatggctcctggaaaggtttctagaattgcagaagtagttcttggctgtcagagaacaactctttataattcattggccctagggagacacaggtgggaagcaaggcctgctggcatcctcagagatatgaagatgtgatggtagcttttacagctcaccactgtttgggtgttctttaaaaaaaaaaggttattaaactgatattgctgacacctacagccctttgtgtgtgtgtgtgtgtttgtgtgtgtgtgtgtgtgtgtgtatgtatgtatgtatgtatatgtatatatatatacatatacatatacatatatatatgtgtgtgtatatacatatacatatacatatatatatgtgtgtgttatatatatatatatatatatgttgagggaatgcatttattttcacctaaagctacaaagcactcctgccctcactagcttggaagttctttcccagactcaactgctaaccaccttcaggtcctcaggggggtacgcccagcattaaataggcccaaaagggaggacttgaagtgaggggtcgccttacataaagttgactccagtttgaaagtggaaaaaatcttttccaaggaaaagctatctatctataatagtcttatagaatacaggaatacagataggtatatatacatatacacacgtatatactttagaatttaaacatatacatacatattttagatatacatatatacacacatatactttacaatttaaatatatgtgtatacatatatttatgtgtatgttttatatatatgttttatgtgtatacatatatgtacatatacatacataaatacatacatgtgtatatgtatatgtttaaattctaaagtcaaacattgagggtatggataaccagttgctaaccaggcgcagggcacattgaggacagcagcgaggttctgatggcccagagagccatcgtttgagcccaggtgtcaggcatgagccaccctccattgcttcacgagaccacaggacttggtgagaactctcatgccgggccatgagatccttgcatgttagcaaatgatgctccaaccttcactttctgaggactgcttgtgggtcaactccaaaatttaaaaaaataataataacatctattacaaaatctgcagacagccagagatgtcctgaagtctcagttactgcaggtcactataaatagtatgaccttgcacctgcaagacaagcctgggattcatctcattctgtgtgaactgttgagggcaggcctggcctcagtttcctctctcagtcagggaagataaacagatgagtttcttgtcatagtggaaaaacttcagtgatgtagacctggatcgattctgcccctggtccttactagtgtcactttagaattctcttattaagcctcagtttccccatcttgaggaagacaacaagccccacttccaaggacttggcagagtggtctgtgtggcacccccagcacagaggtgacacaccacccacagtccacaggttgcctttggtgggcttcgagaggctgacggacaggttgctcaggtgtgccgggcagggtgcatgggcagcacagcagacagctgccctctgcctggcctcttgctgcagtggccccacactcttaaggacccagtgtgttccaccctatctgggactgtttccaagcagcggcttttccctgcaggatccgcgtaggctgccacaagctcatcaaccaccacatcttcaccaacctcatccttgtcttcatcatgctgagcagcgctgccctggccgcagaggaccccatccgcagccactccttccggaacacggtaagtccccagggtggggctcgctctgggatagccctggcctctctcgggcagaggccactgtagagatgggagctgtggaggccctcaaggtgacagctagagtaggtctttccttcagctggggacgttggctgtttccggtttgtaagtgccagagagcttgtgttttagctgggtaaatctgaatggaatcattaacttagaacttcatcttaaatactctgcaggaacggtcagtgaattcagggagcctgcttctccgcctctttgctccctgctgctgatatttaggtcctcctttccctccctgctcaggtttacactcacccctgttttgagattcatgcctcgtggaagcacacagcagggaggaagcagaattcaaaccaggcacaccacatgcccaggctgtcttgttcagggttggaggcaagatgcctatgtcgtgtagacttaaatacaccaagctgctaggctccacgactcaggagaaatacaagttagggagatgataggatgtcaagttgaggtgttcagtggagaagaacattaggccaggtgcactggctcacacctgtaattccagtgctttgggggatagagggggaggatcactgaaggacaggagttcaagactagcctgggcaacataatgagacctaatctgtacaaaaaataaaaaaaattagctgagcgtggtgtcacatacctgcagtcccagctactcaggagactgagggaggaggatcgcttgggcccaggaggtcaaagctgcagcaagcaatgtttgcaccactgcactccagcctcagtgatacagtgagaccttgtctcaaagaaaaaaaaaagaatatataatgaatgttaaaaaatttcttctctgggaagatttattataaaatatgtgattatgttatatatttcacaagtatctccaaagaaagtgctgaccttggccccagatagccaatattaagtttgagtaacttcatgaagcagagtgcaccaggcagagccacttggacccttaagcatgttaacttagcggtttacaatattacttttcattggtagaattaggaatatacaaagagttattaattggctgggcgtggtggcttatacgtataatcccagcattttgggaggccaagacagtagaatcgcttgagcccaggagttcaagactagtctaggcaacatagtgagaccccatctatataaaaatttaaaaattagccacacgtattggcacatgcctgtcccagctacttgggaggctgaggtgggaggattgcctgagcacaggaggctgagcctgaagtcagctgtgttcacaccactgtattccagcctgggtgacagagcaagaccctgtctctaaaaaaaaaaaaaaaacaaaaagaactctagattttggtgtggcagaggtggctatccagttagccctctgtatccatgggtttggcatccatggattcaaccaaccacagatagaaaatgtttgggggtggccaggcgtggtggctcacctgtaatcccagcactttgggaggccgaagtgggtggatcgcttgaggtcaggagtttgagaccagcctggccaacatggtggaaccccgtctctactaaaaataccaaaaattagccaggtgtggtggtgcacgcctgtagtcccgactactcgggaggctgaggtatgagcagtgagctgagatcgcaccactgcactccagcctgggcaacagagtaagtgagactctgtctcaaaaagaaaaaatattttgggggaaaaaatgtactgaatttgtgcagatttttttcttgtcatttcctaaataatttacatggcatttacttgaccttgggtatcttgggaaatctagagatgatctaaagtctacaggaggatgtgcatagattatatgcaaacactacaccattttatatcagagacttgagattttggggtctgagagagtcctgcaaccaatcccttatggatactgactgtactaagaaaacaagtcaagggaccgggagcagtggctcatgcctgtaatcccagtactttgggaggccaagacaggcagatcacttgaggtcaggagttcaagacctgcctggccaacatggcgaaaccccatctctactaaaaatacaaaaattagctgggtgtggtggtctgcacctgtaatcccagctatgcaggaggctgaggcaggagaatcgcttgaacccaggaggcggaggttgcagtgaactgagatcatgccattgcattccagcctctgcgacaagagcaaaactctgtctcaaaaaaacatacaaacaaaaatacaagcaagtcaagggttttctattagttagttttgtaacttagagatggtgcccgctgactgtgtctgtgttgtaaggaaacttgcacctaaattggctcttgcctcagcagccccaccttagctgtgcagcttactcggcactgaggaccattcaaaggcaagacggctagaagcagcagcctgttgactctcaggcctagatattatcgtgcagtttcaggttattaccaagaaacccgaccagcagagggaggctggcgagtgtgcaagcatcaggtgtccctggcttgctggtgggcacctttttctgagcaccaggttgttagagattttagggttaagacacacctgcagatctgtgcctccaggactctgttgggacaaccaagcctcatgctgttgcttcccatttctggagcctggcaagccctacctatcagatttatgaaacacgcactccgatatgaagagaaaaagtgctttccccatggtgcgtgttagtgtcaatataaagaggaaggcactgggcctgtcttgatttgtcctcacagattagggtttttgttagagagggtttagttgctctagatgccccaatagaagaaagacctctgtgtcatttcattccatcataaaaaaaggacacaagggcagtgtttggaaaaaaacagcattaggtgacaaactaggccaggagctagtctaggattcgcattgacaagggattaatttacatgggggtttcatgtcttatttttaattataactgcttctccataagtttatttccctgctgccttacccaaaaatgttaccgttctgcttaaatagatgtacatatgtgtatgagtattgctttttagattctgcagtgttttgtatgttttttaaccttagccgaattcttagtttaaaaaagagagcgagagaatgcaagcagagtgagggaaaaaaacagcttaaatttcaacttcagccctggcgccaggttgccttgtagacttgtgggctgcagtgtctttctgggctactagatgctttccatgttaatattcccactgtgacctaggaaggagtaaggaaaagttggctgaggcctggcagtgcacgggaagacaccttccatagcctggccaagaaactccattacacagaagtggtcccacagaattcataagtccaaaaccagaaacagtttggaaagtgaataccctctgaagagagagactgggcttgaaacagaggtcctcgcattattgtgacacagcccccaggcgactcctctacctccaacagctcacccctgtgactcttcgctggcatacgccaggcctactccttgctctgcagtgcctgtgactagctgcgtggcctatgcgtgtgtccactccctgctcccagcagccacatctgttaaaggattaggcctgggtggtctccacagtcccttctagctctggtctcttcagttctttcaaaaccatagatcatagttgtcatgaagatcagtggccaagaccaactcgcctttgcagataagggtgctacggtcagaagctcccggtgagcagctttcctggtggtcagacttcttgctgctggcccacttgcctccacggctccgaggagaagcagggaccccagaaagggctagcaggactctgctgatgggataatagatggtattgtcaccaatgaggatagagttgcctggactgaaaattcaaagaccaggtcagtctgttatttgagtgggcccagcaaggttttttaaaaaaaaccctgagtttagagagagcagtgtgagatgcagaacaacgggcaggagtgctggagaccaccaatgcaggagtctgtaaaaccatcccttgcagacttagccagcccagcgcatgagcagggaagggtgctgacgccctgattacacaggctggaatgcgagggggcatatggaagctactggctccgacagatgccgctgccatcttcatttatgcttctccaccaatctgatgctcagatggagggcaacatacttcattcagccagaaacgcggttaaaaatcgaaaatgtgtataagcctctaatttatttggtgccacaagtcgtttgtagatgtagcactctctgatgagaaaagcttgttaacaaagcactcttagaaatgagcctctctgcctgtccaagacacaagactgggaagcaagtcggtgagtggttaaaggaggtcaggattctcaaacgctctttgggaatgatgtaattgaccaaagtgggcattcacccgtggctctgcacttaccttcagaatggcagggttttcctggagggatgggtctctgactggatcgggggtttctgcctgtaagcatgcagatgtcagagtttgtctgaattccttttctcactcccacatgttgtgccttgcagatactgggttactttgactatgccttcacagccatctttactgttgagatcctgttgaaggtaatgaattttccttgatcttcacatactccacagcagctggagcaataatagttgcacttctttgtttgccttccagatgctaggttacgcagactatgtcttcactggtacttttgcatttgagatcattttaaaggtaacaggttacccggcagtgtgtttaagggctgctcctgcgtgtgacacacaggaaagaagcgtggagtgcttttgattttttatgggttttttttttgtctttcgtggttgagctaagttttttttttttgttttttaaaccgaaggatttttttttcctgtgaccattccaacttgtttttgctctttttaacctttgaatgcatgtaggagccactctggcttcatgatagtggttgagaattacattttgctcatttaaaaaaaataccctctgtaatttgtcaactgataacacatatatctctatgtgtgaacttttttccaccctttctgacatcaaagtcagaggaaaagcatttatcctatgaagaggatgtctctctttttgtttctctgactgcattatgcttttggggacctaaaatagtaacacactattttcttgcaataggatttgcaagatgacttgggtctatttgtgttaaggtattttctgtctgttttaatggatgggcttacatttacacaaaaggagcgccctttggccggggtgacctaaatgtactgcccatgcatgagctaatggctgccattgctgcttgtggtttgtggactgactgtgaagtctgccccatggggagcccattccttatgtgcttagagtgctggagaccacagcagagctccaagaacctatccaaaactggccaagaaccacagggcgtgggtcattgtggttctgggagaacgtggcccatcagaactgtcagggcaaccatctcctagcaggaagacaagctgggaaatgaagacttttaaccatggttttctttaagccattggggaatttttgtgtgtgcaattcaggcaaaatgtattttgcatcggactactgtggaacttgggctctttacaaaatcttatataaaatgaaacttcaattaatatggtcagggaatgaggtggttagttttttgaggttggtttttttatttttttattttttggttcatgaaacagcataaagccaaccaacaactgtttacccctttcttaaaagtcttctaaaaatgtgagttcattttcctgcctttaagccgatgaatttggttgacacttctcctaagtcagaggtgtgcagtgggatggtgaccagctcttgttgatgaggcctctgtgggagggcctgtggatgcagaatgcacagtggtgggggtcggagggatgccgccagaacactcaccggctcagcttctgcctcagcttcttggttttagaatttgacttcttttcaaagtgaatggggagctgttctacttagtctgttagcctggttaattgaggttttattttactctccacattttttagttgttaaatgaatatagttacccttgggctttggggaaaattagacacaggattatttaaaaggaaaaaaatgattgttactttttaatttctgtagaattgcttcaccgacttaaatcttctgagtcattcttcattttgaaggtattttagagaatggaaaataagctaaaacaagaaggattcagaaaatggagactcaccaagaagtgtctaatatctgagacgatggttcctggtggccttggggacatttggaaggctgtttggttatttgcttaagccctatgaaattgccatttttgtaggtcaaaaagggttgaacactggcgatttcataaggttcaatgtaatatttcccacctctacctctcttatactgtacttacctgagccttctccaaccttttttgttttaaaataaatagtgagctgtatatattttgctatttttactttggggaactaaactctttttccatcaccaatagaaatctcactgaagcacccataataggtgctccaggtacatgtggcaggtgagcacagagccgttgagactggctcaggtgagatgccacctggcttcctagccatgcctggcacgtgtcatcagacttggaggaattgcttaagatggatgcgtcattaaagaccattaggaacaataaggggcctctgtggaaaagtgacgtaggtccatagagcctgggagccctgaattcaagcccccactggaaaggcttaattgaaacaaggtaggctctaccagggcctcagaggggccagaaccagcgctttgtggggaagtgggctctccggacagcacttaccttttgacgaatgtagtcctgtggagcctctcttagacaggctctttggacatgccaacagtgtattcatacttgaaacctgtgatcactgtaataaagcctaaattggtttcttcttttaaaatgtatccaaaataagctggccctttttgattttggtttgaagaaattatcctgtggctcaaccccgttggtttacatttctgacttcttaatgcacacttgttaatgaagttatactttcctcaagattttgcaaagagcccaggtttcttttcctctggagacaaaaaatggtaaatcatccatgattctgcttctagatgacaacttttggagctttcctccacaaaggggccttctgcaggaactacttcaatttgctggatatgctggtggttggggtgtctctggtgtcatttgggattcagtaagtattctggggtgtgtgcccagaattgctgggctgaatggtttatgtaagggattttaacataattgataaaggctgggcatcattttcatgattatatttagttatataggtttatttaatttgctcccattccagaaagatttaaacaattcatgttttcttgtgtgtgtgtgtttttttctttttgtgcctgctgctaagttgagcttattactgtctgtgaaatttgctttcaactgaggtgaaagaagtgttgactaggagggagggaatctaggttctagtcctggttcctccaaaggctgattccagggccttgagggcatcctctctcaggaaccctgtgccccttttatataggaggggctggggccaggtggcctttcagtttttccagcttagatattgagaacttcctttgattttcaggatatagaacctgctaggactttttctttggcctcaaaatttttcagctaggagggagccaaggctgaaagtcagggccccaggtcttttccatggcatttagcgatttctggtgggaacagccattgctgagtactgcttaccatccccaggggtgtggggcagaggctccagtagagcatcaggtgtggccttgctttcttgctggcctgtgagcacttctgttcaggtgctgagcatagaatctcccctgtatgagcacacatgcacacacctgccctctaagctaaagagaagtggaaaggacctgccctcctaggaagaccaaaaacctctgcttggaacagccctttgtgttatccttctcgcctgccactgagggaaccctgtgatcatagcttggaaggccatttgcattaacatctttgcagctcctattaactcccaggctgttcatgtccaagctgcagccttgcccacttcctcctgagcatgtgttctggccacactcagccacctagggtaaagcagaaagctgcattctcttgtgtcgcatctttgtacatgctgctccctcacactggagcccccctccctattgtcctcgctaacccctactcctcctttgggactcacctggctatcaccacccccaccccagagtccttcccaggctccccctgccccacccccacaggttgtgctcccctggctgagcacaccacatttacccccgtcatgtgccacactgggttgggattgcccatctctccaccagactgtgagctccttgaaggccagagaagccctggtaccaaagtgctacagcagacctccaaccttaaacaaaaacaaatgatatatgaagcctaaaagccagctactacctagtatttacagtgagtggaaagaacaaagagagttcgtgagttgtgtctctgccaaggttagctgtgcacctgtcagcctctgtgagtgccatgggctgggcttgggaggtgctgcctcgtgtgggcggggaggagaagtcgcctctgagtcgtgaagagagatcagctcagcaccacatggatcccacgctaactgtgcagggatactaaagtgaagatccagtgaaagggtgaatctcaaagcatcctgtccatttataacacgctctgcctgccgtctttctgctccttccctagatccagtgccatctccgttgtgaagattctgagggtcttaagggtcctgcgtcccctcagggccatcaacagagcaaaaggacttaaggttttgattcctctcctccctgctgggctggcttgggttggggttggctgtaattactggctcttctgggcagagctgagctgaggcctgatggatttttaaagtgagttataaggacctttctaaccaattcagccacctgtgccaagtgctaatggcattttaaaaattattatttattgtctttatttttggtaattgaagatatttttctttgtaattattgttcatttattacctttttattagtagttctttgtgtttattttagtcttttatttagtttatttagtctttcagttttcatgtagactgtataaaaggctactgggtttctgttttcctgagtcatttatggggtggggaccctttgggcccatgtgccaggcagcactgcacctgtagcatttcttctttttttttttttctttgaaacggagtcttgctctgttgcccaggctagagtgcagtggtgtgatctcggctcactacaacctctgcctcctggggtcaagcaattcccctgcctcagcctcctcagtagctgggattacaggtgcacaccaccacgcccagctaatttttgtatttttagtacagatggggtttcaccatgttggccaggctggtctcaaactcctgacctcaagtgatctgcccacttctgcctcccaaagtgctgggattagaggtgtgagccactgtgcctggccaacacagaaactctcggctgatgttagctcacctcaaggccaaaatcacaaagaagagtcacgcccctctgccctctccgcagcacgtggtccagtgcgtcttcgtggccatccggaccatcggcaacatcatgatcgtcaccaccctcctgcagttcatgtttgcctgtatcggggtccagttgttcaaggtagaggaactgcctccaagcataaaactcaggtggatttctttaaggagaagcctgcatttacttaactgcctgtctattttatacccaggggaagttctatcgctgtacggatgaagccaaaagtaaccctgaagaatgcaggtgagcgtcctgagagtggagtaggggacttagaagagcaaatagcagacttcaaggattcacacatgttggcacgtcagaagttttggtcgtgaaataaaataggcctgtgtgctcagcttgtgggtagatagatggtgtttgtttttcattgaggtgaaattcacgtaacatcaactgttttcagtatacagttccttagcatatagtatccatggcattgttgtgcaaccaacatctctatctagttgcaaactttttgtcatcccaaaagaatggctagatggcttttgtggtggagaatctataaatgacgggagttgggggaaccctgaaataacaattatgaaatgccccaaatagcttccatgacagccatgtggatgatttccccaaatcagaatttggaactcaactccctggtgtttgggaactggctccctcttcttatacactttctagacttcctctctcctggctcctattacctacatcttggccatatttccatagacaagaactggcagaggagagacaaggtgggagatattcatgcctcccattccaggatgtccagtgaccatgaaggcagtcatggaagccattgcctaaagtttcagactgtgcagaggcctgtgtctccccacccgcgagagacataactgactgggctctggctgactgtgcctgtacattggtttggggtttattttaagcagaaggtgcagtcagagagcaccaattgcaatttggctgtgtttctgcacctccagaggcaccgttcacacaccgttcatggcgtccctggaggtgagcagcctggcattggcgtgaggacactgtttcttccctcttgaagcctctgtgtcttcatttgtaaaataaagatattgcgctttatctcttgggttccttccagaaatgaagttctgggagaaataatttgccagaaataatgcaattctttcggaaagaaaattgggaatgtcattagtaagaagagaaagggatttgattaaaactaaaatgcaggaagagtatacgtgggtttgtttcctagagcctacagagttctctatggctgagctttgatccttcagagcgcgcctcaagcccattgtgtaagagatgcactcaccatgctgtggtttttatcggccaacgacatatgcccggtgtctgggtggctgctctggagaatacacgttgcactggtagttattcaatggttatttgagccgcgaagtagattaaatggagggcgaggagaggagaaacggcgccggtgttatgctcagctgtgtgacaggcgggcggactgagtgtgacctgcctggaggttggattggggcagtgtgtccaactttacgctgcttccacctgtcatgtgtgaagccagacgacccacacctgttttcctctccaggggacttttcatcctctacaaggatggggatgttgacagtcctgtggtccgtgaacggatctggcaaaacagtgatttcaacttcgacaacgtcctctctgctatgatggcgctcttcacagtctccacgtttgagggctggcctgcgtaagtacagggagcacacagtcttctggagaggcacctgcgtgcccagggctgagccctccctcctggagtcagtcccatttctgttctccagtgtcgcaggattgccctgtggctttttaaccttgggccacttctcagtcacttcttgacccacagggcctctttctgtgtaggtggatgatttgtgaagcagggttggtagaggtgcctggcagcatctctgggtggaagcagggaggcctgagatgcctcagtcccgtgaactcccattggatgtcaggaaagctgccatccgctgctcccaaagagggtctgaatggtgtcccaaaccattcattcattcattcattcattcattcattctaatatattcccagttgcggacagttgctgttatgccatctcttttactgagcacctgctcgctcatttacagaccatgctgtgcagaggcttgtgtctccccacccgttagaaatgtctaactgggctctggctgactgcgtgcttagataccagctctgtgcaacatggcatgttaggcactgtggaggaaacagtgtctaaacatgcttcctctcctcaagcccaaatcaaatcagtgtcaagtggtcaaaccaggcaggtggtctggtgtgtcctagatgtgcagaacagggtcctgaagaatggctaagatgttgatgggtaaagtaagaagagcaggtaaggagaagttagaatttgaaagggagaatcctctgtgctttcgtgttgctctttgcttctggagctcccacccccagctcctgccatcagtgtgcaaacacacctagagtcctggatacccggtccccatgcatagatgagctgcaggaggtgggcaggctggggctcgcaggccagcagagttcttggggtgtgtgtaagagtcagatattttcaggagctcctgtaggataaagagacagtcaggtggggcttgttcattagggatttaatcctgggagaacagaggcatggagtaaggcccttcactgtgtgcaggcacaggctatagtgtcaggctttgaacactgtacttgagcaaatcatggtggcagctgaggagaaaggagcaaacctgggactcggggcttggaggaactggctcaactcctggctctgcccccaaggagtgtgactgtggcactttgatacctccctgaatattcctatgatggggatgatagtaatgtctgccttcccagatggatgtgaggattaagggagaggctgtgaaagtgtctcgggaagcctatgcatgggctgggtgccccagaagtgttgaatctgcatcagaatggggatcaatggaccccaagggtgttacagtaatccccctcttcctgttaagagttccgctaggcatagctttaattttagtgcatatctctgtttggggaagcacccttagttctttggaactactctggttggtcacttactgtcttgccagtgtgcatagttttcacttcctccagtgtcttacacgtgatattcttcctctctgaatagaaaggagtgttttaggatatttgtgaaatcttttgattttcagttcctcagaacagtccctcgatgatgatatcctgggtgccccctcctcttagtgctggctgtttgggcctgaggctgatgggagagacctggttgtgtccagcagccttggggtgggttcccagcgagtgctcatgagaggagttctggagagggaggacctgggaaggcagcgggctgggccgtgtgggctggggggcttggcaggtcctcacttggtttttctctctctaggttgctgtataaagccatcgactcgaatggagagaacatcggcccaatctacaaccaccgcgtggagatctccatcttcttcatcatctacatcatcattgtagctttcttcatgatgaacatctttgtgggctttgtcatcgttacatttcaggaacaaggagaaaaagagtataagaactgtgagctggacaaaaatcaggttaaagtcacacactgttttggcttctgtcccttggtcaggagcggagtgccttctttattgactgatttcccccatacccagagaagggcacccacatactgtctgtccctggggctagggccctgttctaagcacaccctcagcccatttgagtcatcactgctgagcgttaggtttcccgatacatatgagactttgtaattatgaaatccatcgccagacctggtggtatgaaatcagagagtgcttacgccacctgccatggtcatgacccactagtgatggctcagaatcttagttggggtgctgtggccactcacacagacattcacagtccctactgggagatggtctttaaagccacttagggcagtttcttacccttggtgctattagcatttcagtctgggatgattcttggttgtgtttcctgggctttttaggctgtttagcagcatccgtggcttccagctgttagatgccaatggttcgtcttcccctggtagcagtaaccaaaatgtctccagacattgccaagtgtcctttggggggcaaagctgccccttgttgagaactgctgaccgaggggggaataccctgcatcaccccagggaagtcagtaactttgaatttgggactaagattgtattggcatcattcttgatctgacaccgtgttttagccagtctggtagaagtaggagccttttgctcgggtgacgtggtgaggagagggagccctgtgctctgggctatcttcctacacctgcactgtgaccctaggtgccctctgatccctgctggggcttgatccctcatctctaaatcgagggcattaaggagctgctctttagagattccttgcagccctgaaagagtctacaagatcgagattcttttctgggagtttccccgggtcctctatcagtagcatctctgttttgatgacgacgtcgcaagcaagaatgatctggtagcctaggcttcctcagaggaagtggcccgggcacggcaagccaaccatagctggctgtacccactgggaaatgtgagaacatgccggtttgtgtttgcaggaagattttcctttgagttgtcagggtgtccctgtagactccaccagtgattgtcagggagaggtctggcccagcaatttgctcacccaaggaagaggagtgtcagagcaaggccaggccagccacgcagagccagcgctgaaagtgtgtcagcctctgaggtccagcacaggcttgaattgggggtccctggagtgagcatgtgaggtcagagcagcgccgggtcccagacactgggaacctgtccgaagcctgcacccagagtcaaagcaggagagcgggggtaggtctaggctctcaatgctgagctgagggctcttggggctagaggttccctctgggcctgctgcagagggtggaccagccccactacccagagtaagtgagaaagtgctccagctgggtcccaacctgtgttcaatccaattgtcactacagtgctccagctgggccctaaactgcgtccaatcaatccagctgtcgctacagtgctccagctgggccccaacctgtgttcaatccagctgtcactactgaccacatcctagggattctgaaatgaacacaacaagctccccagcccagaagctccccgatggacatgtggatagctccccataagatgtgtattgttaacacactctggctcctgaagggtatctcatgtggttccaactgggagcatccaggaggctactagtcttggggaatgagccagcccctctcgttcttgtgagtttctgtggttacttggcctcctttcctggaggacagcacaggcaggggaactataggtgtgatccacctatagatcccccgtatgtgtgataaagaggaaaggcagtgataaggcctggacccagtcctcactcctgcttgtgtatacactgcagggcctcaggaaagacagctaaaagctctgagcctcagtttttagtaagcaaaatggaagccacatgggtaggtacccagcttacccggagcttgctgggagggtcagcgaaggtaatggaggcagggccctcggtgactcaagagtggtgccagcagcaggaagggggtcactcgtaatcattttcaccatcgtccacggccccttcccgggagctgtagggtgagctctttcagagcagatgaccacggggtcctccttccctgcaagtgctcagaaccccgtttctgcccttttctgctgttgcagcgtcagtgtgttgaatacgccttgaaagcacgtcccttgcggagatacatccccaaaaacccctaccagtacaagttctggtacgtggtgaactcttcgcctttcgaatacatgatgtttgtcctcatcatgctcaacacactctgcttggccatgcaggtaaaaatggagacagccgtggggatcaggtccgggcattccgcacagccccgtgccccaaatgctgagggtggaatgctgcccctcacaggaggggtttgatttttctgatgagtctgggctataggttggccagagttctgttctggctgacagttgtcacggtaggagtttaagatagttcttttgttgaagaaattatccgtacagcatgatggtaggtaacatttccatggagcctggcattggtgctcaattctgtaaacatttaccatgggcctcctgtggccagctagtggttgagaactacagctctggagatacacagctgtttcaatcctgattttactctgaattttttgtgacttggggaaagttgtttaaattccccgaggcttgatttctttatcagtaaaatggggaaatctgtcacacctacgttagagataaggtttatgctgtagataattcccctcagacactttgttttttattttttgccttttgtttttgaggcagtctcactctgtagcccaggctggagtgcagtagcgcgatctcggctcactgcaacctccgcctcctgggttcaagtgattctcatgcctcagcattctgagtagctacgattacaggcatatgccaccatgcccagctaattttgtatttttagtagagacagggtttcaccacgttggccaggctggtcccgaactcgtgacctcaggtgatccgttgcctcagcctcccaaagtgctggtattacaggcgtgagccaccgcgcccggcacctttggacactttgatctgggcctgtcacagagtaacactcaatgttggaaaacaaaacataagtcacactcctgtcctcaggtggctctcagcatggcagtagggaattttccagttgatgaagtgttgagtttgacctgagttacagctacttcttattccagtgggggcaagaaatgcaattgagtttaattggccaagtcagattatagtatggtattaacagcgaatgttttcaaaagttacattgcctagtagatactctacgaggacaggaagcaaagaccaaggtctagagccagcttttgcactgactttaagaactccagcacatcaaaccagctctcagtgctgtctggacagtaggtctaaagatagggataaattttctggcatttttcttaacctaagagttctttttgaatgaaaaggactgtgtgctgacgtagaagaaagtgtaaaatcaagaaaacactgccttttattcaacataaacttacatggcataaaatttatccctaaccaaattctacctctattcatagacattttggtggtatctgcattgtgctctggtcaaggccctcaacataaagccctgccagaagaaagggtgaattccctttatcctgagcagaggaaatggatatgttttcccccttcatcattcaatcatcctcatcttgtcacagaccctcctgcactttgtgggagttcaccacatgaccttgcaatgccggtggaattgcccagcgagggtgctgggctgtggaggatgcccacaggggcacagagggctgggagcctccatgtgcaagcatgtgagatcgtggctgaggctctgagaacggtccctctgtcttcatccatagcactacgagcagtccaagatgttcaatgatgccatggacattctgaacatggtcttcaccggggtgttcaccgtcgagatggttttgaaagtcatcgcatttaagcctaaggtgagttgcagaacccacttttcaaaggttgttgctgagtcaccctagagaagtacccgcttcctgttagtcttgtgttactgaattatgctaaagtgttctggccgctaactgggttaccacctgagaacattaaaatctgattagagcatgtgtgtatatatgggaaaatgaatctgcaagaacaaaacctcatgaaaacaattctgagaaacagaagcagggagattagaattgggaatttgtaaactgcagattattttgaaagccagttttctgtttctagaatagtacatatcatgctgtgtcagggaaacctgcctcattacttgagcactagagaaaatgtttgaacataacccatcagaaagaatttgaccctgattatactttcagatatctagtctaaagactttgttttgtttgttcttggtctgcagcatcctttttaccctttaagggaagtgctgataccagctgcagacctctcacagccataccatcttttgtttgcttaatttagaaaaatttcacttgactttaacacaaaatgagacatgaaatgtgttcaactgtgctcgacgactcagcgtgttgtacccctttgggagggagtgaattcagttccccacttgtcagtggctgccagatgaggggcagtgtagttcagtgtcaaattgcatagttgtggaactggactggattcaaatctctactctggcacttacagctgaaacaagttcctttcttccctgcgcctcgacttcctcacccataaaatgaggacgctaatagtgctgtttcatggggttgtcatgaggagtaaagagttcccatatacgcactgcttaacagagtgcctggcatgtagcgccacgctgcggactgtcggccactgctgttcctacccgcaccaccaccctcatcatcatcaagcaaggatgttccctcattctaaaagcctagacagaagagccacaccaagctgaaatgtgggatatttggccctcattttctttcccagtacagccaaaaactctcagagttagagatgacagagttcagtgacccagttagttatctctgtgtaaggtatctgacgacactgatttaattaagttaggcatggattatgaaatggatggtttcacatactccatagttacatgaaattctaattccaaactgttcctttctttaatttgaattaatctctatgcaatctttatcagatctttgtggaccaaaaagaaaggacatttgtaagtgattaattggggtgattgcagtggggtcaaatttggcacctaatgcatggccagatgttattatctactgtgacttgtccatatctacatacataaacatttcctccttttccaaattcatcttaatttcctttgagattttggtttgcttccctctcacctttacttctttgaacaatatttgtctggactgatggaaaaggttgcaaagtaagaacatcgaaggtacttgagaaatgcaacatggaacctctctgtggaacatttcccagatacctgggccatgtcttcccttgccagatgattaagctctgaagtttttgaaagcttgctctaggctgaagagaaagcacactcacccatggtgtgtatgtgtgtgtgtcagtgtgtgtgtgtgcacatgcgtgtgtgttcatgtgtgtgcttgctcccttcagccggccagtgcattgacagcccagtagtgcactgcccagtaggctgacagttgcccagaagatctccaaacctgggaggagagttcagtagcgcgtgaacagataggcgataccaaagggaagtgagtagctaagctataatcagtactgatagatcggagtttttaaatggttgatttctgctggaaattgtactgcttgtagtttcactcagcaagatatcttcatagcattagacaacctcacgttacaattgggagaacttttaagacagtagcagcagcatctccacacttgaagagcactgtcactgcgttccccccggccaggggaggttgagtttatatcgtgtgccgggatgagtgggagagtatcggttcaccaagaagcaatgccctccttaaaatttttcctgccctttttttcttgctcttctctttggtgttcacaagcccagcccgagcaagtggtctttcacaaagaagccagggaggcctcctccctcctggtcggtggggtagtcgggctgaagaacaaggttgtcaaggctgcagaaggaggaatattctgaggagatggccacatgggacctcagcctcctctcaggagagcctttgtctcatgggaggagctttgtaacagggtccctcatggcagagttctccactgagtcaggtacaccttctagcaggactcgtcagtatctctgttaggggacacaggctggcagagtttcagttgcttcataaaataagtatagaaagtgaggtaagacaaaattcttactggtaggtgagaaggcatttcaagagggaacggttaaagaaagttgagaaatctgaccttaaggacttattttatataagggagcttgatggagaaactgggcctcctaagagagtatatttagagggaaatggcccaaggtcatgggagatgagatgacccagcctctgccaacccagagggaggtgggaagtagacagagggagaaaactccgagctggaagcctccatgatggaagaggccatctcacctcaggggaggaggcattttggagcactggtcaggcaagagtggaaggtagttaggagccgaagcgcaaaagcatccgggaaaagcaagcaggtgatttagccgattgtgggttcccgaagggaaagttcaccagctgggtgttgacctggtgcagcctaggtcctgctttcaacttggggtcaactagacctctgtagggttttcaaaagcaggccctagtttaggtgacacaagccccattctccaagcctttccctccagctgctagaattctccaacaagttctcttgctccaaggaggaagattgattaagaagggcctttttcaaagtgctggctgcagcaggtatagagagcacttctgtggagtaagaagagcctggtctgtctgggattctctttgtgggatgttacccatctggcgttttgtccaggctgcattctaggccatgttgtttgctgcggttactggccttctccagtgagccatacttcgttcccatcttagtcctttaaagtgttttgatcttgattctaccctgaaaatatactaatttatactcctagctacttgggctggaaaaagtaaggagaaattaggtttggggaaagaagaaagtgttttggtgctgtcctcatgctgctgtgcagagctgatgcagaatgggcactgagtcctcatctgccttcaagggctctgttcgctgctccagggtcccttgcaagagtagagcttcttcatgatcttcctagagtaccttttccacctgctggagagaaaatttgacactgtttttttttcagttcttcatgaccccatctgttctagatttacttttaatggcaaataatacttgaaaccaagtattactgtccttagaactttacattgggcttcttgttgggctccatcctgtccttttgacattgaggtttcccagagccctctcctggtccccttcttgcctggtaagatgcatacatgccagagcgtcagtggccgcctctgtggcatgcagacctgcactgcccttctctctcctgagcttctatgcctccctgccttcaaaatgatctccctgcctctggcctcagcccttctacctactccctttgtaagcccaaagctgaccagaccactcttgcagtgatattttggcactggccacctattgcttgagaaagcatatacaattttcttagtcgaatattcaaagtcctccatgaagcactggcccctgtatatttctgcctcatttcctgccattccctccctgctatttcttcgtccccaccccatccccaagtgttggcatgctagacctttccctgcccatgcgcctctgtctagataccctgcttcctctttgttatccttgaaggcctgtgggaaatgttatcttctctgagacagcatcctcaccccagccagagccagccctgtcctctgctcatgcatccgttgggggcctactatgcaccatcgttaccaacactactccatgtctgcctctctgtttgttggtgagcagctgcttgaggtctcaggctgagtcttctgcttctggctctgtggtacctcacatgatgcctggtggtagcttcctggtggtagctcagtaagattggtggaatgaagaaaggaataaagggatgatcctggaagtgcagcctctgggcatgagacgatacctgcttttctgtcgcagggtatctgggtagagcagagtggagcacatcttcccttaattccccgcttacctttggaaaggcttttgctagttagaaagctgtcaggcatagtttctaccaaaagttggcactttgggttatcacttgggtcaaatgctacccaaataatccctgccagcatgggtaagagatctggctgccatgatcaatgacaaaaggcacattatttatataggcttctaccgatctgcagatgggagtgaatccaggcagcaaaaggaatctgaacttgggtcacttttcttgtttcccatttgcaaccgttccacaaacattgcccccttaccatgtgcaacgcctgtgccatatcctggcaagagggccaggaataagagatgtgccttccaggagcccactgtccagcaggagacaaacattgatggatggtgacaatagggttcttagacatagtggtgcttcctgaccctgaggcccacattagtctggtttatgattttaaatttccagagtcagaaatgtttctgcgcaatacatattgcatgtggctgacttgtttggtcttttcagacaggtagagctggacacaaaaataatatagatttgactgctggttccacttgagaggttctggcctcagaattcagttgtaggagaacacatcatcataggccaagaggagagagcagggagaggggccctctgttaggagccgtgtcatttcttgtatcttatcttctggttacaaaggcaatatggtgcctttggtgggagaagggtgggggaactgagtcatgccacttgacggtgattttattaaacaagaggctactaaatagggaaacagtatgtgggaagaatgggagggctgacattttctccctcccctggactcctgtcagagccacctggtcagagcctgtgatttcagccacctgccttctgcttcctagattaagggtgtcaaccttcagtccatcaatcattccaatttgggcacagttttatgagtgtgaggggtttctggagagagagtcaatgaaattgccaaaaaattccaagaccccaaggaaatattaagcccctattgtgttgatttaaacggattttatccatcacagtgcaccagcattgagaatatcttataggctgatggaaatggcctgaaggggagaacactgataattctggagagagggagagaggagctgttcaggaataaaatctcaaagtcagaggctggcctccagcacccatgtggtgggtttggcctttgggaaatgacataaataatggagagaagcggcgcacacggtacaaatgcaggcggggctggggcacgcaccacagcaggtgcgaagggcgaacgctgggtctcctccgccttgtcagtactctggaggtctagttgctacttgtgaccaagtttttgatcaaggtgtaaattccttcctagaggggaggggaaggatcactgtgctttctttagcttttgagttactcttaactccatgaagaaaagggcaggctctgcccctccaagtgtggtctgtggcactgccaccagtcagagaactgcttgttatccattcgcaacaagagctgtcagctctaacactaagcacattgattcagctggctttcttgttaggagacttcttggacgaaggaaactgctgtgttcccttacaacctgaggctagctcttgatctcacctctgactgctagtctagacctcaaaggcagcccatctctgctcagttttgccagccaagaatcatgaattcatgcaaaggaaagctagaaagcataagctgtgctgtttttaaaatagcccttcccattagacttttatacatagatcatcagatttggggctcacaaattccttttgtctgctgatagatgggccagggagggtagcagtcagtgagggtaaaatgggagagaggcactgtgatcatagggcggggagagaggtggagagttggttagaaaccacggcggttgggtgggggaatcttacattattaagattaaatttaagaagcaaacccgaagtcagtgtcgtagctcccccataaatgcacctagactgatggatggtgactagaataaacatccctactccagctgttaggacagtcagtacgtccacatcttctatactgtcgcaaaaggctgtggttctgcagtggcttcttctgggtctgtgtttgatcacaagtttctgggacctgacacctcaaagtactttttgttctggttttcttaatgcagcactaaatgtaccccgttgtaaacaggctgggccccattttatataatatgtacctgaattttcatttccaaaaagcgtccagactctttggaaaaacacagttggtttatagacagagctgttgatcttgacagtcagtccgttgcctctttggctgtctgtgcagtatctccccaccaccctctccaaccgggagcttcccaggggtgtcgagagaccacaggcactcatttagcacctgctgtgctgatgctggaagaagatgtaaaatgtccggcacatacatatagattttaagttacaattgtggggatgttgtaccctcaaaattgttgcaagatagcaggacctgaacaaacaaccagacaaagctggatgacaggcagggtgcaagttggtggacaaaggggacattgcacatgtcaagcactgactgggttcaaggctctggctagataatggggttagggaagttgggggactgaatatgcagcacagtcatcatccttcagggcttttgattggtagagctgcagacaaagaccccacattcagccatcagtacgtaagagattcagcgtcagcctgagggagtgcagacagccgggactgcgaaggttccatcagggaacatttatctgaccttgaagaagggtgaagttgaacagatggagttggggttaggcaattaggattgcagagacatcaggaggtggggaggaacctggtgctattttcgaaggatgggaaggactcctctcagcctagagggtgaaaagtgggagggaaagaaagcaaaagctgagatggaagaaggagcctattggcttctttgaaggacagagggagccctggaacatcctcttcattccatactcttttctactatagagcctgccttgacttccccacactaagcaccacccccatgacaaggagccagtgtctctgccacgacgctgtgcctcacggtgcctgtgtccccgtaagccattatctacccgtctgtgtcgtctacactgagagttctttgaagacagggacttgtctcagtcatcctgccacaaggcatggcctttgtaatacaggctggacttgcgaggactggagagcattgctggcccatttgaaggagcacagaaatggaaatgtgtgcaatacctggtgacagtgctctttaagtggggtgaatggagattctaaggaaggagtccatcagatcgtgagggtttgggatcatccctctgggtaccaggacaaggttgccaaaatgccttcctctgccctgtagatatcctgcttggtttggtgccactcaggaccgtgagtgtgtgtgtgtgtgtgtgtatgcacacgtgcgtgtgtgcgtgggcgtgcaccttctctcacacataaaggtgcacaaccaccctgctgtgcccctttccaccagtggacagtattgttacttcccctttggctttcccaccctacctgggtgccatgggtgcggcagggactcggattcgcccctatacggtccgtgtggtgggtcattcatacatgctcataaacatctgccctcgcctgctctgtccaggggtattttagtgacgcctggaacacgtttgactccctcatcgtaatcggcagcattatagacgtggccctcagcgaagcagacgtgagtatgcacctggcgtggccgccacctgtgtcctctctcctctgtctgtgcatactccgctccctgccctgcagtggcatcacctggacaagtcacagatcccagtcacttgatctgaaactaggatttcctaatgagagctgtaggcaagacgtgtttcagggtagagccttatcccagggccttttgtagacacaaatcaccttttggaggacaggcctttttgcagcatttaccctggtcactagtaggcaaggtaagataggatgtctctaattgttttcatttgctgtgtcagaagtgatacccacagtggcgtatctataacatgtttattttagggggatgtttcaagtcgccgtgtggcgcgatgctagaatgttccccttttgtaacactgtccttttcttcttttttcctgtggtgcttcctctcctctgtggcttctgaatgcttgccctaacagcactatttcactgatgcatggaacacttttgatgccttaattgttgttggtagcgtcgttgatattgctataactgaagtgaatgtaagtagcaaactttgtgtcctatatcatggttgttttcattaagtctgacatagaagagactagaggccctgcccttaaatctccacacactttagaaatccagacacaaatttattttgaaagactaaggataatttgtagtttcctctatctcaccccatctctatctccttcccctgaaaaagagtggggaagtctatgtagaattgccttttggaactagaatagtatttcaaaagatctaattaaagttataagggctgggagttaattgtgtgtccgtgtgaatgttgtcactcaccagtcgtgtgaccgtggaagtcatccgagtgctatgtgcctcagtctttccagctgtacatggagttactgatgtgcaccctcgtccccgcaatggttctgtgagggcacaggcaggagaccccacagccagctatgccctgagcctgtggtggctgctgctggtgccctcacctgtaccgtgtctgctctgagtctgactggtgacactggtgaacgtcccacacccaaagggtgatgccagccagtggaaggctgcttggggccagggaaaagagggccgagtgcaaaccagggagagggtgtcagtccgcctttgttacatccagtagattcacttgagggggaacaagtgcagtagtggcattgtagatggagtgaaccactctccctagaagcactctgagcacctctccccctgcaaaattaagaagcgtgagaaagggagcccctccttctgcctggctccccttgggtctgacccatgctagaccggaaggcctcaggcaggcagaaagggccctgtctacctgatctgttcccagttcatcagcaagtcttagtgggcgtccagtgtgtgtgccgagcctgtgcagagcctttcgagagagtgggcggagcacggggagggactgttgtgtggtattggcttttgctccacaatgtccagcccaccccctgcccctgatgctctgcctggtgacatctgcaggattgaggattataaggtccatcctggtgcccagacagcctgcatcacacaaggactgtgaaatccctgtatgccacctatctgggtccatgctgatcctggcgtgtgaatagtaagacagccaccagcctggcagtcctaagacctggcagttgcagccctagttccaaactgacttggattccagctccctcatgggccaagtggggtgaataacatctgcccccttgctgcagatatgttatagtgataaaatgatcggaatattcgggaaaatgcttgctaaaaaccccaaagttttagggagatacaagttttgtattattctaagtgtagattttccctgtaataagtaaaacagactgtcagacgtgactgtgcccatgagggtgtgatttaagcctcgtcatgccacgctatgaccaggcactcagatggtattttgctagacctaggtatacacatattccaacttctaaagcccagacatgtaaattctacttcatgtgaaatgttccatgtgtcagctataaaattgccattcagatatgtaaatgatgcttggttgtaaaataagctggtgctaatgggagaacagcaggtccctaactgggctgccctgagctctctccgaagtttatggctagacatctgccaccttaatcatctcacaacgcaaagtgcttacaatctactcggaggtatatttacatgaaaattctggaacatacccttctgtgagccagagatggcctataatggaagcgaaaatacaataaaccagcagcagggcagatctccctggactgctcagcacttcaagtgctgtgcaggtggtgggtgtaaacacttagcttccgggcaccaggatgtggccaaggtctgtccacctggggacacccagctttctcacgcctgacctgcctgctggctggcaggggtgtagcacccatgtactcagggacagcacgcgcccggcttcctggctgcctcacgtgtgctgcaggctggccctgctcctcccgctgcccctgtcccctgtggcccagctttgctcatcagtgtatcagtgttgctgtgttcaccttgcaccagtcaggaaaggggcaggtctacgctgaagtttctagttagcatttgacattggggtatctgtgcaacacaggctttcagggggccccttcttggcatgcaattaaactttcaaaatcacctaggcagacactcccatagtgtgctttcagtcagtgacctttttcctggtcagctgtggcctgagaccagatatattcctcagccatggcaatgccagttccctaccccaggccagcagaacaccaccttcagaaatctcagtgtctccttgctgggccttggaacagaggggatgctcaaggccaccttcacatttattccatctttcaacacacattcactgggcatctatcacttacaggctctgggctaggctgtggggaggcacaaagataaaaaaggactgggtgtccttaacctctggtgtaaatacatgacagtgggactgttggttctgacaccccactcccctccacatgtagttcccctggggagcagtgcacatcacatccttggtggccttgtcccctgagctgaggggtcagctgtcagctgggtgtgaacacctttggttcatcattggctggttgtagctgccataagtcatcattgtttgcaatgtttaacctgccatgctctcttccccaaactctgttgatctttcttttctgttgcctaattgattttcatgttggttttatttttagaaaattgtagcggcaagtatatataagcatatatacggtgaagtccttaaagcaaagcacttctaaagaatgtgtgcttgtttttggcctctccacctttggttttcactgcgctccacaggacgtgctaaggattggttgcaatcatctaaattgttccccatcccatagattgtcatctccagcctggggccatcttggtcagtcacacttggctctgtgacttgccaacatagtcttccagaatgaatgatctggctgagaaatgattgaattcagcctgcgtttgtattctttgcaaaaacgttttgggtagtcctttgcatggtcctgcctgcgcacgcaccagcctgcttcatcctactgtccccctcccatgtccccacaccccgctcagttcctggtttggcagcactcatggacttatctccatcacatttggtcctaacctcaccaggctgctaaaatgacacactgtgactgctgggctccctcttgctccgtccctctttgatgcctgtttgttccttgaatgatgaaatgacccagcaacatactgtccctaacccatggatggctgtcactgacatttgtctcttctcattatcattagtgtctgggaggcaaaacacttgtttagaagctgtatctgccttattattacttactttgaaggagcaggtaaaaagtcattagggagctcactctcagagatccaggaatggtccctgccttttaaggtatgctgtttggaccaggtggctgacagtctcactcatcttctttttctgaccccacagtaaggttgtgtagtcccccatttcatatgtgaaccctttcccaggagccagctcagctgggcactgggttgtggacacagacccagcaaccccaaataaagaagccctcctcccagaggtgttacctgtgagctcagaaatagtcagagggaagactggcttctccgcaatgcctcgggttacctggcccagctgttctgggatgctggtttgcttcctatctgaattagaaagctgcatcctctcagctcttccaagcacagatagaaattaaaacagaaaatgaaatggactgatttcattgatttcacttgggaacctcagggtctttttgacttccacggttgcagggggctgccccagagcctatgtggtaagagcctgcttgagagccctgtgggaagaggctcgagggaacatcagcagagccccaggaatctaaggagctttctggaccctgacatgtagtccggcctcctgaggctaaggggctgtctcctgtagggttcccagctgaagaatgtgacatcttagggtgggaaggaactgccaagtttgtcttgtccaagccctgaggtgacactggaattccgcttattgaaaactgattagtagccccttgtggccatgtttggaaagctacctagtgaagagtccttccccagtctggtgtcctctaggggtgtccagcatagcgtagcccacttgcgttccagctccaccagttcccttcatgttgaaacctcctccatcccttgtaggggagatggggatggagtctaatcgctctctcttcatccgtgtactgttccctcgtcaacccagaaagaacccactgttcagccacagcagcctgagtgggcttttctagtgaccccactctgtatggccgctcgagatctaaagggcattagctggtataggccacctgttaactactcgggccagctttaccctggcccaggactggagttctcagctctggcagcatatttgaatcaccaaggagcttttaaaattcccaacatggaggtctggcgcagtggctcatgcctgtaatcccagcactttgggaggccgagataggcagatcacctgaggtcaggagttggagaccagtctggccaacatggtgaaacctcatctctactgaaaatacaaaaaattcggcaggcatggtggcgggcgcctgttatcccagctactcaggaggctgaggcagaagaattgctgatatcctgtaggcagaggttgcagtgagccaagatcatgccactgcactccagcctgggtgacagagggagactctatctcaaaaaaaaaaaaaaaacaacaaaataaaattcccaacatgcagatacgccccagatccattaagtaagaatccctggggtgggacctgggcttcagagattttgttaaagatccccaggtggttttagtgttcaggctagtatgagagctggcctccccttttcattgggctgacatttgtcatttgggaaaagccatcctcagggttctttaaatttgtaagatattttggcaacttgcactgtccccccggggctgccagtcacatcctcccctgaagcagccccccatgcccagtggtgtgtggtgggaggggaggtgtcgcaggcgcactgagggtgcatgaagcctggtgtgctgtttgctctttccttcctccctccctcgcatgttgtgctgccctctccctttacaaatgctgtctcctcttcccttttgttcttttaaacagaatattcatggtttgaagttcatagtccataggttgtcagtttcaaagatatcagttgaagagatgtacacttcgaaattcagttcggttgctgactttcacaaactctaaggaagggggccgtggatggcgtatcagacttgaagcagaatagggagaggcccgcaggagggtcttaggccagactgtggccaggagtgtcttccctgaccaacaggccccttactgtcttgcaggtctgatacataagttgtgcacatttcagaaggataactgtagagccgtctctctcgtgcacactgcctggtcccctgaacacaggcaagcagaggtgcacatgcgggcacacttagcatgcacactcacaccccacactccagccagagagggaagagtggaaccttcctgtgcacagccttagtgagaatgatgtggaaaatgatgagaactttaaaaaattagttccttcatttgttaaggtcttaagttgaaaaacattgtctgtccctttaaggagctgatatttcttttgagacgaactaatagaagagggaaataaaaatagcaatcctgggtttttgataaacctgtggcagagttcccattctgagcatcccaggagaagcaaggaccccttttaaactctgtcagaacctgttcctcttgggttcattgtcacattactgaatttcagtttttctgtgatatgctgaaaccccttattttctgtgaactttgtagaatttccctttggtctcaggaggtagcccttgatgctagagaggcttcagaactgagctctacctttccccagatccccagggaggaggccctcgagaagtgagcacatccagacgtgcacacatgtcccttaactttgcagacacactgtacagaaagcgtccttgaagcccctaaccggaagagcctcatttctctctgtcggctcctggtgacaccactgaggggaaaagagaggctggcacatgctggctctggttccgctgactgttgctgtttaatgtaaagatgcctcctggtgctggctggagtttgcttccaactcctctgtgttctctcagacactttctgaacactcaggtagtgctaggcaccatgctgggcacggagtggagtgaggcaaggcccctgccctccctggggtgggggttggggggcaggtaagcaccagtcattacagattctgcatcctggggccgagggacaggagcacagccagaccctggaggaggtggagctgctgaaccacaggggagctggtcctccactgtttcttccaaagactcatacggacctgcactccctcttatgtgaaagctgtctgagctgtggggcaggcagcgagggtttctgtagggaagcctgcctctctcctcctcgccctgactcagtctgtccagcttttcagcagccctgcctaagaggctgttgtcagacatacaccacccaggcgtttagtctcataggaacagagtgtggtccaagggggtttgtggcccgcaggcaggcaccactgcttgcccctctgctagagacattctgttcctcggggctaggaggcctgctgcagagcggttagttcctgagacccacagccctgactaagccaagagaactagcctcctcgcgagaagcgggggcacactctgcatctgttgaggtcttgcagcactgcctttactggatgcctgtcagcctgggcacagcatgtccccagatgtgaattagaaagtggtactgtgtccatgcccatgtccatggctgcctgccctcaagtccacctccaaggagagccactggtattttctcagggagggagcaggtgtggtgtctaaagatgggaaccacacatttttttaaagggggaaatgctctctggaaccattgactccttcctggttcattaatccattttcaatctttgatttcttaaagccaactgaaagtgaaaatgtccctgtcccaactgctacacctggggtaagatcagtgactagtccccaggggctgggccttttccttaagtttatttgaccatgtcgagttttccactggtttttctgtattctccatgattgtccttccagaacagtgtctgcagtggtttgcattcatcatcagtgtccagtactcttgaccagcccagcgttctcctctaacacagtagaatacgtggacatgcatgtgctgtgtggacgcagttttccgagctctgtgttgttagcatgtaactcttcctttcatatcatgctttttaagatgaaaaggccctagaatcacatcttcagttcttacctctgtcacctttgcatctgttgctgtttttctgaaagtgttgcatgttctactttccattgggtttgacctctccatgataacccttcagaactctgaagagagcaatagaatctccatcacctttttccgtcttttccgagtgatgcgattggtgaagcttctcagcaggggggaaggcatccggacattgctgtggacttttattaagtcctttcaggtaagagccatgccaaggacttctctctttgtctttgaagatcatatgtaagtcagtgattgtccccatcctagaggacccaggctccccctgtgtggccactctgtggacctaaatcaatagaaaacatggaatgctggagagacccaaatcagcatttcttgggtcaatcacatgggattacttgcctaaaggaaacagaagagaaagcaggaaggatccgtagctgagagatctgtagcatttccaagactgagagaggtgtggggcctgcagccctgcagtgcccccgggatgcctggtggtggtggtgagtgccaggtcccagcagactgcctggaagcccaacagcctctctctgacaccttttcctcataaggctacaacagtgctgtgtctgttggctagtctagatacaaatcagaaaccaccacctgggccagtgcactatcactgggttatcctgcacctggaagggtcacagagttcgggatgtttgggcatacaccatgtctcatttgtcacctctgattctccaggctggcacagctcggttctagactttcccaagtagaaccagcttttcccgtacctgccagtaccctgccccagacattctagccttctggactgattccatttggaagagaaggtgtgggaaatatagattcttagtaaaaggtggacccatgtagggaatttgtggatatctacaagcattagaaagtgaatcctgcatcttcattttttaaattatttgactatttttcattcaaaagttataaatgtttacaataacaaatgaagctgtccaaaggtatataaagagaaatttcaaacttggccctcacccacccctggggtaaccagtgttaccctcccagtaagcatttgtccctagtagatgggattttcacaggtaaaagggagaagggacagcaagcggggtggtgcaggcactcacaagggaagtcacagatcctgctggggagaatgaggttggaggaaggtaaagtgggggcctcaggcaggtgagccttgaacttgctaaggcacagaatcctcgacagttattattcatttaaagtaccaaaacttgggaacaaactgctataaaaatagataattcagaggtaatgttatctcactttttaaagaaattcttaaagattcaatttgccacagataagaaagtcatgttccagagcagcagttcataaaagcagagaaactgtgcaaacaaaaatcgtaaacatttggcaatctaggaagaaaatgcacgtaggtatgttgaggaaagcctgaaacgaactctgtgggaccctgctgagcagtccagctgcagggagggccaggctggcaggcacaggtcaacagctggcacaggtctgaaggtggctgagcacctgtgagccactgactttctgacaagctctctcggatagtagagaaagcgggtgctttaagcatgtgttcccagaattaagcctaacactctgggcaccctgtgcaggtagacgtgttggtcacatgtgatgaggtaagacagcagttgacattcagtgaaaggacgggggatctgtcagacactcgtacttgtatttggtgtttatgaagggagccacacttggcgaccccccagctcactccttttcttccctggcccagccccccaacttagcagttctttcagaaggtgtacatcttaagagaggtattttgcatcctacagccacagccagaaagtggttcttcccctctgacccagtaattccactcctaagacttcaccttaaggaaatacttcagcagaagcaaggtggttttgcataaagatattcctttgcgacattatctacaataccgccccccaaaacatacccacaaaagaaagtggaagtactctaaatgtccagtgttctggaatggtttgatcaattataatttcaccccaaaaatccagtaatgaatttaaggattatgagagttacgtgtctgtgttgaaaatgtttagggttaggctacagggttaatgaccgtggaaagcacatcctgcctgtaatattgtaacactgggcgtgcatgtggatggtgtcttcaggactaaagtagttgggcagggctgggatttaaacggttcttcctcactgtcgatattctttcacggtaacacgtggaatagaaaggaagcatgtggccactcatgggtcttctcaggctgtggcgggccgtcacggggacagccggctggtgctgagccaagtgccttttctctcccaggcgctcccgtatgtggccctcctcatagccatgctgttcttcatctatgcggtcattggcatgcaggtaagctccagccatctcgccctcaggggccctttcactgggtagccccaaatctgtggcaagatgtaccctgaccaagtgaagtagaagcattgtgatttttcagccaaatgcctctgctgaagcctaggaagatgagaaagacaaagctgcttagtagagagctccaggggaggcccaggctcagatgaatgtggagaggttagaatgcaccaggaaaaactgcatgtcatggcagaagaattatgctttatcataacaaagtgaaattcacttgaaactaactatttccagatgccaagactgaagagagaagcaagtagcccctcgtgggtcttttcagtctgtgccgagccgtcgcgggaacagaaggctggtgctgagccaagtgccttttgtgaccattgttgtgctttagtagctcacctttaaaaagaggcatgaaactgggctcttctgtgacccaagcagaggggctgcaccctgtttcccagttcctcctgggcatgggaaagggactgggcctgcctaacagaggagccctaacatcaagtgggcagtgggatgggttgtgggtggagggaggcagcctagtctaagaatggaggcagtcgaagagcccaggtggctgtagatctctgctggcaggctccttgcagattctccacgtgtgcaggtgctgtctttcaggtaaaggagggatgtaagtcagaaagaagtaaagtgattctatgatttttggggcagagaaatggtagtgcttttttcttttttcttttttttttttaaaatcctgaaagcatagaagcatttgcagatctctgggaatcttaccaggagttatgaaacaaaagtcagcatacttgagcctctgtgattcagcagcacgtggtgctatgtgccctggaaggtcttttatcacatatgttctcataaaaaaaagccatctcagaactgcaagctgcatggcacacacaaccccagattcacccagcaggcgtttgtaagcatctgcaggtttctctagaatgtcagtctgctccctaaatctcacaagtaaaactctttagtaccttcccattgccctgaagataaagcccactcttctgcccggggctcacagcccctgcctgttgcctcctgcccttgtctccagcctggtcttttatctgtctgctcatcacacgttattttcattccctcggtatctatgctgtcaccctgctcctatgcacatggtgctccctccacccgaaacactcttcgcctttcctatcacctgatgtatctttcagttctgagtttacatgtcacttccccctagaggccttccctgacccagccccccagccttcagtagatgagcctgtctcacgcttccctgtgtgtctggaccaccccagcatcatcactggggtttgatgttgcctggctacctttgtgtctcccccaggggagatccgcgaatgtgagaccgtgcccctctggagcaccacgttcccagtgtgtaacctgctgcctggcacatggttgtgcctggcagatcttttttgaatgagtgaagtgccaggtaccatgagaaaaccctagctggtaaagatcaaacctgagttagttctaaattcacatacggattttttttgcatgacgaaatctattctctttttcctgacaacttctccacctagatgtttgggaaagttgccatgagagataacaaccagatcaataggaacaataacttccagacgtttccccaggcggtgctgctgctcttcaggtgactgcaactggcttgggcggtgctcctgggcaggggggtccgctaggcgtgggtccagagggacggaggacacaggttattaaagcagtgtgcctttctcagttgattgtgatggctttttgtttttgtttgttctgtattcttaaacacagaccctagcatttcaaacacaggaattttgctggattgttaaaactgctgtggtaatcccgattgtggctggcataaggtttattcatttgggagttagtagggctacttaggccacctgaaaaattgtaggatgtacgtttatgcatggaggcatgcacttgaacacgaccaggaagacagaaacttagcaaaaacgtcaaggccttttgcacagccagtggggaacatcctaagatgtatgatttcaaattttttgggattgcttttaacgtcagttaattaactttgtaaaacaagctgccctcatagtgagaaaactttctagagatcatgaagtatttctaatgactctagtgactgacaagtcatttgcaagttaggtggtttccagctctgccttcaacaaaattgaacagagacttaagttgttaagtattttggtcattaaaaataatcaataggccaggtgcagtggctcacgcctgtaatcccagcactttgggaagctgaggtgggtggatcgcttgagcccaggagttcgagaccagcccaggcaacatggcaaaaccttgactctactaaaaatacaaaaattagccaggtgtggtggcaactgcctgtagtcctagctactggggaggctgagcccaggaggtcgaggctgcagtgagccaagatcacaccactgcactccagcctgggcaacagagcaaaaccttgtctcaaataataataataattaattactgttaattatacaaatgtttaaagtagagaagacacaaaaacaagcatccatttatatgcagacagttagcgcgcttgcatcagatgatggctgtaaatccaagggaattgcagcaggacctccagttactgtgataagttgcacgtgaaaatcagtaggaatttcacatttccattaattcaaattggattttcttcaaatgacttaggttttgctctaattatgagtttttctcccctaagatctaagcttcaaattccttctttcccccactaaagcccctttgttcttcatctgaaaaaggtgtgcaacaggtgaggcctggcaggagatcatgctggcctgtctcccagggaagctctgtgaccctgagtcagattacaaccccggggaggagtatacatgtgggagcaactttgccattgtctatttcatcagtttttacatgctctgtgcatttctggtaagtgagcaacacagctccccctctcaatttacagatgcttatgtagcagtcagcgttcacacaaatggccttgccctgtcccatcgcctgaggacaattgatgtggatgagcactctggactccacttggcagttgagggcttttgtttaaccaggcgtgtgtcactgccgccacctttgtaagcagagatttggtgctcactaatcggcttggagcaattaccaatcaccttagcttcttagggttcctttctaaaatttcaaagccagtgcatatggtggtgacctaagagtgtgaattatttggtgataatgaaattataaaactgcaatgtgtttcagaaggccttccttccccaggacttaattaaagccattccagaaagctagaatcacactcttttcttaaacattctccaaatagaaagtttttacaacttctcttggagacatgggttcccatgtttcatgtccatgtcattagaaagcctgtgctcagttctaacgcaatccagctgcagctgaagttcttcctttcctatttgctttttcagatcatcaatctgtttgtggctgtcatcatggataatttcgactatctgacccgggactggtctattttggggcctcaccatttagatgaattcaaaagaatatggtcagaatatgaccctgaggcaaagtaggttgaaaaatatttgatttggcgtgtgtgggtggattttggaatgtcagctttttttgtggagtggactgaaagttcgggccagctggtactgttcctggaccttagattgtattttacttccaggggaaggataaaacaccttgatgtggtcactctgcttcgacgcatccagcctcccctggggtttgggaagttatgtccacacagggtagcgtgcaaggtgagtgtcctgtgtgcgtgtctgacagcctgtcttgtagaagcttgcttcatttaacaaacacttgttaagtgacacagccaggccttctgtcagttgctagggatgcagcaatgaataatatgtggttcctacctctggggaaatctcagatttgtaactctttggacaccctctcaggaaccatcagaagaggaagggaattctgtaatttgtcattgggtggatggtagagaaggcgacatttcagtccggtccagaaggaacacaggagtttgtcagaggcagggagggctcagaaggaggcaggagaatggacatcgtaatggcaaagggtgagccattgggtcatcctttggctaggacataagaggaagtcagaaggccccaggtacaagctgagccttctctgtcctgctgaggtccaggagaatggggaggaaacgtgaatttcaggttcccatgttaggaagttggctgttggcaatggagaagtagacctgaggcagggggatcaaccaggagagccagaacgaaggcagcagaagtgggaagagataggagcagtcgcttggagatccacttaggatgtggagtggggaggacttggtggcctgggtgaggggagggggagtgctaggagagcacatctcccagcctcggcattgggggacatggtgctctgtgttccacacgtcccctctgctacagagctttgtggccaccacaggaaatggggcccctttgctggcacactaggctctagtctctcagggatggatgcagatctcccagtgcaacgcagttctgtgtttccatgccagagcacgctctcaggaaccctcagtgagacttttccttccacagaactcacggtgtagcaccttacatttgttgcagcgacaaaaaagattttcctttttcaaggaaaacgcaaggtttgcctcttgaaactctgccttctagaaattcatacagtctgcatagcaactagttcttgctcctcatggatccaaggagatcctggggtcaggcgtttttaccactccaggatgctgagccagctctagacagaaaccaaggtagcagaacagagtctaaaatatgtttcagactctcaaagaaatcccttgagccagactcatgttccctgccctgaaaatccagaaagccttctaggcaaggccttagggtccttgcctctcttcaggccggactctggatattgaaacagagcttgacttttttttttccataaacttcccagtactggcctcttttctgctttccaagaacagtgtgggatcccgttcactgatgtcttcttgtgtttaaatttccagacccttttacataaagctttcaaatgtccttgaggcacagtcatccattttgctgactcaggaacttaccaggaaaagtgaacaaatgtccagggttccctggctgcctgtgctggttttgaagagggtgccggggttggtaggaggactaggaatttgggtgggatggacttatgcagacacaagattccaaatcatcaatatggaagagaaagaaaatcttttcttttggaacatgctgttaatgaaaaataagaagtttttaaatattatcaacatcaccattaatttagtgcttgccatttgcctcacacaaaactctttgtgtccgtgagtcctttaatccttgcaagttcccatccattgggcatgtcatctgcatttacaggttgaagtgactggggtccagagagggtgtacctcacccaaaccccctccaactctcattgctggtgttaaagggatcaggatatagaagaggagtggggagcatggatcctgctctgaaagaccaaagcctgggagaagccacataggctcatgcaaaatgccacaagatgtacatgatggtctaactaggcaaggtctgaaggacattccctgagttgggaatagtaatggatcccgtcggttgagaacctaagtcccaggccctgtgcctggcccattgtcttttacttcctttaaccctcacaacagctttaaaaacatgcttggagccgggcacggtggctcacacctgtaatcccaacattttgggaggccaaagcaggaggatcccttgaggccagaagttcaagaccaacctgggcaacaaagcgagacctcatctctaaaaaaacataacaaaacaaaaacaatgtgcctggaatggaggtctgaccctaagatctccattgagattagtgaaaaaaaggagaagactgtttgaacagtgaagtttcacggtttaaaaaacaaaacatcatctgcgtgttaacatttatatttcatgactaaacctttgatctttgtcatcccagagtcccctaagtggtaggttgtattaatcagggttctccagagaaacagagccaataggatggatatggaggtgtatatgtatgtatgtgtgtgtgtgtgtgtgtatttgtgtgtatatatgtgtatatgtatatacacacacacagaggtttatcatggggaattggctcacgtgatcatggaggctgggaagccccatggtctgccatctgcaagctggacctggtgttggtgtccactctgagtaaagtcctgagaaccaggggagcccatggtgtaagcctcagtcaaagggcaggagacaattgatgtcccagcttaatcaggcctatagagagagaattaaatcttcccccacctttttgttctctgtgggccctcatcaacagaatgaggcccacccacattggggagggcattgctttactcactctacccactctaccaattcacatgctaatctcatctggaaaaaccctcgcagacacacccagaaatcatgtttaaccaaattggcatctcgtggcccagtcaacttgacacctaaattaaccatcatatgcgtacccccaaatggctgttgaatggaattgagggttgactagaaaagagatgagtgataaacggaaaataaacatccaaaaggatatggtcgtggtcactcatttgcattctacaaagaaaccttcctttctgtttacagagattagttgccatgaacatgcctctcaacagtgacgggacagtcatgtttaatgcaaccctgtttgctttggttcgaacggctcttaagatcaagaccgaaggtgagcattccctgccagcaagacaagatggcaggaaaggagagagacatcacatcccatcttgccttcctcatctgggccttttcttggccaaggggaggccctggggaaggggctggcaagtagaatgaagatgtccatgctgggcttgccggctggcccctgcctcctgtttcctcatcctttatctccttcctttatgcttcactttgtcccagaatgttttgagttgactcatactactgcttactacatagcaagggaaacaggcagggtatcggagcagagacgaagccatcacaaatgaactcactccaaccatccctaactagttgtatgacctgcagtgagggatttcactggtctgagctgtagtttctttccctatgaaaaggaaatacggggatgtctaggaggtcctgaggatgaaatgaggtgatgtctgcaaaagctcctttgcagtgcctagcacacagtcagcacttgagaaatatagtgggatcagcatcttcccagctgagagaccaaaccagaatggccttcacagccatgctcagccctggtcaaatcctggtaaaacaggcactagagtgtggccattggagctggctcagtggtgacttcagaggtggaatggagagcagattgcaacaggctgaggagtgaccaggaggtggggggaggtgggaggtggagacctcaaggagagctgactctctgaggcactggtggaggagagggaagaggaggcagcaagggactcatgctgagtgcaggcaggtgacttcttacaaccctagagcccagggagacttgatccagcaaagccagcctcttccagcctaactaacaggggcgccttgtagcatgcttgtctgtacctggccccaggccagcattgttaagggctccagaaggcagaatggtcctctatactgacatgttagttgaaaagacaagtgtcagctcatataataaaaggccaaggttatgttgtatggatgagtacatatagtaggaattgagagtcttatttgggtgaaatttaggctggatcttcaaggaaggaggtacgatttggaacaacccatgaaagagcagaaggcaaagacattctgggttgggaacaatggaaagcaagtagtaggtctcagctgtgggagggcaggatggaatcagagtgggacaggccttgaatcccagggtgaaccgtgtttgttcccatggtggagggacttcccactgggaaggcatgatcgctattgctgaatataggaagtgtgtttgcccctgactggggagagcctggtgggagtggagccccatcagagggcagcatgttcatccaggtcaggctgggacaaggctgtgcaagcagaggaggagctggggaacagaaatgaggcttgcttttccccttttgttttttgaatccagggaacctggagcaagctaatgaagaacttcgggctgtgataaagaaaatttggaagaaaaccagcatgaaattacttgaccaagttgtccctccagctggtggtcagtgcagtctatttcctaagtagtccttggccagtgctttggttttaatgctagtgtctccagaaagtccagagagtgtttgcaaaatgctttatgtatcatttagagcattaaggccaactgataaagaaagccctttggccatttggtgtgattattttgggggtaatatgaagaacattccagacaaaggagaggcttcagtgaaaaaccaaaactcacatggctggagcagggattttctttttggtggaggaattaatgtttgaggacaagattgtgatctcaaagtgaaaagcctatattttttgtccaaaatgaaatattcaaaactagtttccaattacccttcagtatattgttgaaaatgtcccatgaaaaatagacagctttcaggaaattgtatttttgaaatgttcttatcaagactgaatttactaccgtaattaccaaaaatgtccttttaactaacaggcatgcttatttccttttgttatttatcacaaaataactaaccttctttaaatttttatatatataaaaaacatctatatatatacacacatacagtgtgtgtgtgtgtgtgtgtgtgtgtatatatatatatatatatatatatatatgcatactggctttgcatttttatttaagtacatgtggacttagacgttgagatggttgtttttgactgttctgtttccaagttttaaaggtgcaggatctgttcacccagtgccaccacaccagcattctagcatccttgggccgggcacgtgatgagcctttggtgtgtttcgtgaccagcgaacttttatagcgtcgctgccgccacggctttcgagactggtctggctcaggtctggtagctgacttcaggacccaggccaggacggtgaccgaggccctgcccctgagaaggtgatgagctctggctcttggggcgcagacagagcagcatgccagccagctctgctccttagcatgaagcgagaagcaacgtgagcttttgttgctgaaggggttacccgtagctggcacagccacaggctcaaagctggggaagatggcccagaaagaaatgataaaaggaagacaaaccaacaacaacaacaaaacaaaacaaaagtcctcccacctggagggccctggcttcccacaggagaaccgatactgcacatttaaaacaactccttggttttcattcttttctttttagctgcacacctaagagcttgcatggcttacatgaaatgctttggaaaaattgtaacaatgtgcttgagcttttcctgcagcctccattcctttcacctctcagtctttcagaatattctgaagcaattctgttttagggtggtggcatggaatcagagttatctcttgccaactgtattcccctacgttgtttctttaaatacagatgcatgcttcagaatagtgggctatgtctgtctatgtaaaccttccccctgcgagctgaggaccccgctcctccctcgctccacctcacatctctcttggaacgccaccttcatcacaaccagccagactcccacattgatgcccatcctcgtgaaatgccctcggagggtgtcatttgcattagtgtgaaacttcatttcttttcattttaccaaaagaaaagtccagaatttagctcgccatcgaagctcccttcctttgaaaagctgatcaacttttagctttatcagacttctagtagagtagaaatcttcttctttcttggtccaataactggacctcgccttttctctctatttcttaaaatggattggagtttaggatgacaggttttaatctattccacaacggcagcgagaggcagtgtgaggcacaagaagagagaagtggggccttaggagggatgcaaggctttgcaagctccctgcctgtgttgagtgatgtgcccagtgcagggcttatccgggctgaatctcatgtgagtgctgtggccacgaaggaagttccgaaggcagtggccatcaggctttggtgcatagactctggaagagttgccggacagggcttggttctccacattcatcatttgtctgtctttcctcttttatccttcagtaggcccatgtccccaacctttcctgcatcacagcatacttagaaaaggatatttgcatacccctctgggaacagatgtggagttcttgaggctgagggcctcagcatcccctacaccatcacctggtcaagaagcaggagactgagtaaggccagcctccactccaagtggctgggactggcagatgtggggtgctcaggaagccccttttagccctggtgatagaactgagtcagatgcttgtcttgggtggcttcgctagtgtgctgtgaggtgtggcctggctcctcatgagcctgatgatgagatcaggaatgagctgtggatctgtggatacatgtcaggcttgcttcactcccagtggcccgggggtctccgctgccccctcaccatcagtgctgagccgcctcatctctgcctctcagctcaggttctcacctctgctcttcagccttcccgtgccatcttgtgggtcctttcccttcatttcagaagctctctctcctccccaggactctcctccatccatgacctggatcctttgctcctttgccctgaagagcacactgagctgcctccattgccttcttttcagtccggagcccagatggcctccttgtattcattccttctcttccttcctgttctgtcctgctgtagctttgacttttcttgttcttaggaactcttccttgggcccagtctcctaattagcacagtgtctcaatggagaagacgaagtgacccttgagttctctcctgcagagctctgggtgggtctgcctctactctggaggctgaagggagatcagagttaggcctgtatttgctagaagcatcagggtggaatggggtgtgggtcttcttcaggtagagccagggcgttttctgggccccacagagaagacacagagccctggaatatagaggaaggctgtggcatggcaggccaccagagactctccctggggtccctggagtcattagccagacaacagcgtgtccactttttgtgtgcagcctgggaaagggatacacttgcatggtgtgagaggcagctctgaagaagcccagcagccagtgtggctggagacggccatctctggagaggtggtatgaaggataggatcccagactcaaggagcacactgtcctgtggtaaggtcccggcttgactgagctgggcaagtcatttagccctctccatctgttggagggggtggtggtgagcagatccaccatgtcagagttgtgaagaggccatgagacccacatggaattcttctgacacagggcttggcatctatagatgtccaacagtaggggctggctagagccagagctgatattccaaacataccctgagcaaatggggaggctggagagtacagcgaggggtgaaataccaggacctgagtggtctctgctcacctcctgccttcttgcctatggaccttgcatcattagacaagccgagacagattaggaaccatgttttacatgctactcagagtctttggcttatacctgggtggcccctacaccactccaggactatcttagcttaggtttagaaggaacagaacacttctccaggccagaccacctgagacagccttctcacacagtaacactgagtggcttctgacagggaggcctggagaggcagcccaaggaggcccgggcatctccagtggggaccacaagatgttggcagcacctcctggatgggcactaagtgaagcccaccccgggtacattagtgaaggatgatggttctccatgtcccccagcccatcaagcttcaggatccatgtcaatggatgccaccgtcagcacattttaaaataagggtgactctgagggctcatgatcaacatcaagtgcccagcacttaagacagcctgagccaggtggctgagtgctttacctgcttcctcccacatcatcctcacggctcctctgagaggcttatccccactttacagatgagaatacaagctcagagaggttgagccccttgcccccacatcagcatgtagatcttgcaagggtggcctggcctaaaagccagctgctctgtagcctttggaccagcaaccattcctccttccagcctctgcaagttgtggtcagtggcccccagggccccacatggccccacacacatgggacggagtactaaagtggtcacaagctttacccccaagagacacagcacactgaagatttggtagcaagcagccgtgggagagccatggggcacatttacacgtccaaagtggtttaccatgagacagccagagcctctattctgcctcatgcatcacctttaaagtcatcagcagagttctgattccccaaccatacacgttggaggttgtttctgaacaaagcaaaaataagcccagctcaactatgaggttggttggagctgtcactacagtgcagaaaatgagctgttcagaattacaaaccaagaaatggtatatggagcttattggtggagaatagggggcggggagctcatgaaaatctgaatttgcagtcacttttctaaaccttcctctccttctgagcatgtatgtcacctttctaggtctctatcttgagacatcgggatttggacggttaattgcccttgataagtttatggtagttatacatgcaaatccctatgcacaggggtgaaatgtggcccgtgaagcctctttttgttttgtaatttttattttaagtaaataaccaagacagcatttcatagtgttactaatatgctgctctattaaactcataacaaatatattattttctgcaacctagagtatcagttcatttaactgacactaattttgagccttagttgctttgcaaaaccttgctttttgctggtttgagacccctgtgttatatgctgagacctcggtgccttctgcgccggaccgcccacccgccccactctgcccctgcccctgccccagccagaagcaagtgtttaggctcttggtctaatgtgctgattcgggagagctctgtctggtctctccgtttagatgatgaggtaaccgtggggaagttctatgccactttcctgatacaggactactttaggaaattcaagaaacggaaagaacaaggactggtgggaaagtaccctgcgaagaacaccacaattgccctacaggtgaattgttgtctcattttgttttctcttttgactaacgattttacaagcttatttgaaatactagagagctgcctattcatggttgagcagtaccacaaggattttgtttaaactgagatactacacactcccccaaatgtggactagccatttctgggccacaaggtaagtgcttccctccccgatgcctaccccatagagccctgcacctgccactacccacgcggcagggctgccaggacggagaggagcgagcgctaccctcgcaccccagcccctccaggcagcatcctccaagcaggcacccaccttccccacagccctgggctccagggttctggctgcccagtgaatgaacagctttccatctgaacgcaagtgctttgttttgtttccgtttgtttcttaccccactgcttgttggtttttggtccatttcagtaacatccatcacctcctagtatgtattctgtgtgtgtgtgtgtgtgtgtgtgtgtgtatgtatgtatgtgtggtgtgtctgtctctgtatgttgtctcctgatggccaggaggccagctgtgcacatgctatgctctcatgccccagccagcctctggtccctctccctcctccacctgggccctgctgcaggctcctagagtgtggatgtggctttcaggaacctctggtaccagccagggtccttgcatgcgaggaatgtagaaacctaggaaagcccaaagctctgggatgggaagcaggtatgtggaggggcaaggaaggcaccatgaggaccagcaggaagaggggctaggaaggtggtctgtgagtgccgtggatgaaggaggcagggcaaagagggagaagatgctaaggacagggaagagggaaccacagaggctggcaaatcatctgaaacaactgacctctgctgcccagagtgctcataatccatcatggataggataaagaattttttaaaatctatttacgccacaattttatgcccctgttctcagtacatgttaaatttggccttgtagatattgataaggttcaacatggaagagtccttcactcttatccagggaaaaatgcgcagcgttgtgtgttcaaagtgatggtaacagcccaaatgagggcttatctttgatcttgctgagagagagaatatgaatatgaatatgaatatgaatgacagtgaatgagtgaatgacaaacatgagctgtgtgtgtgtatctcgtgggttagtagatggccttgtgtaacagtgacctgctgattcatggtgcaacctctgctctacccagacagctacaggggctggggaaagaggcatatgcgggttggcaggtggaccatgaatccgactgaagacagtgatcttcctgcctctcatcacgtatcctaaaggtagctgagggaatcacaggctcagtcacacagcccattggcatctcaggtggtaggatttgcaaatgaagctttctcacttccaaccaatccagtttgtaaaagtgacagcccccctcctggattgcagttcacagctagcctccgaaagacaaagcaaactgcagagatatgtttgcagattagaagaagtctctggtccatccatccttgagggcagcgtggccaggttgggtgccaggagagggagtgatgaacatgcttctgcaggcttgtccttaaaggagtcccctgcccagaagatgaggctggttagatggtttagttccatttcccagtgccctctgcttgtagggaactgcttattgttctgggagcctaattgggaccagaacttgataacttttctggagggaggaacatagtctgtcatcgatggttgatgtcctaatttacagccagcaggttagctaggtaccatgagaatcttgcattttctgtgagaggcatggcggccacttggatgcagggtcatttatactttttctgaacccccaagacttcccaattagacaatttcagcactttctctagtggctggaaatagtgttttgatgttttaagatatgcacaaacaacacacagctaagtcattaccaggtttcacgtatggggtttactgagtcttaagttgaagggtcaaatggcatgaatgatacagcggcaggttgtgggttaaaagactctttttgtgttgcaataatgttgagggtttctcctaaacgtttttcattttattgtttatagagtttcattttattgatgaaatgcaaacatttccagttagatgataccaacatattttcgcatggctccattgggagctgaagcatcgtctgtaatttatgttgagaatgcagcctggaaaattaagttgtgttcataatcttaatagagaaactgaaaatgtacttgattctgaaacattaaacatagacattttttttgtctccttgaaggataattctaattgcattttggcttcctgtgctgtagaaatggctgtgagtgtgatttgttactccatgtttaattagcatgagtaggctttcgtttctgcgtgatgaaataccgggtgacgatgtagcagttaggaaaatttggtgggacggcagtgggagagatataccaccagtgtaactaggacaaggacacagcctcgggaagcccctgagagtgggcgtggcctgttgagatggaggatggcttgcctcctcccacagcagggtgccccatggctggcagactgcgtgctaatggaaagtggagcatggccgtcgcagtgtgagcgcagaagtgcggacctaggcatgtgcgtgcttgtgctgcgtagggtgcagtctgtctgaacagcttccaggatgggcccaagacctctgcgcccccacccccagggaatgttttttcaaggacacatatacgcactgtggttttgaaccctgtgggctccatctgatctccctgtgttcagaccaactgcaatgctgcctcccacatgaaggggaatggcttgagctcctggatccatgtgtgggaaggagctcggcatccggtgtcttctggcctctgtggtctgaatgagtgtgcagtttccatccttccatccatcttcatcattaaaaccaaccttctctccagcccctctacagagggaaccagagagaagctgcatcaggccttttttaatttcctcttgcgcatctcctacatgccatgttcactttgggttgactcagcatttgctcgtcatccattgttgctacatccgagtgacccacgagtttccacgaggggcaaataaataaaggaacacagccatgcagccatgaaaattctcagtcctcctcccagcagacagcaatgcatgctgaatgtcccatcagaccttctagatgaggacatctgtgcaagttacagacactcattagtccagtgtcttgtggataagaaaaagaccccaaagtgggaaaagttttgttcatttctctttcttttaacattcaagaatttcctttctgcaaaagacatgcactccggtggaatccgaggacactatgtcccccactcatcccagatgggagcctttccatctccattgtaggaaagctttggagggatagtccttttgcctgtttggaagtttggtttaaggaggagaccattatttctagctataaagaattaggttgttaggttgaataattgtaaagcctgtgcccgagccgccagttggcgatgcaggtggttgaggggagatgtgggtggtatataagaagcaaaggactctcagcccctgatgtgccccgcgtggtcttcttagggaggctcaatgcataaagacagaagaaaatgggatcctccacagagatttaatctgtagaagatcaaacacctgttgcctggtcaccttagtctaaaaagtagtggagttttgttttgttatttttttaaagcatgattctacctgaagccatcaaaagcctctttttaaatttttttctttttttaatctaagaggagaacagatgctaacagatgagatttcactggctgattcgtttgtttcagatgcttgaacggatgctttagaattttctgcctgagctacggcaccaagctggttagtcggaaggcgtttgtggctaaggccttgaaagggaaaagtctcaagtgggcttatttctactgaaacagcatttcagaagaaatgcaggaaaaagcagacccaaggccccagggagaccccttccaagcaaagcactcctccggaaggtggaagcggggccgtggctcatctgcggagccagggctgcctgtcgcggacgttgctcacggtggttctttttcgtgaaagggaacgtacaaagcttaacagttttcccttccaagcagagactcagagaaagggaaagagtgagagagagcaaaggaggggggcagctgccccacagagaaatgaaatgaacacaacttcctgatgctggccagtaaaacaaaaaattaaaaataaaaataaaaagattaagcagacctgcctaaggtgggtatctgactccattccaaagtcctgcatccctagtttgcccgaactcccaaagactgacaggcccctcggcgctgagctgacagagttccttttgtatgccagtccgccatgacctcctgagcgtccggccctgctctctgcagagacccagtccagaatacagtgagaagtggacaggccaggaagctcagatacacccattgaaactaacacatacacccgcatgccaaaaccaatccaggcaacacctcaggttccatcttaacgtgtccacaggaaacaccaccacacccaaacctcatctaacattgtccgtctttaattcgtgctcagagccagtctggggatgcctctttggaagcagtgtggtctagtttcaaggacactgggagtcagggaacctgggttctagtcccagtttcagcattcacttgctgcgtgaccttgggcaagacacttaacctctctgtgcctcagtttcccccatctgtaaaatggggttaataatgtcgacctacctcacagggctgttgtgaggaatagctaagtgattgtaaagcactttgaacgtataattgcttattaagactacaacaataataatatcatatgcctgtttactaccagaactttaagaaattcttgttttcctttgatctcttttctgttctgtaccatacttacccattgagaaggaaaattccccccttttaaagaaatctaggcaatgcacaaagatgtcaacagaggtaaccctgcaggttgcattttcacatcttaagaatagcagatttttgcccaagatgttggtcgataagggtgtctgatcttgaattctcagctgattccaagtggtggttggagtctgtacatctgatgctgagcccaagacacccaaagtggccagtttgggttttaagatcaacattcaaagtagccatagtgcagaggtaatgcagaagaatctaaaaaaattgaagtatctgaagtgtatagagaaaagaagggcttatgagcccctttcacctgccctgatgtgtacaggctggaagctgtgtgtgtgtgcgagtgcgtgtgtatgtatgtggggtgtgcggagacaggggaagagagagccagcaaactctggggggccctattcctgtagaagtggacacccttccaagcatcctgggagggcaggagtcccaaaggctaggcagagggtgggagcaatgtcaccagtgggaagtatgctttctgcaggcttgtcctaggtgtgactgacagggtcagtcccagcctcagggtcttttccagtggtgtcttttgtgcctatgacatttgcccttggctgcagtcctcactgtaccgagaggtctaacctacctggacttcagtggacctgctgtcctcattatggaaatgggcctagctcccgactctgcccccatgtgtataagtgtgcagactagttaacatccaggagctcacagtaggtgttgtgggttctcacagcacagtccacagggcccaagggcaggtttgactgcttcgtgctgcaccacatggtgatgtgggggatggggtagaaagccaggaacactccagtgtggccaggccacttgtcaagatgttgaagcacagctgcacctggtatcaaccgctgttaccctagcacctgagtctccttccccactgccagcagcccagcccctcctgagactgctctgtgacccagcagctacaggtctagtgcctggcattgcagggagcctccaggaccctgctgtgatccaaaggcccacttctgctctgattgggcagcacctgggtatattaagttataagaatttatgaagaatgtgatgtatcgtccctgaaagggaagcccgtcagtcctgtgggggtccgtcagtccctctgtctgtctttgacccacccgacgttgagttgattcagtgctgaaggatggcacgtgcctaccccctgtatgtgtcactctgtctcagagggccggtgtgaccgaccttctagatccaagattccatacactcaggcctcggcagaaaggccccaagcgattcaagtgggcggcgtttccatgtgccttctccacgctcctcaaataagtaaaaactgacaagtgaccactttctagatgggacttagggagtgatttaaatggaacaagagagtcttctccacttgggcctggctgtgttgctggggaatggcattggctaaggttggtagccaaggccagcttaggaaagacagccaggaatcaggaaagctgcttccagcttcaactcaaaagggaaagaaggcttcctgaaacttgatttgcagtcaaactgcagagacaccgctgtcgtttctcttaaagccttggcagagaagtgtagcttctagtgtagtcaaagttgtgagagacgactcaagttcattatttagaatcttcacagacacacacagcaaacttggcacccccaacaccagcatccataggctaaactcttcagctcctggatagaagatgagaggcaggccagtatacattgtagggaggctcttctcaaatagcttatactgtttaacaacccaattaaaaattaatccacaggactattgggtactacattctatactctttctgaaagtggggagatctcattcctttgagaataataattatgttcaggagtctttgagaagaaagactgcaaagaagttaagtgatgtgacgtagtagtaaaaggtggtaattatcgtggcttgttatttagtaccattcacctagtgtcctttggcagcccaattgtgtcatgattagatgatctgtgcgaaggagctggctaagacttactaacagttctagggtgggtagaaacccaggtgagttcattctccttggcacctcttagacctaagggacacagctgtttgagatcttggaagggcacataattctaaggcatggtgaaggcaacccattcagacgtcccaaaggctggctcagggaagccataggaaggccatttcttccaagagtggagaaaggtccacagaagagtgggaatcctagatggggtaaaaaagtctacacctgaggaaaaagtagtagtgcctgttggaggatagattgatcagcagttatcaaactttttggtcttcggacccttttatactctacattattgaagacccttgtgtgtcaatatttactgtcttagaaattaaaacggagcagtttttaaaacaagaacatgcaagcacaaagacgccagggtgatgacatcatgcatcaggcagcctttgaaaacctcactgtgctctcatgagaggatgagagtgttgaaggcaaagaacatccttatgttatgcaaatcacagtgacctcatggacccctgacagtgtcttgggatgccccaaggtccccagaacacacctgagaactgctttgggggaatgctactaggtccccctaaaggcagagggtgctggagccttttaatcatctcccttgttaaagaggctcctgtgcagtggcactgccctaactggagcccttctccccctccagccccttcccagtctcagcccactccccggaggcatggagctgcctgtgtccccattcgtctagcatggccgagtcttgcggcctgtgctgatctgcaggtgtgatggtctgaatcagggcaggatagaaagtgtttttaaaaatcagctcccctaagtgcacaactgggaccaaggatgtgtgccaaacaggatccgtttcagggataacttttgatcatttgtcatctccatgctgacttaggaatataagagctctgctagggtagtcaaaagagggttagccttgatcaggtggcaccccacagtcgtgactataggtgagtaagtgtgtgattcagactccaatccagcgttctttcccagtaggtgcagtgactttgcctgggtggtggttgaggtggggagtttgggagaggtaaggcagcccagtgtcacaggaagaacaggcttaggggccaagagtcctcactgagcctttgactcatttgggcacataatttaaccacatgggaataactttggctctcccttcctcccagaatctagtggaatatttgtatgtaagctcacaatgactggtataaagatgctatcagaacagaagttgtgttttacagcttctgctaagcctaaactttacagaatgctctattatcaggaaactggcaagactttttttgattcggttgttaaaattacaacgaatcagattcctgattgcaccaagaatcaaggtggaactgaaacggagagctctcagattgtgtgcaggcaaaggtcatattttagataatttctttaaagtttcctttatctttccaagtgatgggaatagcgcaacccctaggggagcttgtgggggtcatgttacccctgacttttcagtgagggttggaatcactgtggatgactaacagagcgccaggatcccaaccctttatatctgacacaaggaccattcacaatggacacaaaggctgccatcacattatccctggaggagagtggtgacaaaataaggggtgtgcccacgtgtgatgtgctgaggaggcggacggcagcttgcagatgagcaggtttattccataagaacttaatctcattctgttttctaatggaactagtctaaaaaggtcccctctcattgggtatagactgaatcctgctaaagggttaaccagaacttgtcaccagcgagacgactgtgtgcagggccagcctaggctgagtgcagcctgcctgtgatggggaacaggctctgccaggcagggttctttggctggagtctcaaagcctggcgcttgtatcctgaagatgaatggcctggcccagtcccgactagagacatgcatctcttatctccactgctacagcgtaggtccagggcggggctctgggcacttgtgcatgcttgctgtggcgctgtgagggctggcagatggctggtgtgtctgatggagctagcttagggacacaggcagcaaaagcattgcaaatgcatctaggcaggagaaacttaaccctaaaagtgggcaggagaaagaaaggtaaatgggtgttcatatttgatgtcaaaatgtcatcatattatgctattcagaagtgttttgagacattttagttttttttggtaacttaatcattcaatagaatatctatgaaattccaactaaatggtgtctaaaattttaagcagcagtctacaggcaaagcgccaacatttcttttctaaaaattatttatgataacatctagcattttaaaatcaaccagaaactaggcttgattctgtttaatattttataagattggacatcttaaaataagtcaataatgtttatattttatagcaactctgtgtttcttcaaaaccatatttctgctgtgatgttaatggaatgactttatatggctttaattgtgttggtttaagtgctaatgaccacttttcaaattaaaatagtattttgctgatagaggtagacacagatatgagatatgaaagaatagataattttactgtttgtaaagtgtttatcccaagaaaaaaaatgttcttttttttagggctgtggaaaagtaattttttcaagagtctaagatagttttctgtatttctggggattggaacttgtgcctatggaattttgggagcagcctaagctaccttttagcttgatatgtgtgctagaaaaacttcattaccatgttttgtgatatgtaataaattcagggtgctgtgcttaagcttcatgtcaattctagtttgggaacatctgtttccctcactcccagtcgtgggggacagcctgacctggccctacccagaacacatgtgaaaaagtagagtcagtccctgactcttatgaggtctgttttttcctgcctggaacaagcagaatataatcatgatttctgactctctgcttctgtgtctgggaagagcgattcttctctcctcctctaatgtctctttaataaatatgttgtcattatttgtctttggaagtggcaacttgggccacctttcaaccttctccatgatttatgttgcaaacaaattctctgtcccatgtctgttcattgcactatcttgtcgactaaatcctaatcttgtgtatcactgaagatgtgctggagacagtttttgtttctattatgcaattatgttatatgtgtatttcagtgaaatgtcaacccgtcaacagaggatgatgttaaaaattatccaaataaatagttttctatttcttttaatcagacctagtccaatcagttgaatgacagtaaataggattatatgttgtttaaacttgggagcatttctggcctttactgccttgtaatatggattaatgtaccaaatttacttgggggtgttgacttaagtgcattataacctatgtttattttgtggaagcagcagcaggtgtcttaaaccttgtctttttgtttgggagccttagatatgtaaccgagttttcttcccagttgatccaaaatcagaagtgaaccccttgcttagctcaccatcccttgatgatgtaccctaggaagctctgaatgaatgaaatgcggctgtttagtactgccgggtatgacctttcttcacgttcctgcagctgtgctgtgtaagagcttttaccaacatagcattacagttgccttcttgatgtttccatgagaatggcaggtgggtccacctcagaaccaaatgacttcccaggctcagatgtgctgaactcgtggatcctgagagagggaaagtgtgtgtatgtgtgcgtgtgtgtgtgtgtgtgtgcgtgtgtgtgcgtgtgtgtgtgcacgtgcacgcacgtgtatgcacaagcatacccacatgtgcatatgtgtacacacatgcatcctgagcctgtgatcagagggacaggagagcaagaagcagcctccctgaccaccccaagaactgtcttggtttgacccgggacatgactgtctgtcccctataagatctcagcattcctagtcaggaagcttaaagctttcattcccagctcttccttcaccttcagaattcactaaatggaaagatctgctgctctatcttcacagaatggttcaaaccaaacccaacctggcaccatttttagcagaattgtctcaaaggcttggtgcttttgtgcaccaggctatttttataagggcctcttgggaagttcctgtgtgactttacattctaaattatcatcaccagcactggcattggcaactgcaggagaccagttttgagcatccccagaccagtgggacccagccctgatggatctggccagactgcagccaccatcccctcctcctccctgaaccacttctgggcatctgttctaccccatgcttgtctcagggatggtcatcatgcctatctgtccttgccacagctgcccacatgctaagaggtgttgtggaggaaggacagggaagcggtctcctctccgaggacccaccacttagtccagttttcctttgcaaaccaccctgaggttgaagcatttgctgcacatccattgtcttagctgttctccaggcctttagggctacagagctgtggacagactgccagtgagtgaggaggggctgcctggatacaggaccgtagacccagggcagagaggacatgccttcttcagatgcaggactttctgtggaaaagaataaagttgccatacagtccctattagtctttaactcagcatactgttttccttcaaactggtggtcaaaacatcatcattctctcagagctggagcagtaccttcctccatgcaccgtgcataagcatcttggaatgcttccctaatgaagtcgtgaacaatggaagggcttatcctgggccctgtctcaacatagcagggaccacagtgaggaaggcagctgtgagggcgccaggggagatgcagagtatctgtgacgggcccagagggatctaccaggggtgtcttctggtgggtcttgcactgcctgcaaaggctgataagccactttcagtttgttgtgatcttcaaaaagcggaccccctgttggtgagttctcagcctgcacacaggctacaggccagggtatcctgatgaccacggtggccgggtcggtgtgcgtgtcagtctgctccgtcgtggtccgagtgtgctggtggttgcagtgtgttgtgtcactcactcgttccatggctttttagcagaaccagtggcctgaggactgcttggtctgcttgtgcctctggcacctacacctaggcttcctcatcctagatgcagcaagggagtccacatcagcctccctttagatcggccaggctgtgctccttgccctgctctgggcttggagagatagggctcttgtaggcgagcctactgaagactgtcactgagacaggggcataagctcttggcctggcagatcctagcactagtaaccaggcagtgttccttggaagtgggggttttgcaaaggaggttacggggttgcaggcctcaggcatcctacctaggaccttcttgaccctctggatgcctgaccataccaacaacccttagactgccttcagtgacatcagtcagtgccctggattggcttttggggaagccttcctccccaccgctgaatcaggaaggagcaaagccaggacccaggctggccccagggcccatgtgtggtctaacctgttctgccattttcattgatctaggcgggattaaggacactgcatgacattgggccagaaatccggcgtgctatatcgtgtgatttgcaagatgacgagcctgaggaaacaaaacgagaagaagaagatgatgtgttcaaagtaattattccacgcctagctacacactggccatctggaaatagcagggcaggactccagtttgggcagttaatcatccacagaagagtctggagaatgcagcccatccccagggcctagaggggctttcagaccacaccctccccctcttacagaccctccccaggcatcagcacctcttctagggccaggccagctctttccctgagcttacccagcttcccctcactgcctgcttctgaggagctcggccacagccgctggccctgtggatgagcatcctgagtccttccggcagctgcctttgctaccctcctccttcccgggccagctctttgatctgccagctggctgtcagtcccccagcccagagagcatgcccaaccttggggccaccagccagcccagctgggtataagtcaccccaacttggagcaactggaagagcacactcgagtgacagccgacagcttgctccccagctcaggaaatcggtaaccttcctcatctcggggggaccaactgccacacagtcacattcaccctgatcattgagacactcagattgttttacagggatcctacggagcttgcctagaatttgtttttcatgtagaaaaagttacctaacatagctagtctgcatcaaatacttgttaaattacctggtgttgtctcccattattttgcagagaaatggtgccctgcttggaaaccatgtcaatcatgttaatagtgataggagagattcccttcagcagaccaataccacccaccgtcccctgcatgtccaaaggccttcaattccacctgcaagtgatactgagaaaccgctgtttcctccagcaggaaattcggtgtgtcataaccatcataaccataattccataggaaagcaagttcccacctcaacaaatgccaatctcaataatgccaatatgtccaaagctgcccatggaaagcggcccagcattgggaaccttgagcatgtgtctgaaaatgggcatcattcttcccacaagcatgaccgggagcctcagagaaggtccagtgtgaaaaggtaaccttgacaatgtgtttggacttgctcatgtggtgtctgcccgtgttgcgtctagtcccaaggagcaaggcgggtctgtgctctgtgctctggggcatggaggaggttccccgtaggcatttgtgtcaggatctgtgagtgccccccaggtcactgctgcctctgacactctccacgtgatggacctaaaggataagggccacgtgccatcctacatcctgtgtggggtgccgagggaccttaaaacagcagcagccacaaaatccacctctcaattgtgctcacatactgtgcgacaggggttggtgaattgtttctctaaagggtcagtgagtcaatattttaggctttgagaaccatacagtcttgcaccttctcagctctgccgttgcagtgtgaaatatgtaagtgaatgggtgtgtggctgtgcccattaaaatttccctatggtcactgaaatttgaacttcatatatttgcatatgatgagatattttttgtcttcagattcttttttatgtttttcaatcctttataacaataaaacccgttcatagcccatgggtcatacaaggccaggtggcagcccctatgtggatggcgaatcataatttgctaacccctactctaggaggtagcctgatgtttgcattgtaaatttggttggaaattaacttttatcttctccctccttcccatgttatgcctttcctggatagaacccgctattatgaaacttacattaggtatgtgctcattacctgtttttgtgttaaatactgtgatggtatgttaccagctggcctctctgagtgctgaagaatgagaaacacttctttgagccagcctattaaaggttatcataattcatggctgtggactcagaggtcagaggttgttgcttctaagcaaaggcaccttcagatccatatctctgtcgactctgttgccatccaaggactggtgtccacacacaaggtgcaccccatgggctggctcctgcaggcctcgcgatggcactaggagcatccattgtgcatttacaggggcctcagcctgtgtggctggcagctccggctgctctctggggtcaagcttcttgtgggtgctttgcagcatgacccaaacctcctgaaggtcaggaatgggatcttgtcattttccctgtagccctcaagatatgtgtagtatattccactccacatgtattgacctgagttgaattgtgggcggaatgcccattttgttgggggccaagggaggatgggtcttcctgtgtcatgttatgaagtgaagtcgggagccatgtgggcccaagttgggtgcaagaaagtggagaagtcagaggaagtgccatccttcctttggagagaggattgacatcaccacgtccttctctgaggactgaggccaggatgagccgggtttcagggagacttaccacattcctggggcagggcagcctttggaaacatggtggacatgttctgtgacagtttcccctgtggcactgtatccagaactcactcgaccttcctgatttgatacagcaggaggtcagtggccaggaagctcctttgttccaggttctgaagtcacactgggctggagctgggggactagaaggagagggagggatcagagcagatgccctgggaacccagggtctttttccctaggtccatttttttgttctgttctccaaattgcacctattcctttggctccaaggcctctggacacaatggtttgacaccaacattgtgcagggcactgagagagaccctatcctggcccgcaggcacaccacacacacagacacacacacggtgctgttgccagaagccggaacagtccagtgctgcctgaggcaggtgcgcgctgggagaagccaggagcacccgggcagggttgccggccacaggcagaggtgcagctgcagcaggaattatctgccgcctgcccaggttctcagatcctctctcccaactgcaggtccgactcaggagatgaacagctcccaactatttgccgggaagacccagagatacatggctatttcagggacccccactgcttgggggagcaggagtatttcagtagtgaggaatgctacgaggatgacagctcgcccacctggagcaggtgagctgctctggctcctgtggagagcgggaggccgccctgccctggtgctcggcccactccggaagccagggccaccggcagctgcacttgggcttcccctaaaaagcaaaatgggagcagaaactccaggccagagggagagtggagctggagaaagagagccgcagagaggcagggtgagggctattctttcagacctgttgccttatttccactaggggcctctgaggccttttagtgaaggcttgggaaatgggagatgggcctgcttcgtggctgggttaatgcctttccaccacccgtctttggagagatcagtttttgctgaattaacacttggagctctggcggccccagggctctgtgtggacggcggcttggccagcctggagctgggccaggtcctcatgcacagcacctgcctcctgccacttcaaggggtctctcggggagatgaagaaatgaggggtcactcagcagaggggtccatcttgcttctgtcctacagaaagaatgtttgttagtacaatgggcactctgctttaggaggcgtagcaggcggcacaggcggatgaaaatcgccctccaccctcttctctgaaccgcacctcactgtgaccaggggcccagtgaagtggaagtggaatggcagtgaggtggcttctggcatctgagccacagcctgaccctcaccctctgctcccgcagcccttccccgtgcctctctcaaatgcctgacttctgaaaccactgactctgagccagatgaactcgtgttcccttctctagggcttttgctcacactgtggcccctgcttggatgccctcactccgtctgctggcctcatcccccctgtcgagggcctgctctagggccttgctttttatttccatgactggaattgaaatccctcccccaacccccagaaaagaaaacctcacgaaccgcatgagttcctctcttccagcactggccctttccagctcgcatttgatttctgtgtgctcatggcattttctaagcccattgagggtggggctcatgcttcatgcatcttggtgtccttggtgcccagcacctggcagagggaaggcactcaggagaggggctctcacggaggaaatgagtgggtgagagcctggctcacaggacatctgcgatccacatttgccctggagctgagggatcaaaactgccagcacatccctcagcacaggcctccagtcctgtaatggcccttggtctccatctggaatcttccatgaaactgaggccagccttgttctcagccaatcctactgtgtccaagggaggaggcggggagaggagtatggatgtcagtctggcagggttgagtgacagagcttgttacctagaaccttactgccctcctctctgacctccaggcaaaactatggctactacagcagatacccaggcagaaacatcgactctgagaggccccgaggctaccatcatccccaaggattcttggaggacgatgactcgcccgtttgctatgattcacggagatctccaaggagacgcctactacctcccaccccagcatgtgaggccagattttttgttttgggtggaacctcccggggaacagtgtacctctcccccaacccccgctctgggggccggtgatggatgtgtgctgccaggtcaggatccttagtcctcaagaccagcccccagccagagagtgtgtctgctttccttcctttctcatccatatctcacgtgatagagctctagcctcttcagtgctatgcttgactctctttgagaagagagaggctgtggggccctaagattgcacgcacacatctggtaaggggtgttttgcatacatagcattgtctttgaacctgggaccatcctgagagggaggcaaaccacacacatgcttttgctgttgtcagccctgctgcactctgtgatggggtgactgagcccccaaaggggaagagtgggctcaagtgcagagctggctgtgccgcaggcctgtcttgcaaaaccccatgcctctgagggccacctgggcattctggtgtccatctgtcctcaggcccctccaagccttatcctcctccctcatctctgctcctcctccctccctcatcttccctcctcctcctccatcttccctcctcctccctcatcttccctcctcctccctcatcttccctcttcctccctcatcttccctcctcctcctctatcttccctcctcctcctccatcttccctcctcctccatctttcctcctcctccctcatcttccctcctcctcctcctcccgcatcttctcctcctccctcatcttctcctgctccctcatcttccctcctcctcctccctcatcttccctcctcctccctccctcatcttccctcctcctccgttcctccctcatcttccctcctcctccctcatgttccctcctcctcctccctcatgttccctcctcctcctccctcattttctctcatcttccctcatcttcctcctccttcgtcttctagcatcttcctttatcttcctcctccctcatctaccctcctcctccttcttttccctccccctctcctccctcctcctccctcctccctcctccctcatcttccctcctcccccttcctctcccttgccttccctcctcctccctcactttctctgcttctccctcatcttcctgtcaagtctgtcagtgccctctgctcacggggcaggttctggacttgttggtccccttcactctggggccaggaaacccatcccacctagaggggctggggctggggctggctgcttccacctgctttccctctgcagcggtgggtggcaggagctggcggatctgggtcatcctgagcaaggaactccagctgggggaagaggtgcagccctggccccttccagcccttggctgaacagtttcattttggacatgtgggcattttgctgatggttaaggactatccatttctggaatttctgaggaatgaagcatatttttgaacaggactctaatcagtaaccaaaaatagccgtgacacatcggcttctgagtctgccaactgcatatactataaagagcaccactgggaggtgcccagggccctctgcctcactccaactgtcacagccccactggggagtgtgaccagacccatttccatggttaatatttaattcctcagccctgaacacatgcagctaaatgaagtcactcctttcccataaatactagatgaagcagatgcaggtgaggccgggtgatggccctcgcccttgtgagttccactgccttcctcgggcctcggcctttgtctactgcctacttggccaagcaagcaagcacatgaatcccaccagccacagtgccagagaggagctgagtgggcaggagtggctgtgctcttgattcataaggtggttttgctttgctgccccgcagctcagaccttggacaggaagaacatttccctcctccacctgtgttctcagctgcagggggattccctcctcctccagagagtgttgtgcagagcacatgagatggtggggatccctggagcattttagaaatggaaaagcaccacatacaggagagggaccgctgctctcctttcccagcccccagcccggccattcgatctggaaacctatgctccacagcacagttggcccctgggtggtgcgtggagggaaggctttctgatgaggcagccgtgtgtgtcccatgtaggcaactgaaccaggaggccccacagtgcgcactgggcacgagagaccaggactggctgtctcgttcctctctgctgggcagtgcctagccaaggactcagcccggtctcttgtgtgcagccccagtgtgcctgggagtcctcccctggctaggccctgggctttccaatagcggaatgaggggcatgtggagttttgccagggctgagaaaggaggccctgtgatccgagaaaagcagcggtcaagataggagccatagaaatgccttgtaaacgataggtgtgctctcgacagaggcccctgcaaggggtaggaggtttctgggaggaggctgctggctgtgtcttagggccccagaattcagactgatctcccgggcctggtgccctgtgaagctgggagctgtggattgtcttgttaacctctgtgtgagcctctgttggaagagctgttagcaggacaagcattttcttaaaattagaggtgtcctttgtttgtattcagtgctagagaagctgaatctttcccaacaaaaataatttgcttattacctggtcaagctgatcagtgcaggtaaagtccctccctttaaaacaggtgtaaacacaggagccccagcaagatatgtcagctgctggggacacttagggtatctggaaggtgacagtgggaagtgtcgtggggttctggcaggacttgtgttcttgcactgaagtgctgtgcgctccccacagtatgcagggccagggcttctgactcggatcagttgccctatgggctgccttcactcctcctcctgagaacaggcgaacgtttaaaagtagtaagttctctttgggaggctgaggcgggtggatcacgaggtcaggagatcgagaccatcctggctaacacggtgaaaccctgtctctactgaaaatacaaaatagtagccgggcgtggtggcgggcgcctgtagtcccagctactcgggaggctgaggcaggagaatggcgtgaacccgggaggtggagcttgcagtgagctgagattgcgccactgcactccagcctgggcgacagagccagactccatctcaaaaaaaaaaaaaaagtagtaagtttgtactttaaaaaacatccctcactggggcttctgccttcatcctctcctactaaagtttggagacctcactacctaatctttctcttggacaaaccgcatgcttcttcctgggctcgttgctgagcatccggggccaccctgactctgaaagacggtgtcccggcagagaacttgcttcacagctgtgtgatgccctttgctttcccagcccaccggagatcctccttcaactttgagtgcctgcgccggcagagcagccaggaagaggtcccgtcgtctcccatcttcccccatcgcacggccctgcctctgcatctaatgcagcaacaggtgagcggcccacctggccttgcccccacacctaggggcaccccacataggacccccatcaggtcactcccttctccttggccttaagcaccaggagggaaggagagaatcttcacctacagtctagttaatctttgtaacaatcctgtcaaatagctatggccatgagtcccatgctgcccaagctcacacaagtgactgctggcatttgaatccagggagccagctgccaaagctggcctcactgcccaggtgcctccctgcgatccccaccacctcttcctggcattgaatacagagcctgatgtgatctgagctcagggagtgggggccacttggctgattctgaacaagcggtgcagcccttcattttctctaagaagtggttccttcattaagtttatgggtccctccatgggcagggccctgtgggtactatgcagggttaacctcccctgcctacaaagggagcagtctggggagaacagtttgcccacgttgagggcggctgcacaggcaagagggtggggccggagcccactcactagggctttccctcaaggataacaatatggcgctttttctttctgaaaatatcacatcagagatgccattcattcgtgcacgacagggtggtgggcatggacctgtgctgtttacagacagcgttccccgtccctctctgcagagtgtgaaccccaaggtgcatctgccgtggtgggattgtaagaccggggcttgtacccagtgctttagcacatgccaaatgccggctctaggatgcattactccagagcaaagagaaccagctgttttcctataagtgctgggaagtggtagtttcccctgaatgtacttcggtatttaaacccagcatgaactgggtggtgtgttcacacccacagcttgttgggcttccctgattcttcattctgaagcaatttcatgaattagcaactgatacctccttgggaaaagccaaaggaaatgcattatggattcggggtaaaagaaagcacagtctgctagaaaacaaagtcatcaccgcccattcattcagcgtacttcagtgtgcccatgtcctttccaagtccttgcctggactgcccctggcgagcgcagcgccggtgcttggtctgtgcgcagaaggtttgaggcccggacctctgagaacctctggtctcccaacagtcccctctttcctcagatcatggcagttgccggcctagattcaagtaaagcccagaagtactcaccgagtcactcgacccggtcgtgggccacccctccagcaacccctccctaccgggactggacaccgtgctacacccccctgatccaagtggagcagtcagaggccctggaccaggtgaacggcagcctgccgtccctgcaccgcagctcctggtacacagacgagcccgacatctcctaccggactttcacaccagccagcctgactgtccccagcagcttccggaacaaaaacagcgacaagcagaggagtgcggacagcttggtggaggcagtgagtacggttcttggccgtggtgggcaggaagcaccaggagcagcagaggtgcaactgtaacagcaggaagggcagtggtgggagggcggccaggctgtgagctaggctgcctcaatcagacacttctgagcagcaggaatgtacctgaagcatgagtaaaaactggtcaccaccactggctgcagtggcttacgtctgtaatctcagcactttgggaggccgaggcgggtggatcacctgaggtcagcggctcaaagaccagccttgccaacatggtgaaaccccgtctctactaaaaatacaaaaattagccgggcgtggtggtgtatgcctgtaatcccagctactcaggaggctgcagcaggagaactgcttgaacccgggaggtggaggctgcagtgagccgagatcacaccactgcactccagcctgggccacagagcgagactcttgtctcaaaaaaaaaaaaaaaaaaaacaaaaaacaaaaactggtcaccaccgtcaattctcataaatgagctgtgctggcattatgggtgctgttccggcatatgtttctagtttatactaaatgtctttccccagtgggtttcactcttgttgggccatgtgtagttttttagctccaggacattttcaaagccatttacactagttattatgtatgaggtctagaaaacatgattgagctgcatccccaaagcacacggtgcagttaagttagcactggagttgatttttctgtcgtccccctgccctgcaaagccttataacacccccatgccatccatccctcttttctgtacaggtcctgatatccgaaggcttgggacgctatgcaagggacccaaaatttgtgtcagcaacaaaacacgaaatcgctgatgcctgtgacctcaccatcgacgagatggagagtgcagccagcaccctgcttaatgggaacgtgcgtccccgagccaacggggatgtgggccccctctcacaccggcaggactatgagctacaggactttggtcctggctacagcgacgaagagccagaccctgggagggatgaggaggacctggcggatgaaatgatatgcatcaccaccttgtagcccccagcgaggggcagactggctctggcctcaggtggggcgcaggagagccaggggaaaagtgcctcatagttaggaaagtttaggcactagttgggagtaatattcaattaattagacttttgtataagagatgtcatgcctcaagaaagccataaacctggtaggaacaggtcccaagcggttgagcctggcagagtaccatgcgctcggccccagctgcaggaaacagcaggccccgccctctcacagaggatgggtgaggaggccagacctgccctgccccattgtccagatgggcactgctgtggagtctgcttctcccatgtaccagggcaccaggcccacccaactgaaggcatggcggcggggtgcaggggaaagttaaaggtgatgacgatcatcacacctgtgtcgttacctcagccatcggtctagcatatcagtcactgggcccaacatatccatttttaaaccctttcccccaaatacactgcgtcctggttcctgtttagctgttctgaaatacggtgtgtaagtaagtcagaacccagctaccagtgattattgcgagggcaatgggacctcataaataaggttttctgtgatgtgacgccagtttacataagagaatatcactccgatggtcggtttctgactgtcacgctaagggcaactgtaaactggaataataatgcactcgcaaccaggtaaacttagatacactagtttgtttaaaattatagatttactgtacatgacttgtaatatactataatttgtatttgtaaagagatggtctatattttgtaattactgtattgtatttgaactgcagcaatatccatgggtcctaataattgtagttccccactaaaatctagaaattattagtatttttactcgggctatccagaagtagaagaaatagagccaattctcatttattcagcgaaaatcctctggggttaaaattttaagtttgaaagaacttgacactacagaaatttttctaaaatattttgagtcactataaacctatcatctttccacaagatataccagatgactatttgcagtcttttctttgggcaagagttccatgattttgatactgtacctttggatccaccatgggttgcaactgtctttggttttgtttgtttgacttgaaccaccctctggtaagtaagtaagtgaattacagagcaggtccagctggctgctctgccccttgggtatccatagttacggttttctctgtggcccacccagggtgttttttgcatcgctggtgcagaaatgcataggtggatgagatatagctgctcttgtcctctggggactggtggtgctgcttaagaaataaggggtgctggggacagaggagcaacgtggtgatctataggattggagtgtcggggtctgtacaaatcgtattgttgccttttacaaaactgctgtactgtatgttctctttgagggcttttatatgcaattgaatgagggctgaagttttcattagaatgcactcacactctgactgtacgtcctgatgaaaacccacttttggataattagaaccgtcaaggcttcattttctgtcaacagaattaggccgactgtcaggttaccttggcagggattccctgcaatcaaaaagatagatgataggtagcaattttggtccaaaatttttaatagtatacagacaacctgttaattttttttttttttttttttttgtaaataacaaacaccactttgttatgaagaccttacaaacctcttcttaagacattcttactctgatccaggcaaaaacacttcaaggtttgtaaatgactctttcctgacataaatccttttttattaaaatgcaaaatgttcttcagaataaaactgtgtaataatttttatacttgggagtgctccttgcacagagctgtcatttgccagtgagagcctccgacagggcaggtactgtgccagggcagctctgaaattatggatattcttatcctcctggttccttcggtgccaatggtaacctaataccagccgcagggagcgccatttctcctaaagggctacaccactgtcaacattatcctggactctgtgtctctctctgttgggtcttgtggcatcacatcaggccaaaattgccagaccaggaccctaagtgtctgatagaggcgatgatcttttccaaagtcagtacttacaaactggcattcttacaggctgcaccatttcctagtatgtctgctttaagcctggttcaacctctcatcgaatattaaatttttctttgtaagaaaaatttgaagttgtagagcatggttttttgttttcccttgtcttaggaaagttttaagatgaaatgtttttcctttttggtcccctccccatctgaaaaacacacatttttgtgtccacaggaataacacatttagtttctttagtcttatgtttttcataatctcacaaaatgtaaatggcagctatgatttcaccgtcaactggcagcgagaacctcactaagaaccatctctgctcagcctatggactccgacatccacccagacagctggatctcgcttcaccatgtggcactttccagctctatcctacgaagtttcagaattgggcgaaggccaggcgtggtgggctgtgagggccacgttacctctcggtgcagtctcacctgtgtgagatgggaccaggggcaccacttgctttcctgctgaccctgctatgagaaaaactggagcagtttcaccttgtgtacttctcagcatcgtaagtgtctttgccaattgcatttcctagaaaagttgtactgttttgataggcagctggctggtttagaaaaaccagttagccatagaactgacatcacgcagagagccccgactccctgattagcccaccccaactcaaaatctgactccagggatgttttgttgaaaatgttatttctctaaaacagtatttcttttcctctcctggggactaggagggcaggagacaatgaggagcaggcctgggccctggttccaacatcaagagtgacagggtggtctcagggatgtcctgtgagggcagcctgagccactaaacaggtccagtagagatggtattttatctttaaaaaatctgtattggatctgatgttaagttggcttatcagtagaagcatgaaaccacttctgagtggcgggacatggttggctggagaagaatctgtttttttgttgtttttttttgagacagtctcactctgtcacccagggtggagtgcagtggtgcaatcttggctcactgcagcctgcgccacccaggttcaagcgattctcctgtatcggcctcccaagtagctgggactacaggcgtgcaccaccatgcccagctaatttttgtatttttagtagagacggggtttcaccatgttggccaggctggtctcaaactcctggcctcaagtgatccacccacctcagccttgcaaagtgctgggattacaggcgtgagccaccatgcctagccaagaagaatctatttgaattcgtggagatgatgcctgcaaccttcgctacaagcagaaagactagatgtttgggtgcctacaactcctgcttcaggaactcaccatctccagtcaggctgccagatgctcttggctcccacacagcccacccctatcccctattccatcaggagctgccttctactagtgcagcggcttcaacacaggcttctgcaataggtcagggctcctgagagcactgggcacatggacagcgcattctgttgtgctctttgagccatttttgcaaagcacgtttctctgtttttaggtactgcaagcttttggccaaggggcccaattccctatgagactgaagatgggggggtaccctctgtgcaccccactttgtagcaagtgcctttctcccccatgctggcttcctcaggtgacagcctctcctcctggggtgaatgaaagactcccttcatggcaggggaacgctcaggttctggacatgtgacacttaccatcttttcttttgaacctcattcctgtttatggccaaattgtgcgattgtgtagaacatggctaagtatttgagagtgaaagaagggcctgggtgcaattgagcagcatcaccaatgggctcctcttaccatatgacgttttgcttattttaaaatacagccaccagactgaacccaccatggtctcagacactgacacacccatgggacacagagatggtagaactaagtgactgtcaccctgccatatccatacctgttccagagaagaagggtcagcacagtcatggttggtccaggactatcccctgcccctgaatccacacacgctccagcaggaaagctgcacgaggccctccaagttacggggctggcacctgaactcctgtttctgcactcttgcaggcagccccgagacccaggtgactgatggccatggactgctgctgtggggcaggtggggaccctccgtaggagaaataagtctcttggccggtttagaattttttttcttgaccctctcttcgaacaaaaattttaaaaaatacaggtaagattaaacaagagctgcttaagatttttaaaaggagaggtgtgatgggtttcttcctgctgcctctctcgaaggtttttctcagaaaactaacttgtggctgtcggacgcccccccccccggccccagtctgtaagccgccccaatcctctcagatccgagcaaagcctggaatcccccaatttcctcccgtccttattctgggcctagtatagctgcaggtttccacgcaacaatgcttttcttcccagcccttgacggtggatgtggatgtctggaaaaatccaagtgcattttattttcattaccttgtcagaacagtctggagaaggcatctcagttcaaatgtgagtgactggatcactttattgaatggtaagaaatttaaagagcaaagagctgttgtaaatgctacttgtattttttttcctccaaaactccagtcttgaatttatttttctttcacacaggggcatttctacagccacagggtgcatggctgtgcttaactgtgttttccatcctagtctgttcctgtggacgtctacagaataagaattaaccatccttgtccactgctgggatggctcaggctgccaagtcatttcccaagaccagtatgagagagtcctttctcgggctagctgcttcagtaggaatcagtgatctggtacgtggggtttgctcttggtttctgcatttcttggtaaaaggaaaaccttttaaaatgctaagtcataaaacctttggtagtgaagccaagcggcattccctccagactcctctccccttgaataaggtccataaaaatctcaggtttttttttttttttttttttttgagacagggtctcaccctgtcacccaggctggagtgcagtggtgccatcagggttcacaggagcctcaacctcctgggctaaagccatcctcccgcctcagcctcccaagtagctgggactacaggtgtgtaccaccatgcccagctaattgttttccagagacaaggtctcactatgttgcccaggctggtcttgaactcctgagctcaagtgaccttcccaaagtgctgggattacaggtgtgagccctgcacctggccctggtttaataagaaccagagccacaaccctctcagagtgacccagtggagccccagttacctgcctcactctgagagtgaaattaggcagcgagaaaggaaaagccagtttttcaaccagcaggcaactttcccctctcaacagggacactggggacttatgtgccagcccaggctgaactaactactgtgtgacttactgcctcagctaaagcttgcagctcaagaaggaggatgccccttccttcgcgaaccctccgtgggtctggcaggcacccagcctctgtgcatggcctgggaaggaaccactgccctgggttagagaatgccacgtgaacacaagaaaaaggatgcggcaggagttaaccatcctccccttctgtccctccaggaggcagggaggaacatctcaggctgaatgctggccttccccaaatggcccacagggaaaggctggggaaaaggagctggattcactgcccagtacttgtctcatttcccaagactttatccaattctcagccactgagtagggtaccacctgggtcctagtgtgctagatagtttcaggcaggagcctgggagcaagggctgtgctggccctcttggcttatcagggggcttccctggtcatcctccagcagcaactgtcttagcgctgggtggccagcgtcctgggcttgtagacagggacatctttgtcccagagtgcaggctgccccttgataatgtcagctgccttctctgcgatcatgattgtgggggcgttcaggttgccgctgaccatgctaggcatgatggaggcatcgacgaccctgaggttttccaccccgaggacccttgtctgcggatccaccacggcagtgggatcggagggctggcccatcttacaggtgcacgaggggtggtaggcgctgtcggcttttgcccgcacaaaggcatctatctctttatctgactgaatgtggcttcctggctggagctctttccctcggaacggagccagggcttcctgtgcaaaaatttctctggtgagcttcacacacagacggaaatcctcaatatcagtttctgtcgaggagaagaaacaggtgaggacccctccttttgcccgtgctggcctcactggaagattcacggcatggagaggctctgtaagctgtctgaggggatggtgtttggggacaaagttcagggccatgggggactgagccagcaggctgcttgtccctgcccacagcgggttagactgtaccgtgtagctcaaaggtagcatcctacacggacacagcccacccagaggcccaggtttaaatcagggatctgacttatctgtagggcagggataagtacacacaccctgcccctgctacagtggggctgtgagcaccctgcagccactgctgggcaaaacctgcccagtgggtagtgctcgtttttgctgcatgcaaagaggcaggcccaggaatggaatttgcttttagagactgctcagagtgacaacaggaaaaatgctctacctacagacctggcacctgcatggcgtggtctccctgcacatcatggcagattgttctgaaagctgaaaatctcccctactgtctaaaccctgggacttcatttatctcatgtgtcccaggacactacggggctgcctatgcaagtttacagcctaaagtgacacggtgggggacgacagagggtcacttgtgtcctagaaagtgtagtccaagggtatgattcagggataaacaggaaccccacaaaggcattcgtttgttcaagcccaggaagacacaggtgggtgaagtacctgttgacaagtagttgggctggatcacagggtggtcttggggattggcacttctcagtttgagccagcccacactcgtgccccgcatgggccccacatgtacctagaagaacacagaggaagcagtgacggtccctccatagacatccacagtgacctctgtcaaccctggtttacctgtagggtgggcctctgcttccagaatcagtggggaacagatgcatgttagcatttgcccgcatggtacccacctccacgagtgattacagaccacctcaaggaatcactctttcatcctggcctcatactccatggctcaaagctttcagaggtggtgatcccagagccaagtcagcccctctgtttgtcccatttctggtgctcggtacctagcctgcatgaaacagtcataccattggcatgcaccacgcagactgacacgctgggcagctggaaggcaggggacaggcctctgtgtcccccactctgcagccatatggcaccagggagaatgctgccttggaagatgggagcatcttccttcctggtgggaaggagacatcctgggaagccgaggctcttccacctgctcacctggtaagcctcctgctgggtggggacccgcccgtggtcaatcacttgggatggcaggaaatggaactggatgtccgggtgggggaccccaggctggctgcggatgaacccacctgtttccagatgggcagtggctccctcccctgagaagcagaagaggatgaggcagaagagccagtcaggccgtggcaggtgggccggctgctcctggtttccctcctttctcctggccgctcctcttccttttcccggactccactctagtgcctggacccaagtcctgtccacatctgttcacccctcacagggggctcacccagcaccacaccataaaatgtcagctatttgccaaaaggatggcatcagctctgctctctaccagggccaattctgccactgcccatgccacctgccttaccggctcttcccactacctagcacagcacacagcacatactaggtgtgtgagaaatacagactgagtggatgggtaggattttaaactaccagttcctggcccaggcacagctagaaatcaaatggaaaaggttgaaagatgaatgctgattctgcagtctagccccaaagtctcctctctccaccttttctcctggctccttggacctcacctgctgtccagcacaaggccatccctgctcatccgtaaggaggagcagcccctaagccccgaggagtctcacctccagcaggccctgggccaagctccttggcatgtgctattgtttctggtcctcgcttcaacctgtcaggttgaaactgtgcatccccattttgaagatggaaaaactgaggctcagggctaaggtaaatggcatagttccgcatcaaacccagtggccagaacccctgttcagctcctcaggaaggaggtctcaatgcttataggcagtctcctcccaggttactggtaagcgtgctcacctgtgaatttccagagccactccagaccaatgcagaccttccgcaggggcttctgtgctgaatggagggtgatagggcgggtgcatgcctgctgaatgtagatctccaggtggtcttgcaggttctggccaacccctgatacgggaaggagtggtttagaaaatggctaccaagggggctcagctgcttctcaatatccccccggttttgaaaaattctttcctattcccttatcttctggaccagctcctgctcagttccctggtctcagcttaaaggctgcctcccagagacactatgtgtgcactcctggccaagtctggcctgcctcggatgctgccaaggccacctgtccttgtcactcactcctacggcagcctctgggtgccccttgtcagccctgctcagcagccccctctgtgagggcagggcctacgccttcagcaggcactgcttggtgagcggttgctggatggtgatggccagaggggcagacagcagccccaccctcacgccagcgtggggaaggaggaagcagccctgtcgtgctacaccgtccttgcatgaattcatccaagcctattgggacactgggcaggtcaacatcatgaagcagcacttccccgggcccctcatgatgaagcctaaaggcacaaaggcctagccctcccggagtggggttatcaaggagggcaagagacagagcccgaccctcaagagcatcagagacagtttataaaacaaagtttacatcttaacatgaagagcaggctctggagcacggagctgacctcattcatgctcagggcagccagcgagtcctgtggatggaaggacgaggcctggacccctctcgccatagagctgccctggtgacacgcccatgcccgacccagtggggcttcagggcagatactccctgctgcagggtgcccttctccaaatgaaatagggcagccggaggagggagaaggaaaacaatgcaagactcggggcccagggatgacagtgtccagtgaggcctgggaaaccttcgggctctcggggacaatgtgatagttccaaggatcactgactgccaccacctccccacttcatgctaataagatacatacactaagccttttgttgagcagagacagcctctggggagcagtaaagaaggggactcaccaggtaggtggcacaccacagggatgcccagtttcttgaggtcatcagcattcccgatgccagagagcatgagcagctgtggagagttgatggcacctccactcagaatcacctccttgctggcataagcctggaagaggtccagccaggtcactccctgaaaagccagctgttctcctgactcacagaccagcgccctactctagccagcaccatgagaacacagccttgggatgtagaatcctgtggcacacccgggacaggccccagagctaaggagaggaaactc

SEQ ID NO: 53 - DNA, 7192 bp, Homo sapiens
agaataagggcagggaccgcggctcctacctcttggtgatccccttccccattccgcccccgccccaacgcccagcacagtgccctgcacacagtagtcgctcaataaatgttcgtggatgatgatgatgatgatgatgaaaaaaatgcagcatcaacggcagcagcaagcggaccacgcgaacgaggcaaactatgcaagaggcaccagacttcctctttctggtgaaggaccaacttctcagccgaatagctccaagcaaactgtcctgtcttggcaagctgcaatcgatgctgctagacaggccaaggctgcccaaactatgagcacctctgcacccccacctgtaggatctctctcccaaagaaaacgtcagcaatacgccaagagcaaaaaacagggtaactcgtccaacagccgacctgcccgcgcccttttctgtttatcactcaataaccccatccgaagagcctgcattagtatagtggaatggaaaccatttgacatatttatattattggctatttttgccaattgtgtggccttagctatttacatcccattccctgaagatgattctaattcaacaaatcataacttggaaaaagtagaatatgccttcctgattatttttacagtcgagacatttttgaagattatagcgtatggattattgctacatcctaatgcttatgttaggaatggatggaatttactggattttgttatagtaatagtaggattgtttagtgtaattttggaacaattaaccaaagaaacagaaggcgggaaccactcaagcggcaaatctggaggctttgatgtcaaagccctccgtgcctttcgagtgttgcgaccacttcgactagtgtcaggagtgcccagtttacaagttgtcctgaactccattataaaagccatggttcccctccttcacatagcccttttggtattatttgtaatcataatctatgctattataggattggaactttttattggaaaaatgcacaaaacatgtttttttgctgactcagatatcgtagctgaagaggacccagctccatgtgcgttctcagggaatggacgccagtgtactgccaatggcacggaatgtaggagtggctgggttggcccgaacggaggcatcaccaactttgataactttgcctttgccatgcttactgtgtttcagtgcatcaccatggagggctggacagacgtgctctactgggtaaatgatgcgataggatgggaatggccatgggtgtattttgttagtctgatcatccttggctcatttttcgtccttaacctggttcttggtgtccttagtggagaattctcaaaggaaagagagaaggcaaaagcacggggagatttccagaagctccgggagaagcagcagctggaggaggatctaaagggctacttggattggatcacccaagctgaggacatcgatccggagaatgaggaagaaggaggagaggaaggcaaacgaaatactagcatgcccaccagcgagactgagtctgtgaacacagagaacgtcagcggtgaaggcgagaaccgaggctgctgtggaagtctctggtgctggtggagacggagaggcgcggccaaggcggggccctctgggtgtcggcggtggggtcaagccatctcaaaatccaaactcagccgacgctggcgtcgctggaaccgattcaatcgcagaagatgtagggccgccgtgaagtctgtcacgttttactggctggttatcgtcctggtgtttctgaacaccttaaccatttcctctgagcactacaatcagccagattggttgacacagattcaagatattgccaacaaagtcctcttggctctgttcacctgcgagatgctggtaaaaatgtacagcttgggcctccaagcatatttcgtctctcttttcaaccggtttgattgcttcgtggtgtgtggtggaatcactgagacgatcttggtggaactggaaatcatgtctcccctggggatctctgtgtttcggtgtgtgcgcctcttaagaatcttcaaagtgaccaggcactggacttccctgagcaacttagtggcatccttattaaactccatgaagtccatcgcttcgctgttgcttctgctttttctcttcattatcatcttttccttgcttgggatgcagctgtttggcggcaagtttaattttgatgaaacgcaaaccaagcggagcacctttgacaatttccctcaagcacttctcacagtgttccagatcctgacaggcgaagactggaatgctgtgatgtacgatggcatcatggcttacgggggcccatcctcttcaggaatgatcgtctgcatctacttcatcatcctcttcatttgtggtaactatattctactgaatgtcttcttggccatcgctgtagacaatttggctgatgctgaaagtctgaacactgctcagaaagaagaagcggaagaaaaggagaggaaaaagattgccagaaaagagagcctagaaaataaaaagaacaacaaaccagaagtcaaccagatagccaacagtgacaacaaggttacaattgatgactatagagaagaggatgaagacaaggacccctatccgccttgcgatgtgccagtaggggaagaggaagaggaagaggaggaggatgaacctgaggttcctgccggaccccgtcctcgaaggatctcggagttgaacatgaaggaaaaaattgcccccatccctgaagggagcgctttcttcattcttagcaagaccaacccgatccgcgtaggctgccacaagctcatcaaccaccacatcttcaccaacctcatccttgtcttcatcatgctgagcagcgctgccctggccgcagaggaccccatccgcagccactccttccggaacacgatactgggttactttgactatgccttcacagccatctttactgttgagatcctgttgaagatgacaacttttggagctttcctccacaaaggggccttctgcaggaactacttcaatttgctggatatgctggtggttggggtgtctctggtgtcatttgggattcaatccagtgccatctccgttgtgaagattctgagggtcttaagggtcctgcgtcccctcagggccatcaacagagcaaaaggacttaagcacgtggtccagtgcgtcttcgtggccatccggaccatcggcaacatcatgatcgtcaccaccctcctgcagttcatgtttgcctgtatcggggtccagttgttcaaggggaagttctatcgctgtacggatgaagccaaaagtaaccctgaagaatgcaggggacttttcatcctctacaaggatggggatgttgacagtcctgtggtccgtgaacggatctggcaaaacagtgatttcaacttcgacaacgtcctctctgctatgatggcgctcttcacagtctccacgtttgagggctggcctgcgttgctgtataaagccatcgactcgaatggagagaacatcggcccaatctacaaccaccgcgtggagatctccatcttcttcatcatctacatcatcattgtagctttcttcatgatgaacatctttgtgggctttgtcatcgttacatttcaggaacaaggagaaaaagagtataagaactgtgagctggacaaaaatcagcgtcagtgtgttgaatacgccttgaaagcacgtcccttgcggagatacatccccaaaaacccctaccagtacaagttctggtacgtggtgaactcttcgcctttcgaatacatgatgtttgtcctcatcatgctcaacacactctgcttggccatgcagcactacgagcagtccaagatgttcaatgatgccatggacattctgaacatggtcttcaccggggtgttcaccgtcgagatggttttgaaagtcatcgcatttaagcctaaggggtattttagtgacgcctggaacacgtttgactccctcatcgtaatcggcagcattatagacgtggccctcagcgaagcagacccaactgaaagtgaaaatgtccctgtcccaactgctacacctgggaactctgaagagagcaatagaatctccatcacctttttccgtcttttccgagtgatgcgattggtgaagcttctcagcaggggggaaggcatccggacattgctgtggacttttattaagtcctttcaggcgctcccgtatgtggccctcctcatagccatgctgttcttcatctatgcggtcattggcatgcagatgtttgggaaagttgccatgagagataacaaccagatcaataggaacaataacttccagacgtttccccaggcggtgctgctgctcttcaggtgtgcaacaggtgaggcctggcaggagatcatgctggcctgtctcccagggaagctctgtgaccctgagtcagattacaaccccggggaggagtatacatgtgggagcaactttgccattgtctatttcatcagtttttacatgctctgtgcatttctgatcatcaatctgtttgtggctgtcatcatggataatttcgactatctgacccgggactggtctattttggggcctcaccatttagatgaattcaaaagaatatggtcagaatatgaccctgaggcaaagggaaggataaaacaccttgatgtggtcactctgcttcgacgcatccagcctcccctggggtttgggaagttatgtccacacagggtagcgtgcaagagattagttgccatgaacatgcctctcaacagtgacgggacagtcatgtttaatgcaaccctgtttgctttggttcgaacggctcttaagatcaagaccgaagggaacctggagcaagctaatgaagaacttcgggctgtgataaagaaaatttggaagaaaaccagcatgaaattacttgaccaagttgtccctccagctggtgatgatgaggtaaccgtggggaagttctatgccactttcctgatacaggactactttaggaaattcaagaaacggaaagaacaaggactggtgggaaagtaccctgcgaagaacaccacaattgccctacaggcgggattaaggacactgcatgacattgggccagaaatccggcgtgctatatcgtgtgatttgcaagatgacgagcctgaggaaacaaaacgagaagaagaagatgatgtgttcaaaagaaatggtgccctgcttggaaaccatgtcaatcatgttaatagtgataggagagattcccttcagcagaccaataccacccaccgtcccctgcatgtccaaaggccttcaattccacctgcaagtgatactgagaaaccgctgtttcctccagcaggaaattcggtgtgtcataaccatcataaccataattccataggaaagcaagttcccacctcaacaaatgccaatctcaataatgccaatatgtccaaagctgcccatggaaagcggcccagcattgggaaccttgagcatgtgtctgaaaatgggcatcattcttcccacaagcatgaccgggagcctcagagaaggtccagtgtgaaaagaacccgctattatgaaacttacattaggtccgactcaggagatgaacagctcccaactatttgccgggaagacccagagatacatggctatttcagggacccccactgcttgggggagcaggagtatttcagtagtgaggaatgctacgaggatgacagctcgcccacctggagcaggcaaaactatggctactacagcagatacccaggcagaaacatcgactctgagaggccccgaggctaccatcatccccaaggattcttggaggacgatgactcgcccgtttgctatgattcacggagatctccaaggagacgcctactacctcccaccccagcatcccaccggagatcctccttcaactttgagtgcctgcgccggcagagcagccaggaagaggtcccgtcgtctcccatcttcccccatcgcacggccctgcctctgcatctaatgcagcaacagatcatggcagttgccggcctagattcaagtaaagcccagaagtactcaccgagtcactcgacccggtcgtgggccacccctccagcaacccctccctaccgggactggacaccgtgctacacccccctgatccaagtggagcagtcagaggccctggaccaggtgaacggcagcctgccgtccctgcaccgcagctcctggtacacagacgagcccgacatctcctaccggactttcacaccagccagcctgactgtccccagcagcttccggaacaaaaacagcgacaagcagaggagtgcggacagcttggtggaggcagtcctgatatccgaaggcttgggacgctatgcaagggacccaaaatttgtgtcagcaacaaaacacgaaatcgctgatgcctgtgacctcaccatcgacgagatggagagtgcagccagcaccctgcttaatgggaacgtgcgtccccgagccaacggggatgtgggccccctctcacaccggcaggactatgagctacaggactttggtcctggctacagcgacgaagagccagaccctgggagggatgaggaggacctggcggatgaaatgatatgcatcaccaccttgtagcccccagcgaggggcagactggctctggcctcaggtggggcgcaggagagccaggggaaaagtgcctcatagttaggaaagtttaggcactagttgggagtaatattcaattaattagacttttgtataagagatgtcatgcctcaagaaagccataaacctggtaggaacaggtcccaagcggttgagcctggcagagtaccatgcgctcggccccagctgcaggaaacagcaggccccgccctctcacagaggatgggtgaggaggccagacctgccctgccccattgtccagatgggcactgctgtggagtctgcttctcccatgtaccagggcaccaggcccacccaactgaaggcatggcggcggggtgcaggggaaagttaaaggtgatgacgatcatcacacctgtgtcgttacctcagccatcggtctagcatatcagtcactgggcccaacatatccatttttaaaccctttcccccaaatacactgcgtcctggttcctgtttagctgttctgaaata

SEQ ID NO: 54 - protein, 2181 aa, Homo sapiens
MMMMMMMKKMQHQRQQQADHANEANYARGTRLPLSGEGPTSQPNSSKQTVLSWQAAIDAARQAKAAQTMSTSAPPPVGSLSQRKRQQYAKSKKQGNSSNSRPARALFCLSLNNPIRRACISIVEWKPFDIFILLAIFANCVALAIYIPFPEDDSNSTNHNLEKVEYAFLIIFTVETFLKIIAYGLLLHPNAYVRNGWNLLDFVIVIVGLFSVILEQLTKETEGGNHSSGKSGGFDVKALRAFRVLRPLRLVSGVPSLQVVLNSIIKAMVPLLHIALLVLFVIIIYAIIGLELFIGKMHKTCFFADSDIVAEEDPAPCAFSGNGRQCTANGTECRSGWVGPNGGITNFDNFAFAMLTVFQCITMEGWTDVLYWVNDAIGWEWPWVYFVSLIILGSFFVLNLVLGVLSGEFSKEREKAKARGDFQKLREKQQLEEDLKGYLDWITQAEDIDPENEEEGGEEGKRNTSMPTSETESVNTENVSGEGENRGCCGSLWCWWRRRGAAKAGPSGCRRWGQAISKSKLSRRWRRWNRFNRRRCRAAVKSVTFYWLVIVLVFLNTLTISSEHYNQPDWLTQIQDIANKVLLALFTCEMLVKMYSLGLQAYFVSLFNRFDCFVVCGGITETILVELEIMSPLGISVFRCVRLLRIFKVTRHWTSLSNLVASLLNSMKSIASLLLLLFLFIIIFSLLGMQLFGGKFNFDETQTKRSTFDNFPQALLTVFQILTGEDWNAVMYDGIMAYGGPSSSGMIVCIYFIILFICGNYILLNVFLAIAVDNLADAESLNTAQKEEAEEKERKKIARKESLENKKNNKPEVNQIANSDNKVTIDDYREEDEDKDPYPPCDVPVGEEEEEEEEDEPEVPAGPRPRRISELNMKEKIAPIPEGSAFFILSKTNPIRVGCHKLINHHIFTNLILVFIMLSSAALAAEDPIRSHSFRNTILGYFDYAFTAIFTVEILLKMTTFGAFLHKGAFCRNYFNLLDMLVVGVSLVSFGIQSSAISVVKILRVLRVLRPLRAINRAKGLKHVVQCVFVAIRTIGNIMIVTTLLQFMFACIGVQLFKGKFYRCTDEAKSNPEECRGLFILYKDGDVDSPVVRERIWQNSDFNFDNVLSAMMALFTVSTFEGWPALLYKAIDSNGENIGPIYNHRVEISIFFIIYIIIVAFFMMNIFVGFVIVTFQEQGEKEYKNCELDKNQRQCVEYALKARPLRRYIPKNPYQYKFWYVVNSSPFEYMMFVLIMLNTLCLAMQHYEQSKMFNDAMDILNMVFTGVFTVEMVLKVIAFKPKGYFSDAWNTFDSLIVIGSIIDVALSEADPTESENVPVPTATPGNSEESNRISITFFRLFRVMRLVKLLSRGEGIRTLLWTFIKSFQALPYVALLIAMLFFIYAVIGMQMFGKVAMRDNNQINRNNNFQTFPQAVLLLFRCATGEAWQEIMLACLPGKLCDPESDYNPGEEYTCGSNFAIVYFISFYMLCAFLIINLFVAVIMDNFDYLTRDWSILGPHHLDEFKRIWSEYDPEAKGRIKHLDVVTLLRRIQPPLGFGKLCPHRVACKRLVAMNMPLNSDGTVMFNATLFALVRTALKIKTEGNLEQANEELRAVIKKIWKKTSMKLLDQVVPPAGDDEVTVGKFYATFLIQDYFRKFKKRKEQGLVGKYPAKNTTIALQAGLRTLHDIGPEIRRAISCDLQDDEPEETKREEEDDVFKRNGALLGNHVNHVNSDRRDSLQQTNTTHRPLHVQRPSIPPASDTEKPLFPPAGNSVCHNHHNHNSIGKQVPTSTNANLNNANMSKAAHGKRPSIGNLEHVSENGHHSSHKHDREPQRRSSVKRTRYYETYIRSDSGDEQLPTICREDPEIHGYFRDPHCLGEQEYFSSEECYEDDSSPTWSRQNYGYYSRYPGRNIDSERPRGYHHPQGFLEDDDSPVCYDSRRSPRRRLLPPTPASHRRSSFNFECLRRQSSQEEVPSSPIFPHRTALPLHLMQQQIMAVAGLDSSKAQKYSPSHSTRSWATPPATPPYRDWTPCYTPLIQVEQSEALDQVNGSLPSLHRSSWYTDEPDISYRTFTPASLTVPSSFRNKNSDKQRSADSLVEAVLISEGLGRYARDPKFVSATKHEIADACDLTIDEMESAASTLLNGNVRPRANGDVGPLSHRQDYELQDFGPGYSDEEPDPGRDEEDLADEMICITTL

SEQ ID NO: 55 - DNA, 247544 bp, Mus musculus
  misc_feature (1)...(247544): n = A,T,C or G
acacatacatgtatgttctctctctctcacgtatgctctctctctcataccaaatgaataagggtaataaaactattgttctagcaagtccttagtgtgcatgacataacacctggcttgaaatctgatcctagactgtgctgcgctcctttggaaagttaagtttttaacctactgtacttcacttctgttgtggctgtaactgaggtaactgactttggcgatggttgacttttgtgctgtgaagaacttctgaaactcacaaggcctctgctttgctttagagaccgtgtctcacgtagcccagaacagcctagaactttctatacagccggggatcaccttaaacttctgctcctcctgcgtgctgggattgcaggacgctccaccaggctggggttatagggtaccgaggataaagtgtgggcttcgttcccgccccacaagaactcttccagctacaccatgttctcagcctgtcgcacgctctgtcgtatggaataattatactacttccttaaaaaacaaaaacacttaatctttctttattttaaggttgacttagaaaacttggaaggatctatatttgctttgagttttaatcacctataatctcacaatatttactgttagagttctggaacattttgttttggtcttgtttagtttcatgcattctggaacagagtgggctcagtggttttgcattctcatacgactatttttctaatttttattgtttggggacttgaaagcaaacctagagccaagcctctgagtgctaagctgggtatggcgggctgtgcctgtagtcccggtgtttgggaaactggggcatgagatcagcttgaggctgggagttctagggcagtcttagacgtacagtgacgttgctgtctcctaaacaagaaggccaactatagtacaaaggccttagctcagtcctcagcactgagggtgggcctggacaatttgaagggtctacttgatttagtagaggatcccgagacataggtcagagaagctgtgaactgtatgtggctgtctttcaactctcctgcggtcttgctgatctcttcacaattgatctcttgccaattgcttcaccatcatccttgccttttgtgctggaagctctttgctctagattggctccttgtccaccatctggcttccggccaccctccaaggagccgtctctaggtactcataaacacataggttagtgacttatcacctggatgtcattaaaattcctaaagtgaaatgcttggatcaaaaaactcgtagtaaatcttgcgaaattgttttctgaagaggcacttggtactagttctctagggtggtgtaaaagaaatgggccccaggtagcactgaaaagccaagtttgttttatttagcctacagatttagttttattattagggtgtgagagttttgcccaaatgtatatatgtgtatgatgtgaatttttggttcaggcagaggtcaaaagagggtgttggatctccaggaactggagggacagagagttggcaagggatgagggtgctggggtcaatatctgtccttgggaagagcagccagtgtttataacccctgatcgaacaggcatggtcacatgacctgcgcactcttttggaaggtgaaatgagtggtgtcaatggtcatccactggtgaggacaatgttgtccattgaaatataaaatgacacaaactgcataattttagattttagtaagatataagaacagaaacaaagcagaacagaacaaaacaaaacaaaacaccctgtgtgtctaaattttatcatttaaatctacagtcagtgtaaaaaaaaatcaggtttgggaggcttcaactgtactcaagggctatggtctccttcccgtgtccccttagctttccctttcttatgggagataaacaactcagagtggggcaggggagcagcagggcatcgggatcctaccctgtcaacaacactggcagacagacttccaatggtgaggcagccgatttgggatattcacgtgcttgccttggtcacaggttgaggtgttttgactggtgtgtggccccagtgccagaaagggcccttaagcaaagagatgttaatgagccggatactttttcaactcttgaccctctcagagacaaaaaaaccgggccggaaagcgacagtttctgctacagtagggtgagcaggctgcaaagagatcctattatttcctaagcctctagagaccttgatgcttccagattccttcacatcactcacctacgagctcgtctgtctcatcgtgatttcgggttttaaaagctggatgctatcccgttgtgtaaatgtaccacaccttagccatccactcctctgttgacggacaggcaggtcttttccggtttctggctaatgaggtacagggcagcagcgatcgtttgggcgccctagcgtctctgcccgcgatcttgaggtggatctagctacagctccccgaggagcgtccacacagattcccacagtggctgtatggcttggctcgcccacccgcaaaggctgacgtttcctcttgctccagatcccttgtcagcatgagctgtcatgtgctttattgaccttggctgctctgactgaagatggaatctcggagcagctttcatttgcatttccctacctccccgccttaattcttacacaagcagttaatccgaggtcgtctgtagccctcttgacaacaattcccattgcttgctcccccgacccccatcttatgaaaagagtagctgaggtggccagtccatttttgcttctgttgttctttgtttccgtttctttctatccacctctggtctataaaacccatctcttctgttgagaccatgggaacatggactctaatttatggaaaaataaaggcaagtaagacgtctaactggtaatttcagcctttaacacaggtaagagttggttggccctgagagctggcggaccacttactccctgccattcaggtttccaagtgggacatttagccaagggacactcttgactattcctcttcccttttacattccagccaccggaagcgtgtagaaggaggagctggggggtcttttgggaggcctttgctggtgactggatgactgcagtttattttagggtcaaatatcattaagattcctgtcctcagggcagagcaagacttaatgtatttcaggagtgaattagcttctgcttccctcgcaaccggttctgtatttaggcaggaggaaaaggtatttattgttgatatctttaaacatcccaccaaagtatcaaaccattgatgtaggtcacagcaggtggaactctagaacagtgacaacaagttaaccagagagagttctgaaggagaccttcatttttttcattagcatttagcacatacttaacaggggtattcatgactttgagtctcaaacatctctacaaataatctcaaaggttagtataagatagcatctgcattttgtctctaaattttggaattaccaaagatatccagatttatcaaagctaggttggttactctttcctggagtgataaccatgtgtttccagttacttaaactagggatgtagaacggcaccttcttctgcttgctctgctttcagaacatttccaaaagtatttaacgagtcctgactaatttctaacgacacgatcctttgagttcccagaagtgactcctgttggttgtcctctctggtcccttctcctggtctactctagcctctcattgtactttcctatctgctacactttattgggtcattctctattcttggatccgtatttcacacttatgtcaattttttctttcagaaatagagagacagtggttattgttattcacagaatacagcgggaagaacagaagttcaaaaccatccttggttacacaggaaactcggttatagattgaggctagccagagctatgtgagacctgtctcaacccctctccccaagtctcctaagagaatagaaactcccaaccaaaaccctttttcttggggctggagatgtagggatggatatgtagctcagttggagtgcttcgtctatcattcataaagctctgtgagtttgatctccagctctgcacaaagccagatgtggtaaggcacacctgttgtcccagcaatcagaagacagagacaccagaagttcaaggcaatcttcagatacataacaaggccaaggctagcctaggatttaagaaacctagtctcaaattaaataaaaattaaaaagagagaatgacgttcaacttcttaggattcagagccccataaaccaataacttgctcccaagcatctgtttcaaccaggcagggtgacagtgtagcatcttagaatcttgtttgttagactttctctggacactggccttttctggccccttggaaccatgaacatctggtgacattctgaattttcaagctctttattaatttttctgcaccacttccatcaagccatctctgtagaaatctttattaatgttctccaacatttcttcttcttccattattattattatgatgatgatgatgatgatgtgctggggatggaacccaaggccctctacctcctaggcaaaggtagcaagagctacaccgagctgtgcctctggcttgcctttccttcagtaactacacatatcctgtaatggctgttaagcacatagaattctttttatcagccatgtctgcatattaggatcacctagaagaccttaattaccactttcctcctggaaggagcttggtcatttgatttgaagtggatgctgggatacccttccccacttgcttacctaaaaaagactgagttgaaaatcttcctcagcctcaagctgggatcatcatgaggttaccacagagcaaagcaactggaccaagtgaccttggacagaaactcagggtgtctgagccaaaacagacctttgagctgacttctgtggtttgtttgtttttcctcagagcaatgggtctcttagtgtgctatgttttctgttatttcattgcatggtatttggaacagctctgtaaaaacttatattttatttattgtgtttctgtggggtgtgtgtgtgtgtgtgcatgtgtgtcattgtgcacacgtggaactcagacgacaacttgtgtgagatagtgttcccctttgctgtgcagggactaggaattgaactccggttgtctggcttggtggcaactgccttcatccactaagccatctcggtggcccaagtttggtctatgttgtgattataaaaagataaagagatatgattatgttctatgggggtgtggcgagggatggggggagggggtgcctcagtgggcccatgccaagccatcccttccccctgagggaccagccacatgatggtatagtatagaatagagttattcagggcttggggaggggaattaaaagagtagtagaggcagagaaaggcagagagagtgagagagtagagaagtagaggccagccatgactacatgaagagggggaggggcgggagtgaggagagagggggagcaaggggcaaaaggcaagagtataagattaagggggggggggcaaacagccccttctatagtgggccaggcctacctggctgttgccaggtaactgtgggggtagagtccagacagaatacagcctatgtgtgtgtggtacacacagaaccacaactccacccacccacatttaaaaaatgtcttatgtatttttaaaacttaaactttacacataggaatgttttgcctttgtgtgtgtacaccacattcatgcccagttccagcagagatcaaaagagagtctagaactggggttaaagatggctgtgagccaacatgtaggtgcatggaatggaaccctggtcctctgatgaaacgtgtgcatttaaccactgagccatctctccagctccctagcatggtatcgtgaacacgttccctcacgttgttaacacacatgcatgatctgttctttacgaagtgccaacattttgtgatatggacgtgccacgtctgatgcgcccctcacgggcatgtggtcttcccctcacttctgagcaacgctgctgtagtgtgagtgctggagcagtgagctttcccgctgacatgctctttcatttcccttggctgtgttcccagcaggggagctgctgagtcactcctgactccagcttctgaaggacattcagcctgcctgccttagtctctaccagctacaccactctgtcagtgatgtgggctgctcagtttcttctgctccgccacttgttattgtttctgtttttactcataatgctggattacttcaagccagtaaacaaccgcaaatagaggcccttcttctacctttgcatgctagtgtttggccaaactgtagtacaaaggaggcactcactaaatgaaaacacacaggctctctctctacacacccacacacacccgcacacatggtacacatacacatgtccatattttttgtggtgctgaggattcaacccagggcctcacgctaagcaatcactcaccaagaactataccccagtccccaggatttgtaaatcccagcccttctcatttgtacactgccttcagaatgcagtgaggagctgagagggctcacagtgacctggcaaaaagcagggaatcagaatctcattgcagaccagagaaaagtgagagcaaggaaggccagagattaaggaagaatggaaaccccattcccataatgcccctctctttactgagacaatggtgcttagtaagtcttctaaatgtctcattagttaattaatgttcagaaaagaatgttaagaagtttcaaaatagcttagtttaaaaaatgaaaagtcagcatgctactccctagacactgaagggactaagctccttggtggcttggagcctccaaatcgtagtcccagcagggtcccctgtcacaggggatggggcagacacaaggcaagtcactagatttctaacttcgcaaactaattttcaggctttgaagtagaactggcagacaattaaacacctgggttagacaatgcaggacattttaaagagcaccagaaattaggtaaggcctttaggtaaggactgttgatttttatgtatgccttatctgagaaaccgcagagaaggaggccactggatggtcagctctgcattccaatggaaacacttaccttcctgcagtgggaagtctgaaaacacgcatggaatgccccaacatgccatgtctcaaacttcattcagttcaaaaccatcaacattttgctaatttatgttcctgagttttaattaataattaattaattttcaaaagacaggtttgttcaggttggtcctagagttcttaactcaagacattcttctgttgcctcagcctcctgagtagctgggattttatatctacctattatgtatctgtataattgtgtgtgtgtgtgtgtgtaagcttgttgctactcaaatactatctactttctatgctttgtttgaaacaggatttctaattgcactggaacttgtgaattagggtaagggcctcaggaatccttgccttccttcccatgagggaatgagtgccaccatgcctgccttttggagagtgggaggaatttggcccattgtgcttgtaaggcaaacagtctacctactgggatgtcctcccagctcaaaaactcatttataacgggcatgttcccagcacctgggaggcagatgaagggagagatcaggggtcaaggccatccttggttactggtttatggaattaagaggctaccctgggacacatgagaccctgtttcaattcttctctctgaaaccgtctctgcatgcatccagttaaacctagaactccctaggtaccccaccgatctcgaactccatcttttcctgcctcggactcgagggctgctgtctggctaattactttatctatactgatttaattttgctccctgagacagggcctctcatgtatgtctggctggtgaggaactctctgtcccatcaaagatggcctggagttgttgtttctcctgtctccacttccaaactaatgggattaaagctgtgggcactacatatgacttgacttctaaacaactgcttatttataccaagacactctgcacaaactattgctatacacttaaataagcgcatatgggaaatgaccaaagaaagctaagttagttgacttttatttttatttatttatttatttatttattcatttattcatttagattttttttttggttttttgagatagggtttctctgtatagctctggctgtcctggaactcactttgtagactaggctggcctcgaactcagaaatctgcctgcctctgcctcccgagtgctgggattaaaagcatgggccaccatgcccggcttttttttttttttttttttttttttaattgtcaaccagacacaacctagagtcaccagaaaattaggaacttcaagtaaagaactgcccagatgggcttggctgatggcagctgtgagagaatgacccattggagatggcatgaggacccagcccactgcaggctggagtcagcaccaacaggccaacagggttgttgttgtttcagctctgggcccgacttctctccgtgatagactgtttattacctgcaagtgtaagcctgaaataaactctttcttatccaagctgcttctggtcagagtattttctcacagcaaaaggaccggtgaaattgtcactagggccatgaattcgaaaccgctcttctttccttacccagcgctgaagtgaaccaaagcagcagaggcagttaacacggccacgccagaaccctgggcttgtgaacactagtccacgagccaggacccataccttcctcactgtgtcggggcaccctggcacttcttatgccagcttgagtacaagtcagatttcatcatcactaaccttaagatctcggacaagctagatcttttgagtctgaatttattcagtaaaatagtaataaccatttcgaaaagtaaattagaagcggagtaggcttatagaaaggcacagcaaggtgtcctgtaacatcggttccctttgccacggatcctctgggagcctctcagggctccgtgaaagaaacatgccaggcagcgtattatctgatttcccttacctaatctaagaggacagccaactgcttacacaggtccgccatgccaagcaatgtaggaaaggtcaagaagccgtccgaaatggtagcactctattcatctccccaaatccttgtgtcctaatatcgggtggcctgacggtcttcacggctttaaggtctgcaaaggcaatctgataaaccttgctgttgttccaggtccgactcttggcctgcaggtggaacaatctcccacagcaccctatttggtcctgatgagggcagcatgccaggggaccgcaggcaaagccaggcggctttcaccagatctccaggagcgcaaagcctagggggcgtttccgagcgcgggggcgggcacagccggtaccgcccccgccaccttcagggtggtgcttgggtgctgatcttaaacttcggcaaagtttgcaacgggtctcaagcacgtgcggcttccccgcccggctccgcgttccccgagccgcccccggtcacctgcgcgcggttggtctctgtcgtttccccagcggccgtccccctgcgctctcacgcgacacgcttctcccaggctcgaggaggcggcggcgacagcgcgtagcgggcgccccgaggagccccgagaggcggggtcagggcgggccggcgcttggttcccggaagccgctgcttgcctgcgaggctccggccgaggccggagctcgagcatcctcacccgcgcttcccggagccgccgcccggccgcgcgcaccgcgggcgagatgctgccggtgcacaccgaggtgaaacccaacccgctgcaggacgccaacctctgctcgcgcgtgttcttctggtgagtgccgggtccgggcccgttcctccgtccacgagatgctccgcgtcggcttagccgcgtgtccgatgctcagcgccggtccctgatggtcggaggatgcgtttcctgcacagccttacactccgggctccttgtcgcgcgtgcgccacgcggcctgcggtccccgcccgcaccccacgcccgtgccgctctcctccaggaggggcacgcggggaccggtggcagacgcaggtggcgcccacccgaaaccgtggggatccatgggaggtgcgggggtgccctggagggcgggctctgtatgcccaccttcgctagcttcccatcccggctcagggcttgcacaactccctcacccaaactgcacctctttatttctctttaagcagcagtgaacagatgggcttatcaaaaagcagctgaagttagagttctgggcgaacgccaaactctgttgtccccatggccttctgaaacaccttaccagacatctttcaggtccattgattgcctgtgtgtgtgtgtgtgtgtgtgtgtgtgtgtgtgtaaggaagtttaacttctaggatcccgtctctccttctggcccctctgtgtgtgtcctagtacctaagtatggctgtgagttaaaaggtcactttattacgatgttttatttagttacgaatggggacactactcttgagcaagatcaacatgatgttttcctcttgacagaaacgcagccatagtggagtacattttcccctgttagatggacttttcatttctgcctttgatggccatatccctcttgggaatgagtttcggaagcctgttgggggtcttaccaagatgtgttcagagacaggagtcaaggtttccatgcctaaaaccactgatgggttccctgatctggtctccgccccacccctctttttgtaggaaacaggtgaagaggtttagatagatgacattcctaagtagttttccgcctagtagcctgggctggctagtacacgcttggctaacaagaatagtttttattccttgacctccgccatttcatcttcctcacgttctaatgttacctttttaaaatgtgaaaacctagggagcttcagagtcatttactactgtttttaactgctgatgcagtgtgtgcaggatccgattttggacactcggtcaagaggagcttgcgggaagaaggaatgtggtgaaatgaatttaaaaaaaaaatacataactcagagcgggtgggctgtcttggtctcccgagcttttggcaatacacagacctcctgatgattttcctgtgagcggactttcagaatggaggtgaagcgagagctgggtgtgggtggcacatacctccagtccctgtctcttggaaggctaaggtgggaggatgacttgagcagctatggagctgagaccagctaggataaggtagcaaggcacaatcggctgttgtttgtttgcttgagacagcctcaccctgtagcacaggctggtctggaagtcctcgaatgcacagcaatcttccttacagcctcggtttccacagtgctgggattataggtatgagccaccacatctgtcaatacacggtcttaaactatgtacggaatagctgagtgtggtatcacagcctttaagctgtcaataccagcactgagtaggcagaggcaggtggacccctgagttcgaggccaacctggtctatattgtgttacagtcaggcttatagatagactttaaaataaaaaagggtaattattttacattgctgtctggggtgagtcccatttctacttcccagttggtgagaaattagctattgcctctagtttatcccttgtgagggggctcaagctgaggtactttgactaacccgtctaggatggcaaagctactggcgtccagcaggatccaaacctggctctcaggaaccactgtactttgcagttggtcctcccatgcatgaagaaggattgctcccgttcttacagcagtttctcaaggatgctattacaattcctgtcgttgaagatgcgtgtgaagcatctttggtcactatggtatcagctctcacagcaggatagtcagaagggcagcatcagcatcacctgggagcttatgggaagatgcaggatctccagtgtccctgcagactgacccagcacagccagaagcatgggggtccatgcttttcacaggggcccgagtgatgctgacgaaggctgaggctggcccactggactatggcgcacctcctgttagccttggctttccagtgttacactttgcaggagggctgtgacttggtgaagtcacccgtggcctgcttaaccagtgtgtcatttctctttctctcttgcagctgccttgctgcagatgggaaaccctcctgcaagcccggattttttttaccttctttgtggggcgtttgtttttccgcccactctgtgtctgttttctagactcttgagttggtagctgcccagccagatgatgacagcccatgcaataagccttcctaggatttaggtgaaattgtaatacagtttggacgtgggctgtcaatcagcctaggacaccggctggtattgtggctgtctcttgcacgcatgtgttctttcagtgcacacgttggcaggagcacacggacattaagtaaaactgtaacctgtcatggatcctttagctgatatggtggactttacactgttgcctttaagacatgatatttttctgagtgtaattttccaggccttttgctgttgctgaacacagtgcattcaacagttacatagtatgtgtccatggccgtatcttttggtgtcctctcttccctttctcaggctgttggtgttggggattggaataaggcactgtatagattaaacatgcacgctaccactgcctatacctccagcctcatccagagctctctttctctctacctcccaggatcatctagattccctgtgcatattttttttagctattgtgttaatgacaaaggatgctagggtttcttttttgcagctgctgtaaaataggcaccagttttgttttgtttttttgttttctttttctttttcttttttagatttatttatttattatatgtaagtacactgtagctgtcttcagacacttcagaagagggagtcagatcttgttacagatggttgtgagccaccatgtggttgctgggatttgaactccagaccttcggaagagcagtcgggtgctcttacccactgaaccatctcaccagcccttgttttctttttcaacacagcacattttcctaccactgtttattgagcagtttgtcatacccgtcattagaaacaaatggtataacttgtgaaatactgtgtccagccaggtcgtggctgactgctcctctttagttctagtaaccctggagttagaggcaggtggatctctgtgagtttgaggccagcctggtctacagagagagctccaggacagccagggctattacacagagaaaacctgtctggaaaaaaaacaaacgaatgaatgaatggaatactgtgtctagccggctatgagaatgtccaagccccagtctctcccaagggtgtccttctccctgctgccccctggtgttttcaccaacgtccaggaagacctgtgggtgtcctctgtattcctaggccaggcctcctcctacccaggaggtcttgggattgcagcagcagatggaaggtaaccagagaggcgctttcccagggtgccagtgtcaagggactccaggggactgatgcatctggccccagagagtagttaagcccttgttctcctatagctgactgtgtctctgctcagagatgtcgtgctgcaaagccatgtgacaggacagactctctggggactgggctgagaacaagcttgtgacttgcagatgaaatgcagatggcttaggaaggttggctgaggggcactccatcacggcacagaagtgccacgtatttatttattcattttattctgtgagacaggatcattttttagcccaagctttgggtagagaactctcccagctcactgtcttgagtgctaggattataggtgtgagccatatcttgcttggtagtgtttaattttaaccagaggcattttggtaccatattttgagtatttttattatcacacttgcacactcccccaccacactcatacattacacacatatgtataaacacacacatgcagaaatacacatacacatgagcacacaaacatacacacatgagtataaaaacactcatacacccatgagcatacactcacaataccacacatatgcacatgcacacacatatattnnnnnnnnnnnnnnnnnnnnnnnnnnnnnnnnnnnnnnncacacatatatttgccccccccccgccgcgcccccatgcacagacaacattcccttttacatacaacacaggtacacatatacatggacacatactatacacatgcataactcaacccacaacctataacacacacacacacacacacacacacacacacacacatgcacacactcctactatggcacctgtgtggaagtcagaggaaatctctctgtctgcttagtgagtctggggttgaacctcaaggaagtcatcagacttggtggcaagcacctttatctgctgagccatctcatggccttgctggtattaggcagagtgccaggtttctggaatgaacaaacaaacaaacaaacaaacaaaaaaaccctcctgcccgccagagtagaaaggaaagttttagactcacttaaagattagccttttaaagacatcttcatattgcgtaacacaagaagaccactggatgcagaagtcatcagagtgggagtttcatgcctggatagtaaatgtcatatttacctgcctcagtaatagtccttggacatggttttgaaagtgtaggccatgggtctcttgtagcgtccccgctgtgagtcctcaggaactctggccctagtgagtctgggtgggtcctggggatctcttttgctggctactgcttctaatatcctcggaggacaccttgagaggccgtgttgggaccttgagctttaacaatggtgatcactagcacatatacattttgttccattcagcttgttatcttccagaagtttaaccctcagtctctcaggcagacattatcacccttctttaggggaggcagattgaggtccggtccggagggggttgggaaatgcctcagtaacctcgtagcttggaggtgggtgtgtcacagctgagacgctatctggatcatcaaaacatgtcataggtgtgccccatcgaaaacagaggcactcgctcagtatctgtctacctgctgggctctgctgggctggtagaaacgttggctggctggatgaatgtgtgtgtgtgtgtgtgtgtgtgtgtgtgtgtgtgtgtgtgtgtgtgtctgctgacttgatcaagcaggcctcttggttgttagtgaatgagtttgtttttcacatgtgtgttcgtcttcagcatgttttctcctgtgctggcttgttttatgtcaacctgactgacacatgttgtagtcatcagagacgagggagtcccagtagagaaaacgcctccattaaggtcaggctgtgggctaggctatagggcattttcttcattagtgatgggcaggggagagcccagcccattgtgggtgctgctatccctaggctgatggtcctgggttctataggaaagcagactgagcaagccagtaagcagcatttccccccatggcctctgcatcagcttctgcctccaggttcctgccctgtgtgagttcctgtcctgacttcttcagtgccgaacagtgatgtggaagcataaactaaacacaccccttcctctccaaattgcttttggtttcatgtttcatcacagcagtagaaaccctgactaggacacctcccgtccatctgtaaggttgaattgctatttggttgttagcaccatcgtctgtctagttattaaggcataaactctccggtcatccttgtttaaaccattacccctggcatcagattctacggttggactttaggcatgcctgtggagccgtttcatccaccgattcattcacacgctcaccaaatgttgttgaggatcctcagagacactcctcaagcctggctgtggctttagttttttctttttaaaaattagatggaaggaaaatcactgtagaacaaactggggtcatcctgctcaaaaacctccccggcctcctcccgttgctctcaagaacaaaccataattcacattcagttctgtgactccagatggggctgtgacccacagttcagctgtggcttagagcaggctctgccagtcactttctgcagagggtacacggtgcgtccttcaggctctgctgcgtgcggtctctcttgcagcgaaggactcgtcttatttgtacgtgtcatcctcttatttttgatcattgagccgggaggtctgctgccagatttatttcaggacccaacaggaagaggttccagggtgtctccgagggcaggatggagatgctgccgagtgaggtggtgaagccccgagaggaacggtcagagcgcatggttaacagaatgtgcagatccgtggaacagttcactggctgctcagtctacagggtttgtcctcacataatatcctgcttcatctctgtttttgttcgtggcattgatatcagagctgagcagcttgttgctgccattcaaaggttttagttggaggactgactagaaaggaacaggtttggagaatgtcccccaaggtgtggcaagccacttgccagcactgtatgggagattacattttctacgagtgtcagaagagaccacatcacctgccccgtgggagtccagaggtatcgggtctccgggttggtcattccctatgaggaaagtggttggcgtgttggcaggatttactttgtacaaatagaggctggttgttggtgttgggttgcagatcctcagattgtttccgtctgttgtctactgatgggaattatttcttcttctctaggtttttgagatagggtcttatctgcccaggctggccttgagctaccttgtggtattaccgaggtctactacgcccagcgggtggaaattatttctctgaaggctaccagcctgttgctacatttcctttaacgttttggtggcagtgggattgaaccgagggcttcacataagctaatgacacgctctgtaccaaactgcagctccagccccccattaagttctttctagttgacactggcagcccgctctgaggctgaactgcctgggtagccaaaacaaccataacaaaaggaaactgaagaaaaacccaaggctagcacatccctaggccagtttgaatcctaattttgggaagcatcacttaggcgtaaaataattttaaaaggctccttcagtttttgatggacagcgaaagccaagaaccacaggctacagcctcccctgagtcagtgagcttctctgagtcaccctcaccccccattccatctcagctccctctctcccaggacttgcccacctcaaggtgtgggggctgtggctgcgcagagcttagccctgtgttgctcagcaggtggcagtggggggcagcagtccctgtcccaggggtcttggggatggtgggctatttgatccttataggaacattttgtggagaatggctcttccgcacagtgaggaaagggaggctggagagaccaggaaacatccggtgggcaagatgaagctgggagctgagtcggggtactaaccggagagcatgcaccggaatctgtgtttctgtgatcatctccttagcctgttttcctgtttctacgtgatggtggcagtaaatggatagagaccaaagttagagggaccttggtggagaggaagtgccagctatgcaaaaatatatacattttcctatgtaaaacgagcataaaattgctcgtggaatacattgctcttagtctgtaggtctgtatggagtgtcagttagtcaggatgtgagtgggatccaactggccagccctgttaatgtcgcctcttcaaggactcttcaccagccagcccgtgtgcacaaggctgtatgcaaggcgtgcatcctgtttgacttttgtgtgttaaaagatttgttttttattattattatttttgtttgtgtgtttttggttttgcttttgcttttttgagacagggtttctctgtgtagctgtggctgtcctgggactcactgtgaagaccaggccggaatcaaactcagagattcacttgcctctacctccggagttctgggattaaaggtgtgtaccaccaacaccctgcatttttttctttttaaaattatttgtacttaggtgcttctgtgaatagatatatgcacttgtgtgcaggtgcctgggaagccaggggtgtggattcctgctgggcccctcaattcctgtcctctgtgagagcagcacagactccccactgctgggccatctctcctgccctggtttttgtttgtttgtttgtttgtatattagaattcaagtgagggggctggagagatggctcggcgattaagagcactgactgctcttccaaaggtcctgagttcaaatcccagataccacatggtggcttacaaccatccgtaataaggtctgacgccctcttctgctgtgtctgaagacagctacagagtacttagaattaataataaataaatctaaagaaaaaaattcaagtgatatctatttatttacttatttatttattttcattcattcattcaatcattcattcattttcactagtgggtctctgagcacagccctgcctatcccggaagtcactcactgtggagatcagactgaccttgaattcactggacctgcctacctttgtgtacacctccggcccagctctttgtcccgttttgaataacagaagggagccggtttcctgtttaagctggtaggcttggcctctagactccaagtgtatttggaggcgctctgttgctcatcgacattccgggttttccatggtaagaccgaccctgccatcctaacaggtgccagcctggtaaagtacgtgcaggtgcgtgggaaggattgcagcaaaattaacttcctcttccgctttgatgtggtgctgtgatttgaacccagggccttgtgcattctagacaagccctccaccactgacctagattctcagtcaagaggtggcaatggaccaacccatctgtcacaaccaggcccctcctgcattcagacaacacggaggcttgcttgccaggtggcaggtggcattgtatgaatcctcttaactgcctcaggtgacggagccttttttggaatctttgtgacttaccaagaaaatacctcctatttagagatgaactctctgggttcagagacgggtgttccctcgttcacctctcagtacgcagttgagccacttacctatcttgtgctgtatcggcaatcgcaaaggattattttagttttaatctgggctgcttggatttagaatggctgctacctgtccgtaggagcgaggagctcgatggtgtcatatgccaaacccgagctaggagacacagagttctcccagacaattacgggaccacgctggaagactctcgtggaagactctttgtgagatatctaaccttcactgtcaacttgactggattttaagttaccaagatcggggagacccctctggttgtgtctctgggggcaggcattcccagacgtgtggttaccttccgtgtggtatcgctatccgtgggcttgggagaggtaacagagagagaaggaaaaccagtctagagctggcatcatggcaacccaacacctaccccattccgggctggccgtaaagtgagccggtctccaccatttgacttctgctggacagcttggacagcttcctgcttcctcaagctgagttgcacctggcacctggcaaccacgcctcccttttgtctgaatgcaggaatagctcgtagtcccagtagtcccatcgccacctcttgattgcagctgttccctgagtgatccatcttccccttcacacctcaggccttatctttactcagtcagccttgctgtttctgctgcccgccttgaggcttctgataccgtctccattgagatttgatgtgctcagtggcatgagccccaggtagcatgtcctgtctgatccctgtagctcctaggagtggctgtgaggtttcccagtcactcccaacctttgctgaccattccttcagtgcacaggctctgtgtccagggcatgcggctgaagatgcccacgccctgtcttactcagtcttgtggacccgctgagtcgggggctgcgtttggggaagctgctgtctgtttccttttccttgcgtagagctcgctattggtaggagctgtttaactaacccttttctttcagtcccttctccccctcctttagctatttatttgttgagtttctacttctattttttaaatcaacatagacaataagtgtcattagtcatattcacccatccatacctctctctgtgcctccttgtccccgccttgtctctgttccttgctgtcccatttcctcgttaccctccccagacctttccctccatctcatagtcctctttctgggtttgggcctctgctcacgctctatcctacacgtgcacatatagaaacatgtaaagctgggatctgcattcatgtgtgcgttacagttggcatcacatgtcaacctgactcacctggaaggagggactctcaagtgaggaattgctctcatctggttggccaggaggcatgcctgtgggacatttcctttacagtagttgagggcatgggggcccagcccactgtgggtggtacagtccctaggcagttgggcctgggttgtaataagaaagggaactgagcaaacctgtaagtagtgttcctccagtgttgccctaggacactcttgtcttgatgtccctccatgctggattctaacctgtacgccgaatcaaatcttttctcccctaagttgcttttggtcatagtatttagttaaagtaacagaagcaaactaaagcaatgtatttttctttctgggtctgggatacctaaataaaatatagtcagacccatccatcttcccgaaaagttcatgatttactttgtctttatagctggatgaaatcccactgtccaggggaacaacattttaggtaggggttatgtaagcgtcttctaaatattaacatagtaacctctaccaccagcctttggagtggtgaatactgctcttttccagggtgaagcagactgtgagcaacagagtccgctcagcccagcctcctctgctgaagtgcatcgtggtgtccaggtttacccttaccccagctcacgaacccaaagggaatactgagttgtagcagagcgagtgagccacctgtggcgccagcagggtctgagctggctcacctctttcataatagtgtccattaccccaaagccaagtcagaggttaatgtttacaacgctggagatgttaagacctttgtccggggtcacagccaaactgcagcagagcaagacccaactcccccagacctggagatcttgaagttaatctaatctactgcttgtctgcatgagatgtggatagacactggacacttgctggcctgatagaggaaaagtggacacaaacacctgaaagcttgctcttggtgaaagatgtccgagggagggtgaccaggagtagtgggtgggttctcttaagactcagcctggaaaaggactcagatcatggagagaatgtagccacttagcggggctgtgaagaagccgcttgtcctcaagatcagagcattttgaaattaagggaggggggatcggagcgtctctttcagagttgagcacaccaatgtcggtctgtgccgtggtcccatgtaactagggctattggacctggaggtataggctcctcagtgatggttctcagagaacttctgacacaggaaaagtgggcagatgctgaggctgtaaggctggtgggggagctgggctctggatgtggggccccagactgtggtcagtctcccaggagattgctgcacacccgaaagttgaggagccgcagaaggcagggccttgagagctttgatcccgttctgaaggtttcacagaagcaaagcaggtgtggggcatgcttacaattccagcatctggaggcagaagatttttgtctcaaaacaaaacaatacccaaacaaaaacaatcactaaaacaaaacaaacaacaacaacaacaacagatccccacatggtgtctatgacccaccatggagagagagaactgactccctgaggttgctactttgacctccactcccaccacataagatttattttaaatgaatacatgttttttaaaaaagagagaannnnnnnnnnnnnnnnnnnncccccccccccccgcttctcctcttaactaaaaatggctgcccttgtggctgtaatgagggcctccaactgagtcacggcctgcttcaatgacctcacagctgggcattaaataagcacttggtagaatcatgggcgagcgcgcgcgcgcgcgcacacacacacacacacacacacacacacactttgcaaaatgccacataattaattattttccttattttcctctctgctgcacagcacttcctttatgcacatgctaacaggtgaaacttccaaaggcttagactctcacacctgtggcacactgataatctctcctctagccactataaagcaacaaaaccgccagtcacagtcgagacctatttaactgatttagggaccatgatggaccatagccacaccaagcagacccctctgctgtgagaaggtaccactgaggacccctggtcacctgtcttcccgtcttagatccttcctcctccatagacctggctccgtctcccttgctgcttgttattctgtaggacaggggactcccagaacccattaagttgaatgcctagccccctagtattgtagactgtgattgtactttgagataagatctctaaaataggtaattaagagtgaattgtctgattgtgataaactttttaattcaaggttagtgtccagatttcctctttgtatttgtggacactccataccgtggacatttatttggatgccgggaatcagagaggatcacgtcaagacgctgggttggggtgggagtgcgggggtggtggcggtggtgggggccacacctaacaggaagtagaggcctcagaagaaaccagctcagatgccaccttcatcttgcttttccagcttctgcaactgggagggagtaattctctcttcgtttgcagccacttggactgtagttcacagtagccagggcagatgaatggaatccacatgcctcccagaagccacggatacatgaagtgtcccgttgtccttagctggggccgttgttctgacctgtcccctgtctgctgagcttgcctgagattctccctctgtctcggcagctctcaccacacagcttctccctttcccttcagagttcacgagtcaggttctgctgtaattccagaacgtcttccgacgtggaaccgactcccagccacccttcagaacgctgttgttgattaaactgaagaaggaaagctctgtctctggacaagcagtctcagtgttctaagcaaattatagcttttgaacctgggtcactgttattgttggtcctggtcccccggcgcctgtggggtgtgtcgtgtgtctttgcaggaggctgtccggtgtgtatgcttttttgtgttcttccaggctatgaaccaacatgggctcatactctgcagtttctcttcaacatgcaaatgctccagactggtttgctttggggaaaaccccagtcaagtccttgggggatccgatattagcagtgacgaaagaaagagagagagagagagagagagagatggctccattgtgctctttggctgcccccaaatcctctgtcctgtgctcctttaagtatatagcacagcactgtttttccggaaagtgtttgtaaagggaagattagtcccttgggttaaggcagaacagggtctctcgtcttccctctctcgggtggatggctggccacttctgctgccaactgtcccctagtaagatgaaggcttttgaagggaaattccaccaagcagccccatcatctctgctccttgggagggattcctcacttgggaggaggagtttcattttctaagagtcccttccaggaaggataaggtgcagccggacaggatttcccacagagctggtagcttaggggcatgggagagggagttagtggcctttgatttctgggaattgacttcttttaagggcaaacctcggtgcttaagtgtcagctagcaccgaacattgtcaggatgcgggaaaggccggcagccatgatggttttttgatggtcccttcaaaccttgactggccaactttagatgaccctgaagccattgtgagtccctgtggaaggctgccagatgcaactcttttagggtctccagcaaagcacgcagtgtgcatttcatttcctctctctcgggtccggagatccatttcctggtaagcatttcaagggaagagaaagctgaacttgaatgaaaattttaaggattccagtagcaagtgtcgtgcctgcagtgtccttcctgaggagtaatttggagtcttaggcaagaagcagcctggccctgtgtgtcccgtagctccccaggaactggcattggcagtgggcaagtgttagttagcccagacttcctccctgggccttacttccgtaggccttctctgacacaggcgtctcccgtctctgtactcgaggcttttttttttttttctttcttccttcctcccttcaggctgtcgagatggctcagaggttaagagcactgaccgcttctgctgaaggtcctgagttcaattcccagcgaccacatggtgactcacaacaaccagtaatgagatctgacgcccacttctggtgtgtcagaagacagctacaatgtacttaagtatagtaataaataaatctctgggccagagcgagcggggactgagcaagcagagttgaccagagagagcagaggtcctaaattcaatccccaacaaccaaatgaaggctcacaaccatctatacagctacagtgtactcatatacctaaaacaaagaaacaaagaaacaaatcttttttccttccttcacacccagcaaattgacccgtgttccaacatccacaaaaacccgtgcccagtgaggctgtctgggctgtaggttgtgggtcaccttttctccaaaggcagaggtgtcttaccccgcaagagtggcttctgagatctgtaagggatgcagaccttgcaggcagctttcctaagggaagggagagtgccatccgtaacctggttagtggcttgccaccggcagcagtcttctgtctccagctgaggacactgtgcactgtggcacggagggtgaggtgctaccagccgcaacctgaacaaaagggacgggcggggtgcccagttcccggctgcagcagctccaagtccaaggctgggagagagatgtgcttatgatgggcttcatgcacagtcggtacggtcagagaacagcttcctgtgggatgtggtggtttactgtgcacaagttgtgcttgcctgccccaggtccccccaaagtgcagtttctgaagcatgcataccacactgcacaaacagccaaactcagtttctcacccgctgccagattccttagagatctggcgtctgttttgatggtagggggaagggtcagtgctttctgtaccagagtctcctgtgggtttgtgttcttatgtgatgcttatgctgtgtgtgtgtgtgtgtgtgtgtgtgtgttaggaattatacctacagactcccgaatgctggcagacaccctaccatggagccacaccccaaccattactcctctttttaaaaggaagtggtcacttcgacaggctctctctccttgctccttccccacaaaggaggaagacaaccctgccctgatttaccatgaaatccaaggatcatgggaatggatggttatctgagatgagagctaacctccctccctcnnnnnnnnnnnnnnnnnnnnnnnnnnnnnnnnnnnnnnnnnnnnnnnnnnnnnnnnnnnnnnnnnnnnnnnnnnnnnnnnnnnnnnnnnnnnnnnnnnnnnnnnnnnnnnnnnnnnnnnnnnnnnnnnnnnnnnnnnnnnnnnnnnnnnnnnnnnnnnnnnnnnnnnnnnnnnnnnnnnnnnnnnnnnnnnnnnnnnnnnnnnnnnnnnnnnnnnnnnnnnnnnnnnnnnnnnnnnnnnnnnnnnnnnnnnnnnnnnnnnnnnnnnnnnnnnnnnnnnnnnnnnnnnnnnnnnnnnnnnnnnnnnnnnnnnnnnnnnnnnnnnnnnnnnnnnnnnnnnnnnnnnnnnnnnnnnnnnnnnnnnnnnnnnnnnnnnnnnnnnnnnnnnnnnnnnnnnnnnnnnnnnnnnnnnnnnnnnnnnnnnnnnnnnnnnnnnnnnnnnnnnnnnnnnnnnnnnnnnnnnnnnnnnnnnnnnnnnnnnnnnnnnnnnnnnnnnnnnnnnnnnnnnnnnnnnnnnnnnnnnnnnnnnnnnnnnnnnnnnnnnnnnnnnnnnnnnnnnnnnnnnnnnnnnnnnnnnnnnnnnnnnnnnnnnnnnnnnnnnnnnnnnnnnnnnnnnnnnnnnnnnnnnnnnnnnnnnnnnnnnnnnnnnnnnnnnnnnnnnnnnnnnnnnnnnnnnnnnnnnnnnnnnnnnnnnnnnnnnnnnnnnnnnnnnnnnnnnnnnnnnnnnnnnnnnnnnnnnnnnnntgggggtggtggtggggtgacaggtacctaagacatccatgtgtagtcctgtctcctggagccagggggtgggggtggggtggggcctgggggtgaaagggggtgagtttagccagtgattagaagtgagcagctggctttagaggctagaggccgggcaagcatagtgctcagacaaactcaggggaactgccaagtatccaggtttcaaagacaccctgagaggccgggaggcctctgggacctcaggtctctgtgttcttagttagctgaaccacctggctgttctgttggggtgacatgtttggtgccaacacttgcctatgtcctgcggtgggcagtgtgagacactggacctgggagactcctgaagccttggggtctgctcagggggcagagtcgggcagtgaattccgatgttaggagtaagtttgtgttcaaaaaagaaggagaccacactccagtgcaagtgtccagacaaggccagctgtccttttgatcaagagagtgttccctggagggcaaacaaagacagacaataagtgtatttagatttattgtaaggcaggttgtgactgccatttccccttggctggggtccaacctcacagctgggtagtctgaaaaacctgcacacaggtaatgaacgaaggggagggaggcacactgctccaaagagagcctttgtgcaaataagggctttagtgtgtatgtgtgcgcgcgcgtgtgtgtgtgtgtgtgtgtgtgtgtgtgtgtgtgtgtgtaaaacatttgcataaaagtcttaaccaggcaggagagataaaatgacttgaatctcgtgtcctaaacacagttctatagcatttgacagaagagactcttacttggtattttcttccctttggtgtgtgggaactccgtgtctgagggcctggggttcggggtgagtttgctctagttgagcagtccttccttcttggtcatgttctctttgagttaggatcttgttttgttgttgttgcctttaaatgtgtatgggtattttgtctacatgtatgtctgtgcaccacgtgtggtatgtatgtgcattgcctgtagaagccagaaggggacattagatcccctggaactggaggtgtagccctgtgtgaattgccatgtgtgtgctgggaatcacagcctagtcacctctctacccaccatcaagtagtatttttttaattaataattttatttatttacattctaggtgttgctccccttcccggtactctgtcccatagtgcttcatccctcccccgcctccgcctcctttgtctctgagaggtgcatcccccttcctggggcctcaagtctctataggattaggcacatcctctcccactgaggtcagaaaatgtctgcatccctctcagtcagctgctggttagggccctggaatcttctctcagcatcctgttcatcctgtagcctggatgaaggacgagggaagtcatggttgatgtttcccgattccccttgcttctcccagctctgctctctcccatccttgggacaacttaatgctctctacccaacacactcagcacacgtgggttggtaaggacgtcccgggaatgcagtggactgcagggcttctgctctccgtgctgcctttgattgggacacgctggcccccaacttctcatttaaggagccctgcctcttgctgtctaagctatctccccaccccaccaccttgtggctccctgttggttcactgtgtagaacctgtccttctgagcctggctctcttcagtatcctggaatgtgagttgcatagagaccataatctgtggtctagaactcttggaaagagccttttgcatagtacatgcttaaggcgtcaattccaatgaattgttatgatttcagcttcctggagccttgccttcagattcctggagaaggactgagatgcaggactacttgctatcatgtgctgtggctgtggggtggctgagggccctaaccctaggggtcaggagtaagtgcccctctgactttggccaacttgaagggacacagcggaggtgatactgtactgtctcttgtgggttaggaatgtcttccacagttcttgtcccaggctggtggggggctgcgtctgtggtgtcctcctcctctttccagtaaggcacaggcacgctggaccagaagcctggctagagttccctctgggttagcttggagatggtattcagaaagctgggtttggtggtgggatggtggggactaggcaatcaatccagcctgcggatgacagcccaagcatgaatcaaggtctccttcactccattgcttctgtctgacataccctgtttgcaagggtctcctttactccattgcttctgcctggcataccctgtttgcaaggtcgccttcactccattgcttctgtctggcaggccatgtgtgagtcaaagtctccttcactccattgcttctgtctggcagaccctgtttgtgtcctccttagttgctttagtttttccaactctgtgcacagttgtggctccgtggaatattttacagtgaaattggagaagggcatcgtcaccgttgttgttgttgttaatttaaggaaagccatttcagaaaatgccccgaagttcattgtagagtttttcctcttctctttattttttaccacataaaccctttagtagatggccgagggagactggtcaaagggtttttttgttctccgaatctgtggctattctggatgagggttgtatgtttgtaactgccctgatgcttcaaagcgtgaactggctcgcctggaattttcctcagttctgcctcactgacacagggctgcccaccagaaaagcctgtggtttgtaattctcccctttagaaatgcgaggctgtaagtgggttctcagggttatcatagagtaacctgtccagagcctgtattttgaagtacagttatttcaggttgtcagagcattggtaacaaagctcattccaggtctggagtcctggccacaaattttccacagtgcctaggccagagaggtagtgtacttggctataggaaagtgcaggtaatctgcatggagaatgggtgtcatgttctaagctagcataaggacggttggaggttggagtttgggtcggcgcctttagtttgttgtagagcaggtgtgggcctggcagactctgcctcctgcttccagagcttaagcaagctcatttgtgccacatagaaaatgaccagaatcaaaactcagatcggcgcttatctatttagccatctgtctcttcaaatgcagggtggtattgtaaacgttaaatgaaaacttaggcgcaactacattaacagcaatttttcatacttacagttaatccatagcacacagaactaagtactcttcttccctaggctttattccactttccaaaaaaataattctgaattatagggtggcctaggctgggggccaaagtctctgagtcaaaaatgctctcgtggggccggagacattaaaaatctaaaaggggagtctggaggaatgcagagggtctgcatgtcatgcacaaacaagactctgagcttgagtccccaacactgcatggagaaccagttgtgctcctttatgtgacagacactctcacttcccagttgctgtgacatgacacaacgtgcaaagccaatgaccgaagcaacttgcagaggaggagagaatttgtttgtggttcctgcttgtggttccatggtggggaacatggcggcaggcagaccatccctgtggctgtagctgagagcttgcatcttgatccacagctgtcttagtcaggctttctattctggcacaaaaatcatgaccaagaagcaagtttgggaggaaagggtttatttcgcttacacttctatactgctgttcatcaccgaagaagtcaggactggaactcaagcaggtcaggaagcaggagctgatgcagaggccatagagagatgttctttactggctttcttctcctggcttgctcagcctgctctcttatagaaccaagaccaccagcccagagatggtcccaccagcccagagatggtcccaccctttcccccttgatcactaattgagaaaatgtcttacagttgaacctcatggaggcatttcctcaactgaagctcctttctctgtgataactccagctgtgtcaagttgacacaaaaaaatgaccccttgtcaacttgacaaacaaacacatcactggtaagcctcaacccttagtttcttattcattcccaagatctaaataacttaaaaagtcccacagtctttacaaattcttctcttaactgtgggcttcactaaaaaaacttccttcaagagggaaaaatattagggcacagtcacaatcaaaagctaaaatcagtctccaaccatccaatgtctgggatccaactcaaccatcttctgggctcctccaagggcttgggtcacttctccagccatgccctttgtagcacacacatcgtcctctaggctgcagatgcctgtaatccactgctgctgctcttggtggtcatctcatggttctggcatctccaaaacactgaatgacctcttcagtcctgggccatcaattgcaactgaggctgcaccttcaccaatggccttccatggcctctcacagtgccgagcctcagctgctctgcgtgacccctttgtgccttcaaaaccagtaccacctgggtaactcttacacattattaagtccatccacagcacaaggtacaaccttggctatctctggaacacagcctctgtgctctcagaaaacacttctcagaagatgtcacctcaatgatgctggtctcttcttaatcaccgctaatttcttagctccagctaaccagcatcaatagtcccagtaatgcaaaggttttactttagtagttctggtactacttgttaatcatagctgattcttcagcaccagataaccagaaccacagaatcttcacaatccaaaatagcaatggccctgaaaatagtctttaattttccctctgaaatttcacaagccaggcctccatttttctgcactgttctcaacattatcttccaagctcctacacaacatctcacagagttcttaacagcgaatggatcttctggcccaaagttccaaagtccttccacagtcctccccaaaacatggtcaggtttcacaggaataccccacttctggtaccaatttgtcttagtcagggtttctattcctgcacaaatatcatgaccaagaagcaaattgaggaggaaagggtttattctgcttacacttccatactgctgttcatcaccaaggaagtcaggactggaactcaagcaggtcaggaagcaggagctgatgcagaagccatggagggatgtcctttactggcttgcctcccctggcttgctcagcctgctcttttatagaaccaagactaccagcccagagatagtcccacccacaaggggcctttcccccttgatcactaattgagaaaatgccttacagttggatctcatggaggcatttcctcaactgaagctcctttctctgtgataactccagctgtgtcgacttgacacaaaactagccagtacaacagctctgaggcagagagactaaatgggactggcatgggctttagaaacctcaaaatccattcctagcggcacacatcctcacccttctttaatagatccattaaccggagaccagttattcaaaagtatgagctgataggggcatcctcacacatagcatcacgtacatgagcctctcctgacctggagatacgagaaggtaaagtcaactctctcacgggcttagaggcacagtgcagagccacctgagtgacaccagtgtgatcaggagacggaaagggagggatgtagattatgcctgtggcagaatttctgggtcaggacagaaagggaggtggagcaggttaggattggtgagctgtattcttgtaagctatggggagagccccgtttgcctagcatctggctctgggacgattcacagagggatgctgctttggggtgggcaggccgtgttgaatcagggcagtagtctggttctgcgccttgtgggtttgtagctatccaaggcacgttcctgttggatattcaccgtctccaagagctggctagctccactgtggtcggcctctccccagctggagaaggatttaagatactagaacatcagcatgtgtagaagacagaaataatgagtggaataatgttcttgctgcataaggattggcagggcagcctgatggcctgggcagaggagaaagttgcttgggcagaaatgtggagcaggcatctctgggttcagctggaactaggaggaaggtgaggggagcccatgatgcctagtcagggctcacctctaactctcccatgcacttgaagaaagttcaccaaaaggctcacggccttcctttgtgtagggctttgatggcacagccgtgaggctgcccaagggcctaaactcataactggatggaagcaggggccagggacattatctggagccccgccctcccccaagctaagttcactgtgctgccattgcaggaagcctgtgacgtcaccccagacagagctgtcacaaaagggaaaggcccagacttactgtatggactgccggtttagagactttgctaaagatttggcttccttttgtggagatgccaagtaactctggacctggctttgcatacggtgctttttggattcggagaaaaatcagttgccatagatacatacttttgtatgcttttataacgaaatgtctttttcactcctgtgttacttgaagacattaacttagtagggtttcaaggtatgtgtgtgtgtgtgtgtgtgtgtgtgtgtgtgtgtgagagagagagagagagagagattaagagggagtttgtggttttaagtagcaagaatttaggttgcctaggcacatggtttcttttatgctagaagctttggaaaacaaaactgtcagaaatgattagtcccctcatggagtttgtagctcatgaaaagcggggaggactgggttagatttcgtgctggttctggaacttgtggtcacttaaacacagaatatgcaggaaagtacctccgcatctcaggcctgtggaagttttttttggggggggggcacgatagaggtgggggggtgagacaggatttctttttgtagctctggttgcctagaacttacagagatcctgttgagtggtgggattaaaagtgtgtgccaaggggcctggccagtgagagttgtccataagacaccacagcagaatagattacattgcttgggaaagttgtagatagatttttatctttgaataatagactattgcaaatgcgtcatacccaaagtggtggctgttcagcaaatggcctgagacctttcctgcaaggagttacttcatatacttgagacatgcttgcatgcatttgctaatttagatgtttcatggatgcagttgatggatgcagttggtaggtagaggcatacaagcagtgttctcgggtgagaggaaaaacctcgatagaggtcggcctcgtttttcaagctatcatggaaggccttgaaaacttcggctcccttcttccagttgcgtgtgctgtcttgttccgtgatgtccctctgcttctgttagaaccaatgcctgctgtatacataggaacataaacttgagtaaaccagatggttccagttcaaagcagagcttctcaaggtatttatgagagccattacaagtcattgtctccttactgataaatttgggtaatcagggtaatattaataaacacagactgctcatctgctgagggctaaaggaatgcaaatagttttgaggatttgtaggctaaaaatctcttacaatgagctgtggtctggaagaataagcaacctttatatagtgggagtgggtgggtggtatgcagggatgggtgggggggctataagagccaacagccaatactgcatctgctttcttgtgccccccacctttcaggccagtatctcagtgctgtggccttggtggcctttggtgatttgtttacagccgggtgtgtgactcagggtggtagacgctgttttagagagagctcagccaatccctatcagattgcacatgagatctgcccgcagctgtctccagatttatttgcttgcttctcttcaaccacagacacacgctaacctcagcctaggtctcgagaagcggaggtgactggtcctttctggtcgggtccttcctccccctgtattttttgtttattctctggtgaaacagacccagaggaactttggtggtgcctctgcctcgagactccctgcttcggatgtggctcatagacccagagaatggctgctccctgcgtcctgggagaagtgtggactctccagctccttcaatagtgcgccgacccagagccatccatgaggtctctggggaacggaagtgccggggactggggggagaaagaacccagacccactaccattgttgtctgtctagataaagctggtcggtgccttattctgaggacaggaagaggaagggtagaggtgtgctcatgagatggatttctaagtcttctttgcctggagatctcacctagcagcaagtgtgctcagaagacgttgggtggttagtccagaaatcaggagatagaaaaggcggcttcaggtgcttagctgagctcagtggaggctgtggcttgcctatacgtctatcttagatcacaatgctaactgaaagatggaaggcatatagccatctcttgatgagtgacatacagtaatagatgtgttaccacaaatgacaccaggattagcacttgggttactggcctcatagaaagcccaaggcttattgcatgcctaatgtgaagaccatacaaatgtggattttctcccaatcttcccttctccttcatgtcttcttttttggccgtggaaatgacaagtatgtatgcagtagagtgaacagaacagtctaaccaagtcccaagcagcctcctctgagcttcagccatgatcagctcccagccaatctcatctgctctctaccccactctcttccccactcggagactcgtacacttgtgtgttcttggttgcaagcacgtttccttgcttttgatttgtaaagggacgctagaaccttgatttgttaaagttgttatgcgcttgccgtaatctcacgagtattctaggggatgcttaattatgaccgtataggcactgttaaatcaaccgtgaacaccacgccgtctgtcttgtcactttctgtgtgtctgtatgagtttgtgggtgcacatctgtgcatgtgagtgtatgagcaggccagatgttgacgttaggtgtcttcctcaatccctatccaccttagtttttgagatagtgtctctcactgaacctggaacaaacaacaaattcagctggagagcagtccagccatcctcagggtttctttcgcctctgtctcctcagcaatgggattattggtacgtgatgctgtgtatgatgtgtgtgtgtgtgtgtgtgtgtgtgtgtgtgtgtggtcagaggacaactgggaggagttgtgcgtccctccaccacgtgagtccaagggattaaatccggttgtcaggcttgctggcaggtgtctttgcttgccgagccatcttgctggcacaggttggaccatctatgactaaccacacacctccgtgcggctttctcacctgtacaacctgccgttctctgagtcttgatctcagacccacagactggaagcccagcaacagggatctggctttacagctcgtgggctgcacagatgttttcttgtagcttaaaattcaaggtctgaatgttagagagtgtagcagcaaaggaggagggagatttcaaaccatgccttttctttctggtgctggcagcagaagtgctgagggggcagtgatggctggtgggcactgtgctgagccctgcagtctcatattggactgaggtgcatatggtgaagccctgatggaagaagccatccgagtggagatgctgacatcttcactgtcagaaggccatcagtgtcttgagaagttagtgggaagtcaagagttcccagagttgatcagaacttcacagggtcccgactcagactgcttcaagcctgtaagattggggttcctaggacactcacttctgacacagtgaatataaattcaggacctcctatgacccgcttgggcttaatagcaatgtctcacaggactcaggaaagtgctatacacagaactatgatttttctacagcatgtacatactggttgaaatcagtcaggatcccaaaagcacagctttctggtcctatcccatgagctgggatttgccactttctggacatgctaatggctggcacattgtcttataatgatacccagagtgttggcaaccgagaaagctcataaaagcctcacctgttgggcttgctttctgcaggtggcattgatgtgcgtgggtcatgagatccatctcagactttctgccctctaagccccagagtctaggcaaagtccatgcctgtcaatacatgattcgtccatccggggcagtttccatcgttggttttatgtagtataaactttccaggggacctaatgtgagtcaccttgttagcataaaccatcagaccctgtgacctgggaaattcccaagacttagaaaagctagggtcaaagtccagccaaagtcaccattgcatgagtcccctccctcccaccactgctatctagatccttctacacagcaccccccccccaccagtcctctccactgacttggagagcattctagagtcaggttgggaaagctagggacacaatcctgaacagccacagagttcaggaggcaaatgctggttcagagcccctggccaaagggttgatgctccatctcctggtggaagaaggcactctggctatacaagcacgacttgtagctcaatctcccactgtctggatgagcacctgcagcgtatcacacatgagctgcatggccctgggcaaaccaccttccgtgtgccactttccctctttatggatatatgaacaatagcgttcaatcaagtttcctgtagctgtcctatgaagtgacaacacagttgatggtttaagaccatagagattctacacagttctgaagaccaggggtctacagtcggggcataggcaggcctagctccctctggagacaccacaggagaattttcctgactgagtacctacagcttctggcactggtgattgttggcttgtgactgcagccttcagcctcttcagacagccatattgtagtagtgagttgggctacacctctttggctcccggcagatcgtatgcatgcacgcatgcatgcatgcacccgcccaggacctatccaggtttttcaagtggaagacacacatatatgccagttaattttaaaatgccttggctacctcaaaggctgggcactccttctcctgctaccccatgcccaattggggaagtagccagcggcactttattcttatatggctcattggttttatctcttgtggctcttacctccatccatatcccacaacttcatggtgatctctcctcccctccccctccttccccccatggcatcttagccctcacaactctaagggtctcgccctgtttccctcttcccagccactggctgttgacatctttattgtttgatcaaaaacatatcagagacaaggacctttagtgtttggacgcacagatcccctattaaatcaaaacaccagaaacaatctccaacagccagctgagcccctccccccaccatcgatagcatttacaccgtgcctggtatttttgtgaacaacacctacattccccatgaatccagtaatggaggggcttgctggagagccaagtcagaggtcagggggtcctgaaggagctggaactgaatcagccattcaaggaaaaagagctacctacactcagcgtgcatggctggtgggtgtgcaaaaccattgcttggaggataggtctagcgttttcttgaaaaggggaacatactcttacatgacatagcaggcactggtattttaaccaaatgagcttaaaaccctgcacataggcaattatagcagctttattcatgatggccaaatgtgggaacaaccaggatgcttagctggtgaatggatacacaactgctagattcagagtaggatccagtgataaagaaacactccacaaaaggcccggggctacgcattttgaatacatgctgctaagagagcaagtcagttggaaaaggggagatcctacaggagctgactctgatgttctgggtacagtcaaacaaagatgagtggttgctcagggtagggagtaaaggggtgaaaagtccaaacacagacttggggctgtgaaaataatctcgtgactctgccgtggtggatacacatcattaggcggttgtccgagcttaagagtctacagcattctgaagtcagctgtggaggcttcgagacacacacacacacacacacacacacacacacacacacacacacactcacacgtcaacactggccacctgtggtaggagacagactgctctggaggtggtgagttttaagagtgggcaagtctgtgtctgtacggggtggggggagggttagggacatacggacatgttctagttttgctcgggtctgctgtgaacccccaaagcactctaaacccaaaactgtcacgaaaattttaacaaaagaaaaaaagggcagaagcctactgggtggggatgaagccaggcatatcaaggcatgttattggcacaagttggccaccagattggctgtgaggtggggatgttgctgtgactagaaaagccggtttgggccactgcaaatatacatcacttcagttaacctgaacacatgcatgtttgtttatttcccatgaagtgatacacgggaggcgatactgagcctgcagtagggatcagatgtgaactccatgtttgcatacttgtgacccactcttccagcccacataaagctcttctctggtacttcttggtgcccaaaccccagtgaagggcattagatgctcacatccctcatttcctccctccctccnnnnnnnnnnnnnnnnnnnnnnnnnnnnnnnnnnnnnnnnnnnnnnnnnnnnnnnnnnnnnnnnnnnnnnnnnnnnccctccctccctccctccctctccacgtccctctttgagcttgggagcaagagccaagtcacaccttatgcaggatcaggtttgatcatttgggagaaagtgattcaaacaggcagtgctagccagcttctcagggttggtatagcatgcttggcaggtcacaaaagttctaggtgacaatctagtctcacacttcctcgcagggggcctcagaggagctaataagagtagggtaccgcctgcttctcggaagatcctctgtttggtagtttgaagggacctggctctcttgtcccatcccaactatgtgactcctgctgtcagaatgggattataagtgtgattctttttttcacttggtgaagtgcttttttgaaggagagggggacatgtgtttgtctgtccctttacagtgctgttcttggagctggttatttgggaagaggtgatggtgaggtaggggaggcagagaagctgtgaacagcgtggattctctcttgggaggaaagggaagctagctaggagcgcctgctggcctgaggccctggtgaggacatgtctttaccctgttctttctgtctctcttggctcctgtgaagtgagcgtctttgggtaccacacactcctaccacgacatcctgtctcacaacaggccaaaatcaatggagccaacaaccatgtacaatagcatctgagtagcatgtagcatgtagcatgtagcatgtgagaacccataggaagcaggatgtggaggatgcagggactgggacgtcaggtaggagggaaacggagcctgcttattttaatacacaccaggcaggaggccttttgggaatgtgatacctttgagctttgcttcgtttgcttgagacgggctagtcctaggctgaacttgaactagctatgtctaagatgaccttgaattcctgctaccttccatgtgctgggatcacgggcatggcccaccttagcagtttttgttttgagaatgttttgggaaagatggcagcttggtagatgtctcatgtatgtgtttaatgtggtttgggcatggacccagagtccaggaaggccaagtgctgacccaccctgagatcgcccagtcacacttgtgcccacactggtgatcatactgacacctgtgctgagggagcgctgaacgacagcagggcagggagagccaggcaagctggcggcagttgggtgtgctaggctctccgagccaggccactgggaactttgtggtgagggaggccctggggaagttgggagattttgtttgatttttctgttgcttactggatgggcatgaggtcagagccaaccgactggcatgccagaggagaagccgatgttggcggtttgccccacctcttccctggcaacatttaatcaccgaccaactaggaaacaaacttctgcctgtcagttcctcatttcaccttagtgctgtttccaggctgggaagcgcttttggccctacgaaacctccaccatttagactcatttattatgcatgtctgtcacccacaactgttctatcctgtactgctgactgataatgggttttgagtggaaataaatcaaaaccaaggacttgcagagagcatgttcattcacgtattgggcaaatctgtgtgtgtgcccaccatgttctaggcttgggacttgcttacacgctgtggagaaaacactgtcttaaaatggtgatgtacaatagcctaggagaggctgactcggaggtgagtcggagtggctgctttgcaggtccaagtgacaggtgtctgcagatagacagtcttgaggagataattgggatggctctcaggggtttctaacccgggcagctggaaacatgtgacctcagtttaccaagagataagaagggaggtgaggccatgtgaagggcagggtttcaagggacagaaagcaatcgattggggcattttaaaattcaaggttcttgtccagtgcactggaggaacaacgtgtgggacaagcaactgcttgtatgagtcaggtgtcttacttacttctatataaagttaggtctattgcgagatattatacatcagtattctgagaacttctgttagcggtgctttgagaggtaaagtttgattcgcttctgttaataaaaccttgtttggacccaaatgacactagtgtttcgctcactaaggggacatagttctctttctgtgcacctgaaacttcccacggtgccacttcagaggaacgctgaaagggaaaggcaggctgcatgctaagcccttccacttggggggacatagagaacacaggaagcttcctcagacatcgcccccctggaaacacaggaactggggatccagtgaggaacaaccagccactgggttccattaggaactgaggtcagggctcagggtttagagctgcgcacattcctgttactgtaacaaatgcctgcagacagccacctactgagagaaaggggccacatcagaccacaggtgtggaggtttcatttcctgactgcggttctggctctgggactgcagctctggtgcagctcctctctgcagaggagagagagggtgctggagaacagggctcaggtttctgacaattcctgtgtgctcccagtaacccggctgcccctgcccccttacagcctaggccctgactggggattaggtcattacggggtagttacgatccaaaggacagttgtagatcatttttagagacgagatcaatgatcgttctgagcttttttttcctttctgctttgttgtttccagatgggtaagattctggctggggtgtgaagtctccattgttcgatgtatctgcaatcccttaggtcattatagtgtgtgtttgtgtgtgtgcactcgatgtgtgtgtgtgtgcgcgtgtgcatgcgaatgtgtgtgtagctgcagtgaaagtataacgtaaaaacaaaattctaggcctttaggcccaggcttgagaatgtgacctctgtgactcaatgctccaaggtatgctaatcataaaacagatagtgccattccttcacccacctgcttcctgggttcaaagagtgttcattcaaagaaagtcaccctggccattgccagaacccgctatgcaaatgtgctattgttaggggctcttagaaactgtcttgagagataacctgcacaattaccaggtattccttgagactcttgtgactttgcacttccttgggactcttaactggtatctttggtattttccaatgacgccctccctacttccttgagttgtggtttctttctttaaataccaccttacccagctacttggggcgccacggtcctctacccctgcatggtgtatgactgtgggcccgagagtgctcttgaataaaaaaaaatcctcttgcagtttgcagcaagaccgtttcttgtgtgtgatttggggtgtcacctctcctgagtcagaacgtgggggagtcctcacgttgtgggtctttcagcagcatgtgtgtagagggcactttgtgtctatgtgggttctggggctcaaattaaattgttagggttccagtgcttttattgttgaagctgtgtccttggtctagaaatcaatcaatcaatcaatcaaccaaccaaccaatttctctctctttctgtctgtctgtctgtctgtctgtctgtctgtctcagatatgaaactagccttcagagacttgggcattctcctttacgtgggctgcagtgggagtttaacatcttaggtgtcgtcacccctcttccccatgtccattcttgtttaacttgtggctctgagcattctgtcattagcggtgtgaacacagacacacttcccacttatgcagtggctaggacatcaccgggactcagggtcagggacacagacaatcttccctcccagagctgctctttttttaatgtttatttccagggtgtggggccttttctttataatagattgtaattgttaggtttggcttctgaaagaagtatgaaatatcagactggttcaccagagaaagcgaaagagcagtgctgactgaacaactatcaggtgtgcacagccattccaaccctaacgcactgagccacacatcaatagctatcaagtaatgaaataatattttagtttcatcatacttagatgcaaaacaggaaggtgagggaaagaaaggtggagatggcttccaggatacgaaggagggagaacggaggggatttactatctcgtcggggaggttagtgtttgtctcttctacctgcatgcatggtaaatgtgaagttcatggacactgagtgtttgcatctgggtgatggagacaggatcacgaactgttccctaggacaccgaacttctgagttggcaatccttccctctctagcacactgagaaagcaggtttcagaatctctcaaatttttaggaaaagcaacagcagcagcagcaacaacaacgctagattaaagatccatccccttcagtgaacccttcatgggagagacaaccacccaccccccagcccccagacggctcctgtccctctgagctgatggatggctgcctgtgtttggcctgcagcaaggtgaagcacacttcaggctgcgtctcagaaagatgtggccatctcccttatacaagatctcgtccgttcagcagctgtggattgcacgcctgtcccaccaagcactgtgcttggtagcagaggttgtgcgttgcgtgggggtagtcactgctctgaaggagttacaggcaaggacaaagtgaaagctatagcaagagagaagggaatgctgagagctctggaatcaagagttggctcaatctgacagtgacctggggatgttgactaaaccctctcagagataaatcctctcagaatgaacgcacagtttgaccatgtataatcacctactgcttaactacagagtattctgagagattgtcaccaggaagttttgtcactcagaatcttgtgcacacaaatcaagatggccagtggtaccacttggcgttttatatcttagggattaccatattaccagttattgtccaccagaatgtccttatgttgcacatgaccacatatgacttaatgcatagatgatcaaagatagcttcttatcctagtgtgctttgcttgacagcaaattaaaccatgtgtctcagcctggggctttttgagatttgggtagtgagagagcctgggagaagcaatctgtggtatcttatgaaaaaaagtttgagttgagcgtgtgttgagttcatatattgaatttaacactactccctctttataatgttgctacatacgatgcaaatgcagttaactgtgcggtctcattggacagggttaccagtgctttcctacgtcatggggcttgggtcttgagtttgaactcaggacctgtatatgctaagcacttgtttggctacttttctatatacacccaaggccctttcttaactattatatttcttccccaagctgattttacctgctgattgaaaacaaagctcaccacaaaccatattaagcctttgtaagcctaaaaaatgctaataaattccacttagaagtaccggatggaaaatacccgatgttctactggaagagagggctcaggcgtgtaggtagtgtctcagacatgtctgggagcccacctacattgatccaaggcttgcaaggtgacaaatgtcctgaaaactcttggggagggtgctaagagagaggtgagctggttggttcctcagtgatcaactcactgatccctcagaatctactgggtggacgaggcaggggcattggcacctcttgggacccccaaatttactttggaagtccttgtaatgtctgctatggtcttggggagctgtcatagctctgagccaaaaagtctgtgcctttggagtgtcctgagcaagttgcgtggaggttgactgaacaccttgctccctggagctgctgggtgctctcctctacagaaacccctgagcagcagcttctccaaggggagagcttcccagagtatgcagtcccctgtaaagtgtgcactctcaagagagacaagaggaaagacatctgcttaattcagtaatctcatctatcaaggctttctagaaggacccacatttaattgcccaagagagacacatgtatattccctggccttctgaagctttcgcacaaaagatgatagattgttcctgtgagtgggggtgggggtgctgggtgggtcggtgggtgggggacagacaggagagggctgagcttccatggacagtggctgacatttgtcatcccagaggatctgcagcatctttagatgtccttccatttgcccaaggctgagagagagagagagagacagacagacagacagagaaggagacagagagagacagagaccactcactggttagcagtcatatatccagaaagcagccacatctatgtagacattaaagctggagggttccacagcacatttaggcttctcactagagagtgcttttcagggtactgtcaccagccagctctattgcaaaggccccgagtttagaaaaattgttaataaaaggaccaagcaggtttctgtacctggtcagtggtaaatctctctctctctctctctctctctctctctctctctctctctctcacacacacacacacatgtatacatatatatatatatatatatatatatatatatatatatatatatatatgtatacatgtgtgtctatatactaggggtagatagttgacacctagagatatgtagtgataggtcacaggttctgactgagctggtagaagtagagagggggtgacagaggctggtattaagaaatcaagatatggtgtcttgatgtcagggtgctctcattgactgcctcccagtgtgcagaacgagagtgggggagggaggagccggttgtatgaacgagcacagacttaacctttctctgtctctttgtccatttaaaatacggagggtgacaaaacgcgctgaggcgagagtctacttagatgcaaacgtgggggtctgagtgtgttatcaatccctttaactttgacaggtggctcaacccgctgtttaaaactggtcataagcggagactggaagaagatgacatgttctcagtgcttccagaagatcgctcaaagcacctcggagaggagcttcaacggtaagcagggggcggcgggaggaggtgaagcctgagtgtgcatgcgcagggtggccccttgctcgcagggtggcttggaggaggtctgacctcttcccacgtcccttgctctgtctggagctttaatgtccccacgttgcacgcctcccttcaggttgtcctgtcttggtctgacttagtgacttggggaaagaaaacctgggttggggctctataggtcttgatggctgagatctgtccctggggctggtctcaccagagcagtaacctgccctctctggctgccagggctgttgtaatccagcagagctcggcagtgacctgtccccggagatgtctccccttgaggtctctctttctggtgcaacagagtctgcctcacacatctttctgggtccctcgggacgagccagtgtttgtatagcatctgcggggtagccctgtcataaacacttacctgtccttctgcccttccgttttactcaacggcagtcctactgttcctgactccgcgtttgtctcactgcaggtactgggataaagaacttctgcgagccaagaaggactcgaggaagccctccttaacaaaggcaatcataaagtgttactggaagtcttacctgattttgggaatttttacgttaattgaggtaaatgttagtcatatcctgactgctgtctctgagtgggtttaccaggaggaggcgtggagtcctgacggtcgatcattgttggagtgagtggggaccagcaggcagaatgagctttgaaaatgtcttgggttcagggaggaagcgtggtgatgctcattatcacatctttggaatgggtgatgctttggtgactgaagctgaagacattgccgtttcttctaattaaagcgcagtgctatctcgcagctgttaagatcgcttactgctgttgcagacatctggagttcagtccccagcgcctacagggtggctcacagcccttcctgaggtccagttcacggagagtctccgccatcctctgacctgcatgggctccagcctatacgcagtacacacagattgcaggtacacacacacacacacacacacacacacacacactacatacatcttaacaaatgtttgaagtccagtctcacaggaagctgacagcacctctgagtgctggtgttcggtgtgtaaattcaccttgtcctctttgatgctcatgaggaaatacatttggatcagagcccagaataaccagtgcccaataagtaattgttaactgaaccatgccagatctgataaatgccttcctgggagagtattgtcaactttcccttcccaggtaaacaagacatggtgtcatgtgcccgggcttgctgtggggccctggagtctctcaccctcctgctgaccgatcgttggctgggcactgagagctgaatctactctggccatggaccagcttcaactctcgtgacctcctgtaccattcatcctgggttcttgctgcggagcagattgctggtctgacgttgagttctggtggtatggacttagagagagctacagcgctcattccctgataaaccaaagctggaaggccatgagtccttgcagggtcacccgttagtcagatagtcggctgcccagtgggcagtgcctgtgctggtcaatggtctgctggaggggatcctggaagcctggctgtgtggcttgtccttctggtggcgtctttaagagaaaaatgttatttgtatatttatttacgtatgcgtgtgtttataccacatatatcaggatgtctaaggaggctgggagaggaggtctgagccattagaactggagtcacaaggcgggtgtgaatttcctgacagggatgctgggatctgaactcgggtcctctggaagagcagcaagccctcttcatcactggtaccctataatgggcttaagagtgttggaggtctcacaagtggctggacatcctatctatggaagttgcagctctgtggaagggtggtctctgatgcagtgaggtgaaagctgtcccaggtgtctttgatggggtgaggcaggtggctatccaagcaggagagtgcgctcttgctgagcacgccctgtgcatgttgaaaggcacagagttctgttctatggcctcggagaaaggtaatggaagtgcttggttccagagatcgaccttctggaggttgcaaaggtgccaccatccttgttccggacatgagtgctctctttgagagggcagtgcccactgcttgggtgctgtttgtagcttggagaaaggtaaccttgtgatgcagaccacatgctgccccatgttctcttctcccccagggtagtcaggcccactgtgcacctgggtggcctagacggagggaagcgtagtcaggcgggtgggtgcaggcaagaccttggtcggcagtgcactggccaagaacacacatggagacagggttggataattggttcagttgattgggggagcaagttgttttgttttatataaagataaggagagaaggaatgtgtttggtggaggtgtagtcannnnnnnnnnnnnnnnnnnnnnnnnnnnnnnnnnnnnnnnnnnnnnnnnnnnnnnnnnnnnnnnnnnnnnnnnnnnnnnnnnnnnnnnnnnnnnnnnnnnnnnnnnnnnnnnnnnnggaccagccacatgatggtatagtatagaatagagtttatctagggcatggggagagaggggttgggagggtagtagagacagagaaagggagagagagagagagagagagagagagagaggaagagagagaggaagagagagagagaggaagagagaggaagagaggaaaagaagaggtagaggccggccatgggcatgtggagagagggggaggggaatggggagaggggaagcaggaacaagagacagagcaggagcaagagagcaagagagagaggaggggcaagcagccccttttatagtgagtcaggtacacctggctgttgccaggtaactgtggggtggagcttagacaaaattctaacacaagggctatttaaacctttggggtttaagtaggagctgtctgtcctgttgagtgtccatctctagctgggacctgggtattggggatgcctcatttgcataaggaggcattccaggtgctgctggacatgaccttataaagggaaaggaagtttaaccccggccttgtggcctcctcaggtgaggcaaagcggggacccaggactgtgtgcactggggcatgcaggccccaggtgggggtggggatcctactcctgttcatttcaggataagatttaggggtttggacacacctcagccctactcttgctcggggtttgtccccccacccccatcccacggttccctggccccacgagtgggggtaacctgagggtgggagagagtgcaccctcaggctcctagcccggttttcggtttgctttacttgtgttgagcgtcacggggatggtattttttacatggctgcagaaagtctgagtttaaaatgaatagcacagtgagctgctgtctctgtagccgccttgcagagtttcccggtcaaatgcgctgcacaaccatggctagtggaattcctctaggaagctccggagtctcaatatgtgcttgggggcacaaaacagacatctgctaagtgccacagggaccaggggcttcagggtggcttcacataggtgtgccatttcttggcgcatccatctgcccccttgttctgtagtttacagctgtaatcaggcactttacattctgaaagcatcatggtcttgaagcaccctgagtctgggtctgtccctggcttgtggttgtccgtggtgtcagaggctgccctccctttagttggagtcctgagccccagatgtttacccagctgacgtgtcacagtgagtgtgggtcccgcttagtaggtcagctacagaggtgcaggcagcagcagctgggcgagagaggacagctatgctgaagtgatgtcagttttgtcccatagtgatcacctttggagccgggaagggcaggaaggcaggaagtcctgcgacagcacagtccgtggaaccctggctactcttttaggaacctgcttattgaaaagtcatggcagaagagtagagaagggggttcctggggaacccggacattctccccaggactagtggcagcgacagtgacagtaatactacttatcagcaggaccagcagtgttcatactctgaagctgtagtactctttggtgttactatcagtagcaatcaatactcctactgtgctggctagttttttattaacttggcacagcgggcctcgtctgaaagtagggaccctcaattgagaattcctccataagttctgtccattgggcattttcttagttagtgattaatgtgggagggcccagagcattgtgggggctcccatccctgggccggtagccctgagttttgtaagaatgcaggtggaggaagccagaaaagcaagccagtgaggaacacccctccatggtctctgcagcagctcctgcctctaggttccttccctgttggacttcctgtccttacttccttcagtgctggagtaaggatgtcgaagtgtgagccgcataaaccctttcctcctcgagttgcttttggttttttatggcagcaatggtcaccctgactaggacaatggagtgcttcccagtagtggtagtagtagtgatagcagtattactaggacccatgctcaatgcggtgtaggtagtttggtagtaatagaaagctctgaaccacgtgtccgccctttatccaagatgctacttttatcccagtttttaggaactgggtgaggtaggaggtattcttagtatcagtcagtccctcactacgagcttgtcagtttctcgtgctcagggccaccccagaaataaatgaaagagctgagtttctgtttcaggcgctctgagatgagcccaggccttctaggctggggctgatctaactaaggtcaaaaactttgcccttagcatcccaagtggctgctgtttgatcttagcctagggataatggtgcagagatggcctcggggcagtggtggcacatgagtttgtcaactaggatgcggtccaggttacagtgtctcctggggtcacaaagtcatatgcagtacaggaaagtggctgtgactggtgaatcagtgtgtcagtgcggtgtgtccagctggacacccatcaccacctgtggttgtctcacatacctgttcagcaccccctgttactgcactcagcgactggagtggactggtgtgatctgggatggcagtgcgattaggagaccctgatgccccgggcagaggctgacagctctgtttttttaatgagcccagggtcacagagtatgtgccatttgctgggacccagatcaactgctactgagggcagctcatttgctctggcttctgacgctccgtcctgttggcctgccgggtcagtccaggcattagggattaggatgatgggtatggtagtgcagtgtgggagctggtgtgggcaggctttccctgtcagacctcttcccttgccctgcctttagatcaggtctttgttggtttatgatctaatactgggcatggatgcttcgttcccttgatggacccggtgaccagtcctggaggtcacagtgacattgtgtctctaccatgacgactagcagaccttctaatgcactgaaatctggggagctaagagtcatttgtgttcggataggaaaacctttctttcttcctactccctgccagcaaaaggaagcgggctttctaatacaaatactttcattttcatggactggttggcctattgacgctgctgatttggagaagtcagagataattttatatggggtagctagcagtgatccagtcacgtttcaaaatccacgccccgatggatagggtgggtgtggtggcaaatgcctgttactcaattagctgggaggttgagcaagaggaagagagagttgcaggtcagcctgggctactgagtgaagcctgtctctgaaagccaagacaccacgtttggatgatgtttaaggttacacctgttatacgtgctcctttatgcatggctgtgatcccgttcctgacaaacgcaaacgaaggcagaagtgcttactccggcttggtagtaccgctcacagtctgagggagcacatatctcatcacggatggtgagcgcgttggctagaacaggagacagttggtcatattgcgccatagtcagaaagcagattgaagaacccagctctctgctcattgctgtcttcacatgcttgcccagaagtttgtctcctgggtaattctgtatcccgtcgggttgtcagtcactattaaccctcacaggttgtgtgagccacatggggtgagctgttagattaacagctggttttacgaggcgatttctcatttagtgatctcggctccgtgttgttccgctggacttttgagttttagagagcggaaggatgaacggagtgtggcatcttgtctctctggtgcctcaatagcacaaggaattattctaggaagacagcacagctgtgtgagccacccaccccagccgggccttccctaggtgctaacggagctctgccagagaaaaggtggcgaggaactggtgcagaagccttgcgtgggatttctaggtggtgctccatgttcttctgtgaagctgaggactgtggagaaaccagcatgatcgtgactttggaacacacccgtgcaggtcagagaaagccagctcggagcatcgagttccccgtaatctgtcccttgtgtgcacctcctaggaagtgccatggggacagagatgactcaccatctggagccttactgtaaagggagagtctgcacagcctgcctcctcacgtcattcaggcctggattttgagttatgaggtgtcttgcctgtgggagagtgaagttgggggcatcaaaggagcctcaggggactctcctgcatgtggagccagtcgtgggcaaggcacggcatggttgtttaagtcttttttttttaatatatatatttatttattgattatacgttaactacactgtagctgtcttcagacaccccagaagagggcatctgatctcattatggatggttgtgagccaccatgtggttgctaggatttgaactcagaacctttggaaaagcagtcagtgctcttaaccgctgagccagttttccagctgtttaagtctatatatatatatatgtttatagtctatatagtctgccagcttcatctgtgaagttggcctttggccaagactgtttgtttgtttgtttttgtttgtttgttttaagacaaggtgtctctatgtaactctggctgtcctggaactcactcttgagaacagactggccttgaactcagggatctgcctgcctctgcctcctgagtgttcggcccactgcctgaggacttttctctttttagggtttacttttattatatttgcatgagtgtttcgtctgtctgcctgtctgtctgtgtaccacatgcatgtagtacccatggaagccagaagagagctttggaccttctggagatggtgttggagactgttgctaacatggtcaaggctttccccctgactgtcgctcgtctgggtggatactggagtataggggatcctggaggctgccatctgaggtaaccctgcccttatccaaggtcagaggtcagcagtcagttctgcctgtgcctttgcttggggttgattcctgagatgtgtccagggatgcatttcctggctctttttttccaagtggctccaactttcagctcaacctaggaggccattgatagagaccaagagggagatgacccaggcagggagaggtggaccacgccttgggaagcaggtgtggtcagctgtgtgtgccccgtgggttcctggacactctgacactagcttatttagtgttgacagtgatgactctgagtgagaacccagagaaaatgcttttaaacactttctttaaaaagtcagaggatccattgcttcactggagaaaggttgtattcataatggtaggagattgagaccagccattaagacactatcctcaaatggggttctccaggcaatgcccaggaaactctgctttcataaattaacatctcttgacaatccttgtgttctgctaagactgtctgcaagcagtgggatttgaaagccatttgtgaaagctgatgtcttagccactaattacagtgtttcctcaggcctttgaattcagcttaatttttgaacattttgtgcagaggattgaacacatagctttgagtgtgccaggctctccctctggcactgaggcagcctctctcacacctccaggggaggcagatgacctcggctgcaggtggtcggctcagaaggggttttaactctcctgtgcccactcctcggagggacagcgggaggagggaacttgcttgtctttactctgtttgatttcttgctcagctgcttgctgtcagggccaagggtcatgggacattttcttttttaggcttttaggaacattccaaagccacacgaccagaatcagaaggccctgcttgtctctaagccacgcacctgtaacttatcagctcacattgagacttgagtcacccagggccctgcttgctccgttttgaagccgttcccacatatcacgcctgttatctaagaacagttcaatttgtacctttaagagctgagctttccctgtggagtgtcagcaccgttgcctgcagacgcattaactcaagtctgtgcagacagcgtgtctagccatagctcatttccctctcttagggttttgacctatattttattgattcttttgaataccactctgttgccaactagggcttttgggctcaagtgttctttctgcctcagcatcttaggtagttgggagtacagggcaggcatcagtgtacctgacattcattcattcattcattcattcattcatttgatgtatcttttcttgtgactatgtttataggtatacacgtgagtgtgggtgtgtgtccaatgtgtacagtgtcagcagatgtcagaagagggcgtaacgaggtacagatggttgtgaacctccctacctggctgctggaacttgagctcagacccttggcacgggcctcatgcactcttagctgccagcccaattcccaaacaccgtttttcctagactgtggactggtccagtgaggtgcatctcgttgacaaagatggctttggattctttttatttcccggtctgcccctcactctgcagttacgtttactgtctcgctgtttttgaaattgagagcactgatttgcttgtttagcggaggttcccgtcgcctgggttggcccagtggcattgccctcctgagtcattgaacatgttccctgccaccaggagttgtagataagaagtaaagtgactctccagaccctgcagtatgacttaatctgcaatgctgtgtactatcactactgtgtgctaccattactgcaaggggcctagcatgtgctaccatcattacaagggagctagcatgtgctaccatcactgtaagggacctactgtgtgctaccatcactgcaagggacctactgtgtgctaccatcactgcaagggacctactgtgtgctaccatcactgcaagggacctactgtgtgctaccatcactgcaagggatctactgtgtgctaccatcactgcaaaggacctagcatgtgcttgttgtttccatgtgtgtgatgctaggagatgttcatgatgaaggggggctggctacatcatggtgacgtggcaattatcttattagctcgaatcttctcataattggcatgtctgccctggatagcctttaggttaccccggggtacaggatgtatagaaaaagcaagggaatttcttactacttttctcctaaaactagttttcaaattgggagtggttctttttttttttttttttttttggtttttcaagacagggtttctctgtatagtcccggctgtcctggaactcactttgtagaccaggctggcctcgaactcagagatccacctgcctctgcctcccgagtgctgggattaaaggcgtgtgccaccaccgcccggctgcgagtggttctttaacgttctccactgaggccgatgagctttttgttggctcagataagaggtcatttttgaagaaggctgctgttcttgttttctgtgctgcatccctattcccctttaagagatgatcgtgttaaagccttttaaatagtgtgtctgtgtgtttgtgtacgtgtgtacaggtgagcgcgctcaggtcagagaaagtttttgtgagtcagtgtgctcctccctccatgggttccaggagtcacactcaggtcaccatgcttgcaaggcaagcccttttttacccagtgagacatctcaatggctagaggtcacttgagcagctagttatgaatcatcttttcctttaatgagcacagtgctttcctgaacgttgactttcccccgctgggctgagctgcagtgcttttgctttgtggttttggaacctctgggttcctgtgtgctcttgtttgatgcacgccgtctggaagcattcctcactgaaaccaaccatggtctcgaaatttccacacagcatgtccagcatcatccgtctcatccagggacggggcggggtagacagtagtgatgctcgcccgtggctggtttctgctttcaggaacctcctatgctagggacgcgcaggccccacactccctgtcactggaatctgtgattagtggcttatgcgtgtccacctgctttgtggtctcacggcgaatcgaccatgcatctcggagatcttggtctgacactttccccagacccgctgtactcccattgtctctgatctttctccactaaagcttcgtttcctgttccctcctttaagtctgccgcccactcccttctcccacaggttcattgttttctatgtttgggtttcactacagcatgattttctctgacagcttctttgttttcctttttatgacaaagatcagggactgtgaaattggacaggaagaatctcaggtcccaaaggaacatgaaagaggccccaggccctgtggggacaatgtcccatcaagccctgtgtagtaagttactctgcaaagcagagcggtttgcccaagtgccaagtgatgcatgcaggctgatgaccaaatgcgccattgagaaatagctgccttcaggggctcagaggcccacacagcggtgtccaaacctgggcctcgtaccccacgtagctccgaataactatgcctgagccccaacacaaaattgtaaacttagttaaaacttttttaacttcttttttcctgtgtatgtaattcttttttctttataaatggggtggggagtctgggagacgggattgtgtggttctaaccaaattctgtaggtgacagtgtggacctggactcttagcactttcatgagaattcagctgaacgttttggtgacaaagggcaggaagctttttgggtagggcacagaatggaatgtaagataaaggtaggacttcctttgagacagccttttctgtgtcgttcaggttagctccaaactcttatcttcctgcctccacctccaagttctggggttataggcttgtatcaatacgtggagaaagttcagtacattttcattgtcccttccccaggtcccaggaagcttaattctgttcagttagaagtttgacaagcatttttgtagttgcttcattgtttcttcctaggtgagggttgggattagacctctctaatcctccagctcattggaggagggtaaggcattggctaacaccgacccatcaagagcccataaacttaaggggattgttagaaggcacaacccagctgggacagacacacagatgattctgcaaaggagacctgcctctagtggctacctcttttcctgtatttaccaagccttctgttgttttctctgacactctcatggtccacgattcacacccagtcaggagaattgtgcagcagacgacaactgcaggcctgcatttggagtctcaggcaaagtggaaagagttacccctgggctcctggtgaagggtccaggctagcgtgctctggcccaagctgtcctggcccaggtttctgtgtgaacagcatggcctccctgactctcaggcttctgtcttagtgagctctatccagccactgtgatcacggtgtcaggcactcttgtgtgactcttgtgtgactcctctgtgcgtcctgatttggtgacaggtgtgaaaaggagcctgagaccctggggtctgatgaccttgtgaccttcactgtaactcttccattgaagtagaatgtctttctgtatagttaatagatccttctgtgacttctttggaaggctgtgtgtgtgtgtgtgtgtgtgtgtgtgtgtactcgtggactcgcacatgtatgtgtaatacagattgtgatatttggtgtgatatttgtgactgaggcatctcctgtaaatgtcctgattggggcccagttggttaggatgacccgttagctttctgtttctgttattcctcttctctctctccgtgctaggtctgggttaggctcctcacttcgtaaggatagaaaatggccgtgaaaagcaggcttctcggctgtctgcctgtctgtgttgctgggaaggaaaaggtgttcaaagttaagtgtttgaaaggtttccaagcccggctttctgtccttgaggaggaggaggaaatggtttgggcctctgtgtttacttttggtggcttggatttgcagtgagtgtttgcttttctttcctgggggacggaggaagtgggttaaggagggtgagtggcctgagtcaggaggaaactcaacaggttgggtgctgagttcagattcttccatgctggccagaaaatgcctttccctgagctccagtagacaaatcccagatcctcccacctcactggcgtagggttttaatatttttgttttagagaatggatggcgatgagaattgatttataatcatcatcattatgtgtctagtgatgtctagtgctataaggctggtagagaacaccgggctgatatcttttagccagccatttatgacatgttcaagctttgactccaggttgcccgagtgaaggtgctacaggaggcacacctcagtgtctaggggatggaggcaccgtaccgcctccctggggaccttgcaagccttgcaccttttttttttcatttttttttttttttatttattaggtattttcttcatttacatttccaatgctatcccaaaagtctcccatacaccccccactcccctacccacccactctcacttcttggccctggcattcccctgtactgaggcatataaagtttgcacgaccaatgggcctctctttccactgatggccgactaggccatcttctgatacatatgcagctagaaacacaagctctgggggggggggggaggtactggttagttcatattgttgttccacctatagggttgcagaccccttcagctccttgggtactttctctagctcctccattggaggccctgtgatccatccaatagctgactgtgagcatccacttctgtgtttgctaagccctgccttgcaccttttaacacactcagtagaaggtctgctgtgtgctgtcatgcagagcctgggctgagaaaggttacaagggtctcctttttgacctgggttgtgtagatattttagctgatagtggcaggaggagaaggaggaggaggagggnnnnnnnnnnnnnnnnnnnnnnnnnnnnnnnnnnnnnnnnnnnnnnnnnnnnnnnnnnnnnnnnnnnnnnnnnnnnnnnnnnnnnnnnnnnnnnnnnnnnnnnnnnnnnnnnnnnnnnnnnnnnnnnnnnnnnnnnnnnnnnnnnnnnnnnnnnnnnnnnnnnnnnnnnnnnnnnnnnnnnnnnnnnnnnnnnnnnnnnnnnnnnnnntttcctttttggctacttccccgcctccctcccactctcccccaccccttatccattttctgaaagtatttttttgggcggggggggggggggacgacgactgacagttgtgctttaaacttgtgttgattctaacttgtgttgagcatgcacctggaccaatcacagtgcgtggatgtctttgagcctgtgggttttttttttttttggggggggggttgttttgtttgtttgtttgtttgtttttgtttttgtttttcgagacagggtttctctgtgtagccctggctgtcctggaactcactctgtagaccaggctggcctcgaactcagaaatccgcctgcctctgcctccccagtgttgggattaaaggcgtgtgccaccacgcccggctatgaacctgtgttgagcttctacactgaccaatcacagtgcgcgcatgtccttgagcctgtgacttttgagttcaagcaggttacaatgctcacttgctgtggtcatgatgatcgcagtttcgttccccttgggagggggcaagtgacatacgggtatgaagcttgtactgagcaatgttgatgtggttttatagctctaatggatgctatttgttttttgttctaggagggcactcgagtagttcagcccttatttttagggaaaattattgaatattttgagaagtatgaccccgacgactcggtggctttgcatacagcttatggctacgcagcagtgctgtccatgtgcacgctcatcctggccatactacatcatttgtacttctaccacgtgcagtgcgccgggatgaggctgcgggttgccatgtgccacatgatttaccggaaggtaagtgacctggcttgtcggacatgtccttcatctgaagtttcccataagttagagtcatgtaatgaactgggtgttatggcccatgcccgcactcgcaggaaccggaagagggaagatcacaagttcaaggccctctcagaccacctgacaaaacctggtcataaaaaccaactgtttgaaccacacacgagatgcttgctgtttggtttgggctttagaatatattgttgttattatttattctgcaaactttccctgctataacatggaagtctcttttcgctgtcagactgtggttgcttatggtgcataggcagtctgttggatttagggtgaaatctaggttaaaaaaaaataaatgcagaattgattttttttcacagctaaatcttatagcttttcctttgacaagtcttgtgctgttcactaaagtcttcacggcatcaatgttgtgccaaacattaaactctgggggagcagggtctgtagaattcaacctaggagaacacagtgtctctgagaaaggaaattagggatttttatctttcacatgcttctggagctgtaggtgggcttggctgcctgtacctgtgtacccacctgtctctttttctatgtgtgtgtgtgtatatatatatatatatatatatatatatatatatatatgtgtgtgtgtgtgtataggtgtgaaatgtttaattatgttcaacctaatgttttcaaggaaatatatcagtacggggcatattatagtcgtatggcttggtataacacatgtactttaaacttagaaaagtagttttgggggatgaagaaataaatagttcagtggttaggagcattggctgcttgtccagaggtcccaggttcaattcccagcacccacatggcaactcacaactgcctgtaacttctgttccagggggactcaccctcacacagacatacataccggcaaaacaccaatgtacattaattttttttttaagtagttttggagaaaactttagttcccaggtaccttgtcctgatttttaaagtgtgtgtatatctttctcctactgaagtcgtagcgataggtctggtgtgatacagctttgtgctggggctgccacactattcctggctcatgcggattggaacagttgcgaaggatgtcgataagaagcctccaccgtcagatgggtggatgtgtgtcattggaagtgtcagggtctgatgactctgtcaaggctgttgtatggcaactctacctgttttttttacttttttaacacacaggcattcgtgcgtgtgcgcgcacgcacacacacacacacacacacacacacacacacacacacacacaggctcccaagagcgtgcatgcacatggttcttgttgtctgaagacccatatcctctgcaagagcatgaagtgttcaaaatggctgagacgctttgctaatttgatttagttgtgtggtggcattcggatgacatccggtgattgaagtcactcattgtttaccagtctctggtgtatctggaatgcccatggattttctcagcaaatacgaagtatccctggcacctcttcttttgagcagtcttattaatcttggcgttgtgtggctcatgcaggcccaacatccttaggctctgacaaagacagtgttctcttgatctgtgacatggatctggtaatggtgtcttaggccttcactgccaccaccatcctgtctgaggcttaatctagtaccatacaggagaatattgaagtttctccataaattgtcacggttttaatcttcctggatgccattagtcccccttgtacttaggcattttcattcccactgtggtgcacaccataattacacagtcaggtgtgaggtgtccgttcaggcagtcagggctcctgtgcaggggaattcacttgttattcttcttagtttctctgccaacacttcggaactggcctcggggaaatctgatctagcgtggcagatttgttcacctgcatgtaagtaaacgtctctcagaggtattcattggtcagtatggttatcccaggaaaaatctctttatgaagtcctgagttgctgtgctcagagattcagcctgaaaccctagaaacgtgggaaagatgaatttcctcttgccagccttgcgcaagaagtacgctgaggtgaagtttaagatgctttctttcaggaggatggcttccgggaggctgaggcgggtctgggtgtgtatctgctaggcccttctgcacgtgctcggagctcacgtgaggcttcagtgcctgatccatgatctgaggagaaatcggattgggtggtatacacggagtgactgtttctatcatcacggtagtgtgtgttgctgaatgacctcgtgggatggatcgtacataaaacggcttgttgatctggagaggtggctgggtggataacgagaatgtgcttcacatacaagtataaggaccacaccgttccccaggccctatacaaaagccaggtgcacggcagcttgacctgtctgtaatcttagcacttaagaggtggacatagggcaagttacctggttacactcattaaattggcaacctctgggtttattagtgtcttaattagggttttactgctatgaacagacaccatgaccaaggcaactcttacaaggacaacatttaattggggctggctcacaagttcagaggttcagtctattatcatcaaggtggggacatggcagcatctaggcaggcatggcgcaggaggagctgagaggtctacatcttcatctgaaggctgctagcagactactggcttccaggcagctaaggtgagggtcttaaagcccacacccacagtgacatacttactcaaaccttttaatagtgccactccctggactgagcttatagaaaccattacactgagagacagtgccttagtacattaagtaaagaagaattcataaagaacctggtgtctctgatctctatgcacctgcacatgcgtatgcaacatgagattagccatccatcatcactaagtcaactaagcaaacaaataatgatgaaaagcaacatgctcatattgggaagagggacagagaaatccattctcacactcacacacacacacacactcacacacagatagagagagacagagagacagcatagagagacagagaaacagagagagagagagacagacagacatgactggtcatgtatctactttcacagctttaataaagttatgctggtgctggagtgtcatagtcattcgttttggaaagttaccgtgagttgccagccccattcccgggagaattgctattccctctatgaggagactggtgtcctttctttactagttgacagagacacagaaggaagggacatgtcagcggcttcaggtcacatagggtttgtactttggcttcagtgtgagagaagatcagactggactgaaatggcagatctagtcaaggcgagaatgagctgaaggcactgggaccctccatccccagggcctcctgggctttggtctctccttttctcagacctcggctcagaccttcacagaatttaatttcacaaagggcttaagtaggcactgcatacacacatgatgatggtctcaacaccaaagagggtctcactgttacgctcttccttatagaatatgcaaggcacagagggtttctcccctgagatcactggcttagtcagctgggggcctcctgactttgtgtccctgaagacccgtagcagttccctgttgggactgatttctgaggaatggattttgcgggtggctctcttgcctctgaatgctcaccccgttatgaggtccgttgctgagtgcatctgtgttagtctcttctgcttgctcggcagagcagactacctgatagaatccattctggatagaattgctagtcatcactaactttagagtttcatgaatggaaagttggtgggaggaaatgtgttctccattccagcctctgaggtgagctggctctgcgcacacctcagcttctcattgtagtcacacctctgccttcctaggatatacttccctgtgcttgtgttcagttaacaacttaagtcctgggctgcctcaggggattagggaaaggcaattggtgcaaagtttggcagtctatgatatcagatccatgattctcagatcaatggtgattttgtttttattttaaactaattttagttcagtgtggactatattgccttatatttagacaggacaatatggaatgcccactcatcaaatactttggtcttttcaaagtgaggaacatcaggtggcttgctctgatattttgtctgtgtagggaggacccagagggtgttgtcaaagtgaaaccatgtggtgtttatagcaagtgatactttggcaggacttcctgtcctcgtgttattatcttaacatttgacagttagaatgaactagccgtgctttgtacactgtcgtaatagtttaacgtttttccttctaaatcttttattattttatttttaatatgagcttgcatctggcctgagtgttttgtgggacattaatcctatcaatcttctaagagaatgctaagaggactgttttaatttctgtggttagagacataaactagcaagatgagggagtcatttgctcgaagggatgttactgctgctgcatctgtgatggacatacatggcagctgcctcctgccagctggtaactcagtaactaggtggcctgagagaaactactgggtgtagatcagtggtccctaaattgtgcttttttattggattcatgtggggaaatctttaaatcacccttgttgtgtccggccagcagaccacaacctgggttctagcctggaaaggcattttggaaacctggaagagaagaggggctaggtggcgagataaagaaatgcagctaagacaggcattctgatcaaagctcaattttactgttccacacgcagttatgaagcaggggaaggggcccgattcccgccaattagtcttggaatccaatagcagggtgaccacgtgcaaggctccgaacagcaaagcggcaggttccagcagtgggcatggcagaatgattgagcgggaagctccacccctgagcaagcaggtttcaggctgggggaggggagactacatctcctcccttttgttaacaaaaataaaaaaaaaaaaagaaaaagctggcctgaggcacaaaatttatttatgctcaatagctctgcctgaattctagggctaaagaaaaaacctgtctctgtgggattccctaacttttcttatggtaaactgtatctggcgaagactgtcctttctatcctagtaaacaactaacagaaaagcctggagctgtaggctctgactttataatgctaattagtactgaataggtaacttcctagttgaattttaagtagggcgttggaaccctggctaagtttggctgaacaaatttgaaatacactttattaagaataacactgagttgatattgctccgcagttttggatgacaggcgggaaacagggaggagggggtgacgattagctccgtagtacaaggccaattggctttttattttggggtgggaggcagtgaagatagtatggtctccaacctctctcccccctattaattaagttaaataaggcaacgcttaactgaggtgatcaaaagattttctcatccgtagatgagtgggcttttaaccttggcttgggtggacattgacccgattcctccagtgggtgctgtcacgactcacacctgtggctcttggtatcttttggggagaagaggcagagccgtagatattttttggttttttagccaaaattagataccgacctcctttttaaactgggtataacccacaggaaactcagaaatggtcaagctggaccttcccctgcagtagttctctgcaccaagcgatacccatactgtattcgtatgattacgaactagtatgcacagttctgagtactgtgcagctcctaaaggagaattatcaacctcagatttagcaaggcctaggcaagaattatgtcattagtaacaccacgttttgtggctaaaataggagctggaagtcgttcctcctcatccctgtatttcccacagcctgaggaactaaggacacgttgcagtaacagcaagggtgaaaagcctgaggccagctaagggactaagcccgtctatcagaataaaaaccaatctctattaatatttgaaatatctacttttctagccctcttggtaaacctaaatttcaacttagactgaaagccaagtgctggaatgtcctgggaatcaagatagcagttgccacctgtgtgctcttgggtgcgggaggatgcaagcccgctgcattccagcttaaggtgtagattgacctgcttgaaagacaaaaatcttagagagtgaagagtaacatcacaaagcttcttttggggaagttcaggtactttattcagttgcaaattgtaaagctaaggctagtctctggcctcctgtcgggtagcaggctcagagagtagcaggaaaacagcttttctgggagcttttgttcccagctgaattctaagcacaaaaggaattttagtcttcagaatgatacttacgagaagagtcagaatctgtgtttatctgacgaattaatctctctggcagccaccgcgctccatcttcatctcgtgaaaaaacacaaaccgagcccctaccccaaattagaactggatctggacccttccattcagtgggtccttccattttaccaatgcataagaagtagaagtaactggatgccagtggcgatccactgcagactgacctttaatatcagtttgcaaaatatttagaacaaataaggtaaaggcaaggtgggcctttggtgaccttgggggatatagctgtctatagttcccttaaaaggctgaacaatgatatctggctcttttccgaaataagttaatgcctgccttcttccagtgataatcatctgagccactgctttgtgatatggcaagatattacatttaggagaaatccttgagtgtatctacattataggaaatttttgctatagcagttccataggcacatgagtcatattaaagattaacagatgcaggggcaaggagtaatctatataagtgacaaattgctcttcaatagccttttccactagctgtaaggccagcaatccttctggggttagggatctaggggaagtgggggatgtgctctgaattaactttgctaggtaatttagaatataggaatctctaacattggacagactattagaccagtctaagattgagttagaatgactggtcacactgaagaaaagagaaatcattatgactctattaaatgactaattttactaagtcagaatatacagtctctgatgtaatattgccataaagttaaaaggctagaagctagtctaaactggaaaaatgacaagcaaggatggatctaaaacatgaatttaatttagttttttagtcatttcaatcaggacactgagtcaacttacctgccagctcgtcacacgaattaatatgtttttcagcgttctgtggagaaaacctgtttttccctctcccaataagataacggttttaggatcaatctataagccaataagtagatccctttaagatactataaagcatttattacattctttgacatttaaatactaaattttgaaaataaaagtaagatttaaatagtgtgcatgggaatgcactaaatagtatgtacggggatacaatttctctctttttttgtcttttaagaagttaaagttttaaaatttcacaatacctaaccttttgaattaataacttgttgacaaaatattttaaatacttggctgtaaaggggcagtgactaattgcactttcaatcatttttcttaaggagtggttgtaactagaaagctagcaaagttattaagagtcacatgtgcataatttatttattaactagaaatatgtacaagcaattgcaaatttgagaattaatagcatctgagggatgaacaattttaagcaattgtgagctcagagataaggcattgactattaatatacaaattaaggtttgattgttcagcattttaaaacaacatctacagcacacaactagattatttgtgctgaaacaggggaaactgtgtcttaagactccgccccacagaagctagttgggcccacgtgggccaacgatcggctgggaggatgagaaaaatgactttacaataatgttttttctggccaaagaattgtcttgggcacaactaatatttaattaccaattaataacaattataaaagctttctttattttttgtaaaaccttttgtagtaaactaaaaccctaagcaataaaagtatattgtctctgaatcctttgggtgagagcaaggatttaaggtaaacttcctttgagaagcattagttaatacttttcacttaggaaacaatatacactgaaagattaaaactcttggcttcttgtatagaagcagaaacaataaaaatttttcttacataatataaagttacattagccatacctagaggcaaaattttctagtaattaccagttcactagaagcaaaactctttgaatttaagcattattctaaacatctgaatagatctgcaacactgttaaaaagaaattttcttgaacacagggaaaaactttctcaggcactgtttgcaaaacaaaggaaggccacaaggcgctctggggctgcccagagccctgcattgactcaaatgtaaaatactttttaatctgagcatcctggccctcctgtaataaggaccgattctagagaaacaatataactgtctacgcctctaaattttgatactctttcttaagatgacttacagttaaaatgttcttcacaactttagtgttgtgaaaaaattgcccgtactgcagtttcctgccaggcagcaactatagccaaactgattgtctaatctattcacaaagacaaacataactagataactctgtcacagttttgtatgagctgtatgagcgctctcataagatgattactcttgtaattatcttaattacagtatacaggtgaattaaagatcttaaatttgcaatcaaactgcaagctgcagtcaatggaacactggcaattttaaccatagttttttaagtttcttgtgcaaagttaggataatacctataaccttgggaaagcaaaacccaagtttaaaacagtttatcatctttaaaatcaatattagaagcattactatcatattatgaagtttggatgtcagttaatacctatgaattcctattaaagcaagctttactgctttaataaagaggcattgttttagatcttatcttaaattttactatttaggataggaaccacattaattattatctaaactagaaatatctttagagacccagcctcttggcctgctttatgccacgtgtcggaaggactctaaacttgagttatcaaatttaacactaaccatctgtagcaatgtaacaattattaatcttaatcaacaactcatgagctgaatgtgaaaatatgcagagcacatttttaataaaaaagaaccaaatgaagcagttacatttagaccaatcagagaatattaatttttgtagctacaatcatagaataaaaggcactttaccattgtcaaacacattagtcacaaaccatttatcagcttttttaccccgaaactaagaggctgtgcactcgcccttatttcctaaaacgaacagtttttccagcaggggtcctcctgccacgtgtctgattcctggctgaaacacgtggcagctctcggctttgcagataaagttttttataccatctttattatccaacataaaacatagaacattcattcatacagactggacacgaacatacatgaattgaacacgagaacagattggtgcaccagacattagacgagacacaaaagggaacagagtactcctgctataaggcccagagagaaatttctctctgctttttgggacattttcctccctcatgatgcagtttttattaactgcggcaatccccctgtttattaatttccttttaataagccctttcttttctcacgcctaatgtagcttcggagagccacggcctaccgcctgttacagttcccagttcctcttaagcttcactgctgaacctaagtgaaccagcgctagggtttaacgctgtctcagcttagcccataccttctccggtatgaatttcctttatcctttaattattccatggagctccaaaccagcagtgtctcttccaaaaatcctttgccgtttctcagtctcgcattggttcgccaaatgtgtccggccagcagaccacaacctgggttctagcctggaaaggcattttggaaacctgcaagagaagaggggctaggtgtcgagataaagaaatgtagctaagacagtcattctgatcaaagctcaattttactgttccgcacgcaattataaagcaggggaaggaggcccgattcccaccaattaatcttggggtccaatagcagggtgaccacgtgcaaggctccgaacagcaaagcggcaggttccagcagtgggcgtggcagaatgattgagcgggaagctccacccctgagcaagcaggtttcaggctgggggaggggagactacaaccctgatgctggcttcaccctgtagatattttggggtgatttttttgtctcctagacaaatcctagtaagcctcacacgtacattcatcttaactttcagttcgtggtggtcgcctgtggtgtacaggttcaacctcctcagcagtgagcctcctcagcagtgagtgacagggctggatttgccggattgcaggcacatagctcagtcatgcacttctgtcagcctggagggagagtcttagatgggctggttctcctgtgaaggcgtgcctaggagctgagtcaagttgtccaggtcctgataagaggcacagtggcatgtcaggtaagtggacattgtaaacctgggatgacaagagttactagacctgaatttcagtctcatttttttccctgtttcaaattgtaaacattttagataggggagcatgttaatttctcccagccttggtttcccaatctttaaaatggcataaattagactcgcttgtcttaggactcacggaggagccagaggatgggcagcagctcccttcaccaactgtagctgaataggactccgctttccagtcttgtgtgtttgaggctctcgggaggcctggccttagtttttctgggccgaggttagtttgttctcaggtagggttcctttacgtcagctctgtctgctggaggtttgctgctgctgttgtgttgaatgtctgtcaggaacagattcaagcgggtggtggtggtggggttattttggcttatgagtttggacacagtcatctgtctccgtgtttccccaactgcctcccctgcgttgcctctcctagtgaccttgttccttgagtaggccacagctacagcttgcagaacatcagaaacgtgccactttgtggagaccaagtgctcactctgtgagcctctaaggcacatcattagtgttctctcctcaggcggtgctgccctgtgcattgtgggatgccgaacaccagagtcctttatctcggagtcttgcacgctgcctgctttctgttatctgcaaacactggcctcatagtggtcctgctctgttgccttttatggtggagcaggaggagtgggctggtgtggtatgggcttgttagtccagatgtttataaactacagagctggaagctctgtctgtatagtgcagggtacggtggcaggacttgctgggcatagtccttaccttccctcggggcagacggagtgaccacatgtgtcagaagagggtccataggttttgtcttgagtcacactgctgttgtcgtggaaggtgacaggcacagtacttgagggtcttgtgggaacagatatggcctccttgaaagggacactacagcttcaactctgccctttttattttaatttttttttgcctgtgttcactctgaagtcacagcaaatgatgttaaaacatttctgacagtaaaatcatcacttcactgactgaaatgaatttccatcctgttccagcttttaaggcacctttctgggtttaatgtttgtagcgggtggctatctcctttccggttctcaaaggtgagttggcttgttttcagaacattcaaagcacaaaacaaagtcttgatccaatacacggatcgtttcaaacacagcccgcccagatatgccgcactcaccacattctgtagccaccgctgccattgttcctggaatccctttcatcttgcaaacccaaacctctgtaggcactggataccgactcccactctccattccaccctggtccctagcaaccaccatcctgatttctagctctgtgagctggaccactctccaagcacctgatttaacggactcctggagtggttgtccttttacagctggtgtatatatatatatatatatatatatatatatatatatatatcagtatcactttgagtaatgaacttggtcatgactcttcaggaccagttcctgtgggaaaatggcagtgcggccacatgagtggtcgtgatgacgtgtctgctgctccttcgagaaaaaggaaagggtttcagagattctttcctgtctgctctaagctctgagaaagcaccatcttacctgtttgtatgtcctcgtctcttcccctgcactccccagggactcattagtagcagacagttattgtctctgtccccatctccaggaggttacagatgttagtctatctacatctgcttgataaactagtctttgagcccgaaggagtggggagatacagggtttggaaaaagtaacttgaaaatgaccatgtttcctgtagagggccacctgtgctgtgttccctgtagaaggccacctgtgctgtgttccctgtagagggccacctgtgccgtgtttcctgtagagggccacctgtgccgtgtttcctgtagagggccacctgtgctgtgttccctgtagagggccacctgtgctgtgtttcctgtagagggccacctgtgctgtgttccttgtagaaggccacctgtgttgtgttccctgtagagggccacctgtgccgtgtttcctgtagagggccacctgtgccgtgtttcctatagagggccacctgtgccgtgtttcctgtagggggccacctgtgccgagtttcctgtagagggccacctgtgctgggcctttctctccatggccttgttcttcttcttgggaaaggttagggattggtgcttctgagaagtgtggtacacggtgcagtgtgcagtacttagactgcatggcctgaagtccattgttctttttctctcttggcagaagcaatgctccctactgatttattacttacaggcgtcctcaaagcttcaaacatggctttgagggacaggaatgagtgagggaaccactcattttgcaatattaaaacgtctgcattgttacttatagtttatgatgggtgaccagccacccacacaagagtgatactttagtaaacacacaaccttagggtgaaaagtaaaattgcattcatacacacacatacacatacacacacacacacacacacacacacacacaccacagactcacaagcatgccaggcacatgcaaacacacacaagacacatgcagagaaatgcacacatagacacatgtgcacatacacatacacacacagacatacatacacagacatacactcatgcactcacacgtgcacacacacacacacacacacacacacgttaccgtgcatgtttgggggtcagattacagtttccggggctccccactcccttccagcattggggttccaagggatcactcagcttgtcttggaaactgccgcttttacccacaagccacctcgcaggcccagtattttccttttgactgattctcagtaaaactatatgccattatacgccatggtaagtcaggcactgtcacattgctctatccagttgctcttttgtcctgacagaaggcatatgatgaaaaaaatactgaacatatagtccaaaatgattgtgcatatagttgttatacaggagtcggttttgagttcacatgtaaattttcattattaaacatgctgttttccagaagaaataagatataaacccattttgtagttttgtgttttagaggcaaaccagaaagaaaaacataccaggattcttagaggaccgtagccgcttgtctccttgtccctccctgaaaggttctcttctcaccaaccttatctttttgggctttctcacactgttgcctataactcagcttcactaggattgctgcggcctctccttctctttccccctcatggggcttctcttcaaacgtaggaattggtggcagaagggtgtgcatgagagagaggtctttctgctgtcttgtggagctgtcttttcgcttcggacagactgccgtgagctgtgcagtggcagttaaccgtggagccggttcagtggtgcgggtttgctgtcaccctgtactgatggctcgtactcgtcaaaacacttcttcttagctcataattaggctttctaaaacgttcccgagtaccatggacacccggggagccctgagatcctgcgtctagcatcttttctgacatcctatggttgcagagcgtggttgtccatgctttgacctgggctcccaagcctttagagagtccgacctcagggacccacggtggctttgagcaaacctcgtctctgtcctggaagtgggagaggcgagggaatgtggcggctcctgatgaattgcactctctgggatcgtcatgtgtgactgacactcagcatgacctcagagcatggatcccagggcccttccccgaagtgggggagtcaggtggggtcacatgcatatcctcacggccagacaggcgaggctagtcagcgtgtgcatgtctgatgccttagctgtggcctctggtagaagtggggtgaaaggaaagccatctatcaggtacctcatgcaggtgaatgttgcgtcgtccttcagagctggacagatctgctagccatagacagtcagataaagcaaaacagaaaagaaatccctaaggtgccagactatcagactatagcgagaggcaggttgttggttttgtctgcggtttttcatttccctgaaccagtttctctctccggaatgagagggcacaagcctggcctggtgcagccgttattctcccgttatgctcatcttatcgctggaggatattgggcagtccctgcagcctccctttgagaaacagcacagccgcttttagttgtgcaatcatgaagagggcgtgacagcattactaagcatctccagccagtaacatcgggaaaatccaggtggcctctgcttcagcgagctatgcagtcgccctgcatagctgcctgtcccagtaatgccccgcttacctggaagccaccttatctaacagactggggtggggtcacgaacactgcactctgaaggtccctcaggggtctacatgctgctgctctgccttgacccagtggtctcaatacgatagggagtcatggggactagtgtgctgagcctggtgacaggggacgagggagaatcgactgaggaatccaagcgcacaggcctgaggcattctgggagaagcctcacactgagggtcgacagcggtaagggtgagttggtgaggaatctgcagtgtgatcaggaggtgttcacacctgtattggcaggactgttagacgggggtctctagaaggtttctgtgaaaatggcagccggatacttcattagttatgagtcttccgctttagttcttctcccagttagagagtggagtctgtcaggaagggacggcctctcggtgatgtgggtgacatgaggcacatgccgctggcctcagggagcagggagagatgcgtatggatgctccgtcaggactcttttttttttgttgttgttctgtttttcgagacagggtttctctgtgtagccctggctgtcctggaactcactctgtagaccaggctggcctcgaactcagaaatccgcctgcctctgcctctgaagtgctggaattaaaggcgtgagccaccaccgcccggaaggactcactctttatgtgtccctggccatagacggtaggacggtgccacttacatgggcggtgacccacctcagttagcctaacctagcaagcctgtcaacaggcaaacccagatgtttccctctgtaattccagatccttccaatcaagcctagccctcccagactcctaaggggaaagcacaccccacccgtcctcctcggcagtcacttctgtggaagtgaaggacacttgtctcaccacgctacccacgttgatatgtggcatttatgtgcatgcttctgctttacgtttcatatttacagccaaaaataatccagataaaaacatagtttaacaatgaatgggcgggggtggggcggggggagactgtttgctttttaattttaatttttttaaatttatttttgtttatgttgtacttacttgtctatatggtacctcatgcatgcaagtgcccacagaggccagaagagggcatcacgtccttcaaagctggcagtggaggtggttatgggccatcccaggaactgaaccttggttctctgcaagagcaactagtgctcccaatcacatatgtgtgtgtgtgtgtgtgtgtgtgtgtgtgtgtgtgtgtgtgtctgtctgtctgtctgtctgtctctctgtatgtgcatatgtatgtatctgtgtcaccactcgcaaatagtcagagggcagcagaagtcatttctctcttctgctatctgatctggtgattgaacccagatccttggacttggtgggaagagcccatacccactgagtcacctcctggtgcacccgctgcctcctacccgacctgaccaggacgtatctaaggatcgtcgttcctttcccttcctgtctctctccctccatcctctccccggtgctgggatcaaatcaaagccgtgcacgtgatcggctgatgatgtctggcagagccatggcctcagccctcgttcctgtttctgcccgacggttggtttctcacctgttctccaggattttgactgggttgcatgatagtctcctatagcacgctcacgttgttctttcgattgtaaactacagaaataagaacatggtcttgtaataccagatatttgggaggccagagcagggtgttgtcacaagttcaagtccagtttgggcaacttagtctccaaatgaaatgtacagtgagggtttaggagtgcatgtcaatgatagagacgagagacgagattgcctagcctgtgcgaggttcccggtagaaccctagccttccccgattccccccgtgctcttagttactctgcaaatatccagtgggaacaaatgttaattggtagattttctttttagatttcagatgtatattttctactctagaatactgtttcattcttttcgatggtgtccacttctctcctaaaatcatccatctatccatttgtcgtgaccgtgttcctctttggctacatatccatgattccagcagttgttttatgttcctttgctaatcccacgagctggatatctatctgggcatctttctattgacactcaccctctgtgactatgggtcgctgtttttttttttttaattttttatttttctcctttgctcgttgtaacaatctctctaccatgttgcgttgggggtgttatactgcagggagtctggattacagagtgttggtttctgttttggaggttggtccctaccagagtggccctgtctgtctctctgtgcatctcagctgcaaggcggctatttccattctgaactcagtccaagggcctggccgactctgtagacagatctttatcactaatgcatggccttcctggcatcgttatcgaatggccgaggcagtcaggaagaaccttagctctgtctgggcgaaccctggcgtttcatagccattctgacctcagactcccactctggcactcagctctgcccctggacagcgaaggccttggcaaagagccattggtaaatccccacaaaaaatcccaggtctagcctctgtggctgtgacccataaactccacgtgcttctcctgttcagagtgggcatcttttttcgttggttggggaaatgcactctggttgggcagaaagccaggtgagtcctggccaatactgagtttccttccctcagggctcgaagtcctgcagtgcctgcagtcagagtgtggggacagctgcttcctgtgccgtccaagccaatggctggctgcatactggcgggcgaggccagcagactggcaccaattaatcactctctggtgacagaggacagagtctgccagttgtgtctgtgactgtcttcctcactgataatattaaaggcacgtcactgttctgttctttgcttttttccctctgatctcactgtagtgagatgggtttttaaaaatgaaacagaacatactaagtttgagactgattgcacagctctggtagcttctggaacagcctggctttccttccctgcagtacaggtggtctcagtgacaggtagccctgcatgagagagggtctgtgtcccacacagatggccactggggtctcactcatcgctgtgcgccctctgactgtgatgctgaggagacacattgcatgctgttctgacttttgttttctgtttagttgttgtgatcaatttaggattagagtatgggatgtcttttgtgtgcctcatttcattctttacttgttcatttgggcttttaaaatccaaggtctgtctttatagcgcagcctggcctctaactcaaccctcctgtctttacctgtagggtatagggattacaggcatgggggcccatgcttggttgtcatcttactttaactattagaactgggcatcaaggctggcatttgggaggctgaggcaggcggacctttgtgagttcaaggctagcctgtcgtacgtagtgagttccaggacagtcaaggctacatagactcaaaatatcaaaaataacaaaacaaacaaacaacaaaaaaataaaatcaagtattcattcataagtttgcagtgtgttttctgcatataggattgacacttgtttcaatataaacgtaggtgctaaaaatattttcacatagccagtgaaaagtcagtggccaaagtccctgagttctgtctctttctgtggtacctgtatactctcttcataatatataggctgctgttgtttttctttctctaaacatggtctcattatataggcttacacacacacacacacacacacacacacacacacacacacacacacagagaaatgggaaaaaaggggcttgaggctttattgtagccccaggttgggagagagcactaaacagaaaatggtacagtatgaaccaaattttattatattttttcttgaatatagatttttttctcatataatatattctaattatagtttcccctccctccatacctcccagttcctccctacctcccctcacatccatatccacgctctttctgtctctcattagaaaacaaacgggattctaagtgatgatattaatataaaacaaaacaattacactggagtagaacaggacagacagaaggaaaagaacaagaaaaggtataagaaacagataaagacacagagacccattggatcacagactcaggaatcctatagaaacaccaccagatatatacatatatatgtgtgtatgtaagcatgtatgtatgcattcacatggggggcagggcgtggtggtggaacctgtagggttaagaaaagagaaagaagagtaaacaaaagaaaccaaactccccagcaggacactatgagacaagacctcccagagatatggttaagttcccttcctcttggccaccctgttggccacgtggcctgcccttaagagtagtttgtttttcccagtgagattcccttgaagaaaactaaattgtcatttgcaagtggttatcaattagagattgctctggactagggatggggtgtgaatgcacttctactctcagcactagacccggtctcgtgcagacctgtgcagacctgtgcagacctgtgcagacctgtgcagacccgtgcagacccgtgcagccctgtgctcccatgtattttaactgtaacatctttattacttttttttgaaaacttcaaccatgcatgcagcatatctttaccatacccctccccactctttctctagatctctttctacctttgcccgacttcatgtcctcattttttgcttttttcttttttaaacatgaaatgccaatttgtgtttctcctatttgcatgagcatggtgtcgtccacggagtgtgtcttttctccaccttgccttgctggtctttaccttgttctgctgcctaggctggccctgaactttctgcgatcctcctgcctctgccttcccagtgtcagaattacagacgggccgtcttatggttggtaactcatgttgcatggagttacttgtattttagtgttgtttatatctggttctcctttgcctttacatagctgcctggtcattcattacctgttgccttggtgtctactgcagtctctttgttttctcttcatctggcaatgtggtgcactccagcttaaagttaaaaacgagctggagagttggctcaatggttaagagcactgactgctcttccagaggtccttagttcaagtcccagcaaccacatggtggctcacaaccatctgtcatgggatctgacgccctcttctggtgtattagaagatggctactgtgtattcatagaaaataaatgaatttttaacaacaataacaaaacaaaacaaaaacccaagacaaaccgtcttcactgttccaggttctcgttccgactttagctacttctctctcccctccaagatcagctttgggccttctctacttagccaccccacctttctctcctctgtacgtctcacaagctgctcattgatccatggcaccttcctttgtcccctgaagctgttccttgtcccctgttctcctgccaccatgccggagaaggagaccttccccagtatctgtccactgctctgctgcccgagacctcagactgaattcatcacaagtgcttctgccatgtcccaattgtgggtcctcctgtgcctctgggccctgtctctggcagatacccaagacagaagcgccgcttctctttcatttgtgactcttggagacaagcgagggccgtttccatatacaggaggcagaagccatgaccacgtgtacttaagtgatatctggccaagaattaatagcacattcagtgttcatacaaatcctgcatttttctctacttccaccgtctccctactgagctggtttactttggtaggctgtggagtgtccactgacatacacggggcatgtggccattcatcaataagaatgagttgattttctcctgcttccttcacctccgttgctgtccttgaagatattgctgttggtgccagacattagggctgtcgtcatggcttttacaccacagaagaccccatgaacatgcgtttctctttttcccgtgcttgcgagagtgttaggacaggatctgattctccactctgctcatttattccaggcactccggttaagtaactcggccatggggaagacaaccacaggccagatagttaacctgctgtccaacgacgtgaacaaattcgaccaagtacgttccatctctgtcagttcctgccccaattttccccctttttaatctgttggaatgtgagggttttggtgtagactaggattttttctgaagttgtgacataggcactttaaagccacatctcagttctgtgtgcagcataggtgtggtaagatgtgttgaccccatagagcccagttttgcttttctgatgttgcctgcagcacacatctacagtgagttggcggagagcaatattcctcccgacttggttagtgcagtgatagtctcgaggggctacctcctcatagtaatttttagcacatgacagaggagcagccagctgtctgtctgtctttctctttttctaaaggacccaagtattggagggcaggagtgtgcagtacagcccccctccatgtggtacctggttcataggaacagtttgatagggcatgtcgcatggtgctacctagctagaatttacggctctcgcccacacccgtttttatggtcggtcaccttacagattgatcactctagctttaggtcagatctgcccagcaaccattcccctttcagattttcattcatcagacatacacctcacctgcagagtgtggtaggcgccatagcataggcttttctggggagacccaggggagatgcagttcacttgtagagcagagggtgggttcgcttccacacacgaggaattaaagatcgggaccgtctctgggatggtgcagtctatccatcttataacagggaccacggtctactgttcatcgcacaagtgtagcatctgcagtgagacctacggttctgcctcagcagtgttaagcccgctcgctgagccccggttctctttgcattcttgtcttcccgtttggagcataatgttgctggcatgcgttcccacctgtcttgttttatttacagtcctaagcatgtgtgggctttgtatctgcaggtgacaatcttcttgcactttctgtgggcagggccgctgcaggccatcgcggtaaccgtcctcctctgggtggagataggaatctcctgcctggcgggcttggccgttctggttattcttctgcctctgcaaagctgcatcgggaagctgttctcgtcactgcggtaagagggacgctgggctgaagagatgtcctgtttggtaacaccagtcccctctccgcccctgcctgagactgctacccagaaacaaaatagaaacttcttatattttctgcatatgctgccggcccttcaggcttagctgggggtactccagccataagcggagggctggtcttggaaggggaagggggaaggtattggctggctgctctctgctggcttttcagtgtaaccacttagaaagcatccttgctgtaagttacgcatgtagatgttgttaaaatcaagtggtagtaaacacaattattttattttgtatattttattccgcccatcatccatccacccatccgtccgtccgtccgttgtgtgtctatggggacggtgcacatgtgccacagtgcatatatgaaggtcagaggacaattggcatctcagggtccgaatcccaacgttctatagattcatccacactgcgtgttatggagctgctcccgtatgcatatgtatgctgttttcactccagtatttccattgaattacaaactctcagggcgcagggccaaccttaacagaacctcgtggaagtctcaccatcctagcagggtgtgtgtcagaaacatggctgctaacacaagcctgaattgatcatgaagtgaccatggcccgaagcaggttccaggagtcgaagccagtctccgtagaggcctctggatgagggtggagatgccacaccgtttgaaggcatcaggctctttccttctgagcctgtgctctgtgtggtctcctctgtgttgaatgtcctctgccagttctaaagctcctgacatgctgtggctgtctgctgactcttttcccggcaggatgagcaagcctttctgctccacagcctttctgatcctgtctctttccacctctgccaactgtgtcctgtcagacgtaggtgatttcagtaccttgtgcccccctcaatataccagaatcatttttgggttttcttcagcagtcattcacaatgttccataatacgcagagttggcagaggtggctgactgttcattcggccttctatgtgtgtgctgcatgtaggacccacccatgctgcatgtaggacccacccatgctgtgggagcagaggaccgcctttgactctgggtccctgtctgtgcctgtgattgatacacaaaagttggctgccttccatgtggcttatctgtcacatctgtccccctcaggagtaaaactgcggctttcacggatgccaggatccggaccatgaatgaagtcataacaggcatgaggataataaagatgtatgcgtgggagaaatcgtttgctgacctcattgccaatctgagaaagtaagtcttggggtagactggactgtcttgtgcacttttctatttcctaattttaccgaatgaatttagagttctctttgatctccctggtaactcacctcagatatgatgtggtcacctgctgtggcagagtgttaagtataatgacctgggacatcccttttaacctgggcttctgtgtgccattattcccaggcaaaagctgcatttctcctcttcttgttcgtacctgtctgtctctgtctgtctcgatctcattctggttttgatggtgctggggactgaaccaagagattcacttgttctggacaagtatcacagcacacaccactgagccgcacgtccagccttcaggtgcactgccatagtcgaatggagttcaaaatgttcctgaatgcttcaccttccctataaataatgattccaagatgcaaaactctgagataattacattggtgaagctctacttgatgtcattgttcattgggaaggtggtatgaaccggttgccaccgtgtccagccagacttgatgcctgggtgtcactcactcgagattgttaggtgaaatgtttttctgtttgtcctaaacatttgagcttttttctttttcactctgtctggcacaggcacttaacctcttgtagccgtggatgtctgtgacctctgtatctgaagtgccctccatacgtagaaacctttcctgttctttgtctctggcttctaccaggcacaccactacccacctctgcactcttccccatgcctatgactccctgtgccagctctttctgtctagaattttgggggaaaataacgatttcaggggtacagttctctcctgagctccaggaggggagagctgtgtctcgcccacctttaggttacctgtgaggttcctaacctgtgaggacttcacctgtatgtatgctggttgaaggcatttgtatgggccctcgataaaatcagctcagagtggcccacagaataaccctgcggctctaccgtcatttggctgaatgagaaaagtggtttcttggtgtcctgtgtggttactgaagctgtccccctggtatgtgctagcaactgttgctgtaatatcacagaccatttaaaaattgcttatcatgtgtgtgcatgtttacatgtatgtaggaatgtgtgcacgtgggaatcacctgctcacgtgcagaggcacaacctcaggaggcacccgccttaattttttgagacaggcgttctcactgggaactggggtcgaacgattcagctaggctggtagccactgagctgagggacatacctgcctctgtcttctcagtgctagaagtgcaggctcacattactttgagtagattttatcaagaagatgaacacaaatgcattctgttagcatcagtccccggcctcgtctctctgagtggtagattccttcctgcccaaaaggagtcccactcagctcaggcctctactctgcctagttgtccagtgagtctcgaacagtaattctcaatctatggatcaagacccctgtgggtcacctaagaccatctgtgacccacaggggactaagacacagtcttctctgtgagcccagcaacttgctggagaagagaagagcaaccctaaaactatagaatctcccccaagatcttaggcagaaacatctggcacagagcatcctagggcatggagaagcgtagactcgtgcatatagctggtctttatgtggatgctatgatgaaactaagggcttcatgcttgcccggaaacactttgcaggccgagccatctcttctgtccccacaggcagttaaccttgatgtgtgtgtactgcctaacagggtcctcattcatatgacatcgatgttgaattttctgtgtggggaaaaaaaaatctgtttttctctcttccaggaaggagatttccaagattctgggcagctcctacctcagagggatgaacatggcgtcgtttttcatcgcaaacaaagtcatcctgttcgtgaccttcactagctacgtgctgcttggcaatgagattacagctagccacgtgtttgtggccatgactctgtacggtgccgttcggttgacagtcaccctcttcttcccgtcagccattgagagagggtcagaggccatcgtcagcattcggaggatcaaggtttgtgtacagtacaatcttaaagttggagatgtcttttgagtcagatggtactttccctgctgactgtcactgtgtctccgaactgttagtcaatctcaagtggtgtgtacatgtcgtagtcttaggtacagtacgctaaaagtccagaagaatttctgatctgtcatgggcacaatataaataccaacagccagcatcagggtcttaatatataatggtgattggcaacttttatcttctagaccactggttctcacccttcctattgctatgaccctttaatacagctcctcatgttgtggggaccccccaaccgtaagatttattttcattgctacttcataattttgctgttatgatttgtaatgtaaatatctgatatgcagatggtcttaagcgacccaaagggtctcagcccatagactgggaactgctgctttcgactacaggacaactaggcagggactgagtacaggcctgagtgagtgacattcctgttggactggaagggctcttagagagaggatggactgtaccaatcaaacccttgtttaaaaatggatctgtccatctcagctgttttgctagttcccctctggctctgtctttccctccagtctgcttttcactttctttctcttctaagagccttttttttttttttctagcaggcattttccttggctagtctgttgatttccaccacatttacccaagtagccactcctatgaccctgaactgctaagggcagatcattcatagagccttgatgctggtctggtgcataaggaatgctaagtgctggtgtgtcgacgaatgtgtctggaggagctggttggtgcggtaacaggcctgggcacaaaccgtgttttatttctggttctcagtgttgttcattgtccaataccagatttccatcaaaccttagggggaatgaatgtagaggagggggaagggcttgccataaaagccaggaggggtttttttttttccttcctgaaattttgatttttttttcttcccaaagtatcatgtggagttcttaggtctaaattgtgcctctatatcagtcccccaaagctctagggacattgaaaggactacgtagagggtggggagatgtgtaacatctgagaagcttggtgtatgtagctgttgtgctcagactcactgcagatgcgcatctgagcacaagaactgggaaaggttgagcctgtgcacctttcattatggatgaaagggaaggaagagggaaggacccaggaggccacggaagtggcagggggcttgctgagaaggtgggttctaggcggaggggagtgagggagcgggaaaatgactgaaattcattataacaataagaggaactgtcacacattatacacagttactacctatagaatagatgtaggatacctatagaatagatcagtcatgtagggttagttctggacctatagaatagatgtagaatacctatagaatagatcagtcatgtagggttagttctggaccagacctgagtttatcattccttctggcaatggttgaatagcattgttgaggggtgacacagggcatttaattatttctttttttctttctttttttttttttaactttcaaatctgaggctatatgttgaccgtaccatcattctaaatgtataatataaaactttcccttctgtgcctttacacggtgttattctgttgtaattctactgttgctgccactgcttcccctagacttgagagctactctgtggggatcaggagccaggctgtttcctaatcctctgcacgtagcagcagttgaatatcagcacccaccactgtctctgctgtacagagagattgtgccttttgtagggtgacagtgcccctctcatagggtgacagtgctccacacataggttgtatgtgacagagcgaggacctctctgagagcttcggcttctaaaccagtgtcgtatcggccacactgcttagtaactctgagggtgcaggatgtacacctgcgtagctcagccttttaagaagtttctctgcttcctgtagatgcagacatttgagggctgggtttgcagctctcccggtcagcttctacgctctctcagctcccgctgtataagaccagtgccacacagcccactgtcacgggctacataatggatgcccggtcagcgctgttggtaggagtttcagttacaggatgtgcgtggtgtgtcaacatggtggagtggcgtttgaatgaagttgctcagggagccgtgatacgtggttcagcggtgttgaggaatatggtagaaggggatagacaggccagcacaaacatcacttcaacgaaatgaagagtgctcagcgggcttctgaaactgtgttccttcaaaaggagaggtaaactgaggcaggagagggaagagctgacatctggtagaccatgagagatgcggtgggaagctgctctggttagtcttagggtcgcatgtgtctgtctgtctgcctgtttgctggacatgggctcatgtaggcaatcctagtcgtagctcatgtgtggctggcctgtgggaatgaagacaacagatcacatcttaggctactggggtcttggagagaggtttgtaggaagaagttttcatacacagggaaacaaaacaaaatagttctgtttttttttcccaaggatttaacaaacaagtgttaaggttggaatataaggtgttccgttccaaaagacacacctgtttaaggcttggtccccaatgagagggaccagactagtgattgattggatcaggagggcttgacctaatcaatggattaggccattgatggactccatgatttgatggcacagctgagaggtggtgggaattttctagcgtgagcccagcgggaggaagtgggatgcttggggagctgttcttggaggctgcgtctggatctttattttcaggatgctgtggggttagctgcctccccatcccttgttcctgatggcgtggtattttcgccagtcctctggcactgtaagtctagttgttttctcagccatgaaaagtgaccggccgcagagtgtcgtgtccaggtttgtagctttgtggacttatagattagaatgctgaggacttaaaggattttttaagcttcaggaaatgatatggtgctgtttctttccaggtatgctcagataccctctttagttgcctgctctgttagtggtgtgcgtggctaaagaacacccacagtacagcccgatagtctcaccgacagtgcattgatctcatgcaagctatttgtgaggtttcttgtacaaattgacgtctgaagcaaaagatccctgctgggtcacagttgtggaagctgcaggtgacagcagagccatgctccttcagaagccactgggggacagcctttcctctcctgacctagcatccaaggggacctgggtaccattccagtctgtgtcgccaaggccacacagtcgttttgtacccgtgggtttgactttctaatctcatgcaaagaagccagctgtgttggatttagggcccacgtgtggccttgtctttgctgtatctgaaatgatccggtttccaaataaacacacatttcaaggttccgggggcagaaggacctcaaggtgtgtttctgaagaaggggtaccttaatctgtttgtgctcccataacaaaactccacagtttgtgaagagtacaaatttgtttttcatagctctggatgccaggaggtacaaggccaggtagggttcaggcaggcttggctgtcggctttctgcttccaggatggtgcccccctgtcttatgctctggagggtagggcatcgtgtcctcatacagtagaagaccgagagagccgggtgctgtgcgatgcctcccttgtaggaggtttggccccattcacagtgcagagcctgtagtgtagtttaatcgcctctttaaaaaactacctcttaaattttgtttttccctactagggctcaaaacccaggctgttgcttaggctatgtaagtgaagtaatactcaggtacaggctcagctcaaagacctacatcatttcccatcattattagcagctattaatttttataaaacaatgggcgtcattgtgatatttcatatatatgtgtgtgtgtgtgtgtgtgtgtgtgtgtgtgtatttatatatatttcactttgatcatcttcagttttctcttactcctgttccttgcttgctctacctcctggtactttcaggtgctatctgtattgttctggtaatattgtttggttattttcctttttgttaatctttaatctttcttttggtttgttcccttagaatgagatttgcatgttccatatttgtgtgtgtgagatgtgtatgtatgtgtggggtgtatgcatgtatgtgtctgtgtgttgtgtgtgcatgtgtgtgtagtgtgtatgtgtgtgtttgtgtgtggtgtttgtgtgtatgtggtgtgtgtggtgtgtatgcgtgcacatgtgtgtagtgtcagttgcacatatgtgtgtgtgtgtatatgatgtgtgtgtatgtgtatgtgtggtgtatgcctgtgtagtgtgtatgcacgcatgtggtatgtctatgtttggtatgtatgcaagtgtgtgtgcgcttgtatgtgtgtgtgtgaaatcgaggctccatatgtgaacaaagacatgacatttgtctttctgagtttaattttcttggtaggaacatgtctggctccacctgtgttcctgcaaatgacagttttgttcttttttatggccaaataaaactgcattgtttatggcacgttttcgttcaacacttgtctcctgatggatcccactctaactacataacgcctcagctgttgcggcctgtgctgtgataagtagatatgcacctggggttccagtgaggcctagacaccctcagaagcatcccagcagtgacaagcctggaccccagggttgttttatttttagttttctttctcaggagcctccttagtgtaactttgcattaccctcagcagggtttaaggaacccttcgctagccttgctaatgtttcttgtcatatgttttttttttagtgatgttccgactgagttgtgatttccctgatagttaagaatgttgaatggttcttagatatatattgctcatttgtactttgtcttttttaaaaagttcttttaatattgtacatacaggtatttgcccgtgtgtctgtaccatgtccctgcctggtgcccatggatgtaaggagagggtattgcgtcctctgtcactgaagttaccgatggctgtgagccactcgctgggaatcgaatccagctcctgtaggagagaagccaatgctcttaacccataggctggttttatttgtcaagttgacacaaactggggtcatttgggaagagggaacctcaacttaggaaatacctccattgattagcctgggggaagtcctcttgattaataagggacatgggagagccaactcactgtgggaagtgtcaccctagacaagtggcccaggttctacaagagagtcggctgtgaagagcaagccagtaagcagcctcctccatggcctctgcctcagttcctgcctccacattcctgccttgtgccaggagactcccagcctggagagggtagtgacaggggacacagagtagggctctggtgtggctttgaaatctgagggtctccggaatttctagctctctaactgtactgaaatgctgatgataacttctaaaaattcctaaaaactttcttgttctttttgagggtaagaagctgctggcttaggtgattgacacctgtagcctgacagaggcggggccaagcaatgtggcctttgttctatctcagcaggaatctcgaagctctatcagcaggctagtaggaagtcacaggaagaaaaagagactctgaaaagtgattatagtgtttgctatgttactaaaatgtttcctatgaaagatatctaagggggaaagcagaaagatcctaagtggggaaagggaaaaatccttcctagctttttgtctaagacgtgttctgtcccaaaaagttctcctcagctcagttcctctcagctcagttcctctctttgtcctcagcactgaaaacatctttcagaatacatgatcacgtgttgaaaagttcatcgcaggttcacacataaaatcaaatcataaactgaaatagttagtagtttacaacagagaatgtttacacacatatccattaggagtaattatctggctaaacatccatcacctgtcacagatccacaggttcacaggaggtttaaaaccataactaagttattagtgaagttttgtataaatgaacccagtcaatattttatattctgtcctagcacctataataaatcattagtttgctttttatgacctttggttagttgttttacaacgtcttggaatgtgctcagagtagaagaaagtctggttaccatctaggaaaaattaactggtgacacatgggagactggcagagttctcattgcaacgttgactatcagaaaaggacctaatagtagtcccactataaaagagcttaataatcactcatataattttaggaattcttatagtattgtcataaagacttaagaagtcatctatctgtctatgtagcattatcacaagacagtacttctttgctcaaaagaggtgggctaatgccgagtgattgttatatatgtttaataataacaggaaaagcatattagtagcgggggtctttcctaaaatgaattctcctgggccttgcctatcagagcgaatcggtcactgattataatccaaagcagaccatctcaggaagatcacctgctggtcattagcttgtcctataatggcttctgacagccttgagttcctgacctgacttcccccagtaatggagtgtcacctgagagttgtcaggcgacatcaaccctctcctctccaagttgcttttggccatgatgttgatcacagccatagaaagcagacagggacgagcactgagctgtttttccagccctgtggatggcatcttttgagaactgcttgctgctctctccttaggatgctttgagccttgggcatttagcttatttgaatcctttatgcattgtagatattattccctgtcagatgccgggctggcaagctctttctcccatccttcagttgtcttttatggccgtagtttcctttgctatgccgaaaccttttaattctatttgccagttctcatcattaatgttcccagagtcctttgcagaagtccttgtccatgcttgcaatttgaagtgctttctgtttgctctagcagcttcagagtcacagttctggccttgaggtctttgatcaatttcgaatagatttccactgtagtttttttttctgagtgagttatgcctggcatttgaggaacaggagggccccttcttgctgtcattagattctaagcgttagcaggacttcgtgttgctgcttagactgcaccgaccagctcctgactgggtggaatgcagcagttagggaagatgctttcgaaatgtatttgagagtggtgactttgaggctaccccatggcaactcgtgacacgctggttggttaaaggggagacgggcagtggctgagctgtggcagtacgtggcatggcgtgacaggaagatgggcagagttgacctttcccccctctctgctgcgggtctcaggccctgccacctttgtagcctgacaacattcatcctaggagcagccttggctttcttctggctttagcatggtgtttggcatatgataagcacccagtaaatatttatcaaggcatttccttccatcttccatgtgtttactattaaaatacaacaaaacaaaatcaaaacaataccaaggtccagttctatgtgcaatgtccagttctacatgcattcagtttcttatcaatgttttcattttatagaggaactggtgtatgtgttgagaacgttgcaaggactttgctcaggttcgaaacttggtgtgcatgaaatcgtgtgtatagtatgcagtctgttaatacatagcatgttctgatacgatttcacattttacttttaaggtatttttattacagttttatttactgtgtgtgaggggacacacgatgtccaggcatgtatgtggaggtcagagtataactggtgagagtctccctgttcaccctctgcatcctaggactgagttagattggcagcctttgtggcagaccctctcactgactgctgaggcagcccctagctccatgtgttgacactttaaatagagttggatagataatccttaggctgtaagacgcttacctcagacgttccatggagacaccggtttctgttttatttctgtagttaaaacagcccgtgctttccttttctctagaactttctgttactcgatgaactaccacagcgcaaagcccatgtaccatctgatggcaaagccattgtccacgtgcaagatttcaccgctttctgggacaaggtaacctcccgtgatttctgagacaccgtgggtgacactgatgaagcagagaattctgagagttttacgtagtctgtaaggggcagtcagttcatctattgaagttttctgtaaaatttcttaaaatccccaaacttgaaagttgtttttaaaaaatattttattttatgtgtatgtgtgtgggtctgagtacatatttgtgtggagttgcccgtggcggtcagaaaagggcatcagagcctctggagctgggcttccagggggttccaagccaccatgggggtgctgggagccaaacccaagttctctggaagagcagacagtgctcctaactgctgagccgtttctccagctcctggaggttgttgtctatcacggaaactttgatcattgccttggtttgagctgaaagtgttgacaccagcagtgttagaatgcatggggtcagtatgggatcagttaactgtgcatattctataggctaactgcacattctataggttaactgcatattctataggctaactgcacattctataggttaactgcatattctataggctaactgcacattctataggttaactgcatattctataggctaactgcacattctataggttaactgcatattctataggctaactgcacgttctataggttaactgcatatattttataggttaaccaggtgcattctatagattaactgcacattctataggttaactgcgtacttctataggttaatactatacattctgtgggttaaccgaatgcattctataggtcaattgtgcacattctataggttaacttcatgtattctaaactatcctagatttttgaatcttgttttaacatcatcttgtagcacttgaagaacagtctgcaatttgcatttttgtctggtatcaagtctgggaactcgacctcttagatgagtgcacagaccacagcatctcagcatcgctctccacagttaccattggttgagtgtgttaggctgttgatgtgttggtgttagatttagacgaaagctcttactgtttggtgatcgacactctgaaggtccgtgcttcagatgtcagccacctttctctctcccgatacctctcgcttcttctgaatcctggccaagctggtgtgccagttagaaaggcagcctcactctggtcctggtctgagctactccattaagacccccatagcacacgcttctcaattggttttgcaacgtgtgggagttctatagagatgtgaatttgatttggcgtcttgaaatttaacggagaaactatgaagcacctaaaaaatgaccaatggttaagtttcttgaaatctaccttatgtgacgtgtttgaatcaaatgttccagaattttggtatttccatgtccatcatgagaaaccttgatgatgagatctgagaataatcatggaaaccgtgtgtgcctcctatctgtcttatacacatggccttaatatgatttatcagtgagttcacagatggagtctcacacttgggctgccaatatattccactggaaagaactcagtgttcagtttttgaatttggaatacttcaataaaacatgcatagagccttaccttttgttaaaatgtgtcgattgctcgtggatgtggtttctgatagatcccgtcctccttccccacccgctgctgtgttgaagcctgtacctccaccgtgtttatggtagctgggccgtgttgtccctgttcggcatggtgtcagtaaggcacatcacatgacttggacctactaacctaccctgggtttaatggcttaagttttgctgttaaactcgagccatattgaccatattgtgggacttactttccgtgattgatttcatgacatcagatgcagtcccgtgtccctgagtgcattgctggaaggactcattggcaagccacagttagggatggtaccaaactgctcatcacggctgggcatgccacattcttctactgccacctcgtgggagctgatgacatagaagattaaaacctaaggcccctgtgaaaatttaggaatgattaaaatcctcctgtgtgtgttgttctatgtaaaatacttgttttagtgcattaagtatgaaccaagagtctctcagctcccacattgtccttctaccacttaaattctgtattcacatggaaatctggactcatttctttaaataggttgagtttatctaaataaaaagcttgaaaaggctgtcaagatgtgacagccaaagtgaggaggaaataggggctgtgcgtgtgtgtctgcagccgtggttttatgtcttctactgcttaaagtgatggtgctagttctttaaaatgagactttttttttttttttgtaaactttacctcataggcactagacagtccaaccctgcaaggtctttcctttattgccagacctggtgagttgttagccgtggttggcccagttggagcaggcaaggtaagttttttgttttgtcttgtctttgggttggctcactgggagttacttatgtgaccacgagtcaggatggaaggactaggggagtgggctacttctttttgtcagtgtgcctgtggctgtctggctttcaacagttcttaggacatacccaagtcatgtcagtacatatttagctcaagcacatccatggtttatgctatggttggaccaaaagatgcacagagaagcccaggcccaggcagctctgggttctgggcaaggcagacagatggtcttaaggctgtgtctcaagttctctgatcatggtaggcatacacttgttaaactggtataggattccatctttgtatgagaaggcttattcctcagaattcatttaagtaaatatcttctgagtgcatcggatgcatactcggtgcatggcctttctggggtcagcacataaaacagaggagatctggattatcaggatgcggccgcagcttcgctcagtattggatggctgaaacctctatggtgctggggctgtattactgccaatggtttttgtttgtttgtttgtttattaattgataactgattaatgattgattgattgaggctggatctcaaaatacgcacaatggcctcaaacttgtatccaaggaaaattttgattgtcttgcctctgtgtccctcgtgctgagcttataggcatgcaccagtgtgaccagcagaaaccattagttatacgacatagttcatgtagtattctcaatggcatatagccagcattgccattaggagcaaggccatttgggagggcaggctgtcacaacctatttctgtaagctttgtttgtttgtttgttagtaaacatcactttactgtggccagtggtgctgtttctgttttgctttcttgttttagctgcagcgtctagtgaccttttatatgagaagctgatgcttgtcaaaccgctgggctgggcagagcccggaacttggtttaattctgtgcctacatgaacagccttatgtgtgttgtgaactctgtttcagtcgtcgctgttgagcgcagtgctgggtgagctgcctcctgccagcgggctggtcagcgtgcacgggaggatcgcctacgtttctcagcagccctgggtgttctcgggcaccgtgaggagcaatattttatttgggaagaaatatgagaaggagcgatatgagaaagtgatcaaggcctgtgctctgaagaaggtgatgactcttgttgggtttcctatactccgtgtaaacgcccgccttcggggcgttctctaagtcatgatactccggctaagcttttggaagcctgcccatccccacccatcactggctgctttggttttgttaggttctgttcagttttcaccatccgtatgcgctgattatcacaatcgtggggagcaccatccttaactttaaaaaaagatgtatttatttttatctcacgtgtatggtgtttcgcctgcatgcatgcctatgtacatctggtgctgacagagaggtcaggagagggtgggggatcccttccaacagaagtcacggatgcttgtgagccactatgtgggtgctggaagtccaacctggctcctagcatccagtgctcctaaccagtgacccacctctttccagtgcctgagctctaacctttataaagcattaaagagttgcagaggttagtgtattgagtccttctgtccccggcacacagctttggcaacagccaggtggtgacgagtctttagtccttaccagctgaacttttgaagccccacccacccccattctaaattatttttccaagcaattttggaccctttgtatttcatctgtgaactttttcattatttgtgtttaaaagaactgtcttggggtggcagagggtggaggttttgggaggtatggctgccacaaccgtatcatccataaggaaatgacaaaattgcttgaggcaatccacagtccagccagtctgttgtgctgggttctaattgttaattcgcacaactttgaggagaggctacagctagggcccagcttttgcttttccctttcctcccttcctcccttcctccnnnnnnnnnnnnnnnnnnnnnnnnnnnnnnnnnnnnnnnnnnnnnnnnnnnnnnnnnnnnnnnnnnnnnnnnnnnnnnnnnnnnnnnnnnnnnnnnnnnnnnnnnnnnnnnnnnnnnnnnnnnnnnnnnnnnnnnnnnnnnnnnnnnnnnnnnnnnnnnnnnnnnnnnnnnnnnnnnnnnnnnnnnnnnnnnnnnnnnnnnnnnnnnnnnnnnnnnnnnnnnnnnnnnnnnnnnnnnnnnnnnnnnnnnnnnnnnnnnnnnnnnnnnnnnnnnnnnnnnnnnnnnnnnnnnnnnnnnnnnnnnnnnnnnnnnnnnnnnnnnnnnnnnnnnnnnnnnnnnnnnnnnnnnnnnnnnnnnnnnnnnnnnnnnnnnnnnnnnnnnnnnnnnnnnnnnnnnnnnnnnnnnnnnnnnnnnnnnnnnnnnnnnnnnnnnnnnnnnnnnnnnnnnnnnnnnnnnnnnnnnnnnnnnnnnnnnnnnnnnnnnnnnnnnnnnnnnnnnnnnnnnnnnnnnnnnnnnnnnnnnnnnnnnnnnnnnnnnnnnnnnnnnnnnnnnnnnnnnnnnnnnnnnnnnnnnnnnnnnnnnnnnnnnnnnnnnnnnnnnnnnnnnnnnnnnnnnnnnnnnnnnnnnnnnnnnnnnnnnnnnnnnnnnnnnnnnnnnnnnnnnnnnnnnnnnnnnnnnnnnnnnnnnnnnnnnnnnnnnnnnnnnnnnnnnnnnnnnnnnnnnnnnnnnnnnnnnnnnnnnnnnnnnnnnnnnnnnnnnnnnnnnnnnnnnnnnnnnnnnnnnnnnnnnnnnnnnnnnnnnnnnnnnnnnnnnnnnnnnnnnnnnnnnnnnnnnnnnnnnnnnnnnnnnnnnnnnnnnnnnnnnnnnnnnnnnnnnnnnnnnnnnnnnnnnnnnnnnnnnnnnnnnnnnnnnnnnnnnnnnnnnnnnnnnnnnnnnnnnnnnnnnnnnnnnnnnnnnnnnnnnnnnnnnnnnnnnnnnnnnnnnnnnnnnnnnnnnnnnnnnnnnnnnnnnnnnnnnnnnnnnnnnnnnnnnnnnnnnnnnnnnnnnnnnnnnnnnnnnnnnnnnnnnnnnnnnnnnnnnnnnnnnnnnnnnnnnnnnnnnnnnnnnnnnnnnnnnnnnnnnnnnnnnnnnnnnnnnnnnnnnnnnnnngcgtgttgatttggatatcttccttcctagattcccaaatgaacattcagttttctttccttcatgtcttggcttgcatgtcacggtgtctttattctacctgctcgtgtaggctttgtctacccctctaccgtgcttgtgaatgtgtggttcatgtgggaggctgagtcagaggttggtggggcggctgtgaaggcgcacattccctggtgagctacatttgctcccgtcgctcttgtgtctgctccttagcggaggcattcagacttgcctgctttggagcagtgtgcatctccgtttggccatcactgggcatctgatttatcccccaggtctgtatcctccaccctccccattcagtcgtttatgatctgtttctacttctatgcccaaagcaccatggtcctctgtaagcgagtcctgacagtggaggctctggaactcgtctagcgcgtgattccttctgtccatgttccctgtagcacagggccctaagcactcacagtgctcaggctgttgtaacagttcctcaggtgggccctgcttgcccctgtgagtgattccctgcatggcatgagccagatcatgtcatcccttgaatgtcataccagtgaagctggggtctgtctctcttcatcaccctcgtctcttagcgctgctccaactccatggcctcaaggttgctgtcctttgaacacagcagatatacaccagctcacaggaactataaattattcctccctgtgtatgatgccatctgttttgcccaggtttcactagccctctccactctaggctctcttggtctgagcagtggctgaccattcagtgaagtggatgtccccccaccccctaccctcccattctcccaccccctaccccacgacccccccatgttctcannnnnnnnnnnnnnnnnnnnnnnnnnnnnnnnnnnnnnnnnnnnnnnnnnnnnnnnnnnnnnnnnnnnnnnnnnnnnnnnnnnnnnnnnnnnnnnnnnnnnnnnnnnnnnnnnnnnnnnnnnnnnnnnnnnnnnnnnnnnnnnnnnnnnnnnnnnnnnnnnnnnnnnnnnnnnnnnnnnnnnnnnnnnnnnnnnnnnnnnnnnnnnnnnnnnnnnnnnnnnnnnnnnnnnnnnnnnnnnnnnnnnnnnnnnnnnnnnnnnnnnnnnnnnnnnnnnnnnnnnnnnnnnnnnnnnnnnnnnnnnnnnnnnnnnnnnnnnnnnnnnnnnnnnnnnnnnnnnnnnnnnnnnnnnnnnnnnnnnnnnnnnnnnnnnnnnnnnnnnnnnnnnnnnnnnnnnnnnnnnnnnnnnnnnnnnnaaaagtgtagcaatgcaatgccctgagtgctttgtcgttgattaaagtgggcgtgcctgctcttccgccctgcaccgcctgcctctgacgtaaagctgccgggcaggactgaggcagagaaacgctgagtctttcctcgtctctcttcacgcaggacctgcagcttctggaggacggggatctgacggttataggagaccggggagccacgctgagtggaggccagaaagctcgggtgaacctggcacggtaacttgctttccgcagccattgtgcatgtgccttgatgaggcttcaggaacgaggcctgcgttgtctgctcagcacctcagtaccgtgtgccgcggatacttcaaatgaacacccagttgccatgagcctggatccctctggccgtgaccaatgaggtgctctccggtctgatttctctctgtgcctttcagggccgtctaccaggacgccgacatctacctccttgatgatccgctcagcgctgtcgatgcagaagtgggcaagcacctgttccaactgtgagtttgttctgtcttacgtcagctctgtgttcgggagccctttcagtggccccgtgagggatttgtaatttctacaacttctctctcctctgttcctctccagatgacccattttacagatgcaaggtcaaggttgaaaaatagagcaggtgccgccagtgcagggacgtgcacagagcccgagtgttagagtttaagaacagaaggcacgtcctctggttccttgaagttcatagtcaagagactgggcgacctgggccccaggcagaaggaagatgtgcagggttagaaggaaggagggggcacggcagcttggtagtggggagtcagcacattttctccgtagtttaaaaataggatttacttgatttcaatgtgtgtctggtgagtgaatgccacatgtgtgaaggtaccggaggaggccagagagggcgctggattccctcgcagctggcgttccaaagggttatgagccacccgacacaggtgctgggacctgaactgtgctcctccacaagtgctttcaactggccatctctgcagctccaccttttacttggcgtgtgagggtgggccctctccagcccctccttcacaatctttaacttggcatgtgaagatgggtttcggtggcagttagcataggacctccatggacagggccttagtagtttacggtcatcggttggctgggccatgtggggacagggactaggggatttcactccttctggtagaaggagcagcagacacagaagtataaaggcacggacaagcaaggcactagaaatcagccaccaaacccagacactattgcgtatgccagcaagattttgctgaaaggaccctgatatagctgtctcgtgtgagactatgccagtgcctggcaaatatagaagtataaaatggaacacagggcccccaatggaaaagctagagaaagcaccaaaggagctgaaggggtctgcaaccctataggtggaacaacaatatgaactaaccagtacctcccggagctcgtgtctctagctgcatatgtagcagaagatggtctagtcggccatcagtggaaagagaggccccttggtcctgcaaactttatatgactcagtacaggggaacgccagggccaagaagtgggagtgggtgggtaggggagcagggcgggggagggtatgggggcctttcgggatatcatttgaaatgtaaataaagaaaatatctaattaaaaaaaaaggcaaaaaagaaaagagcagcaagcacagcgttcccctgtgaggagatgcacatcacacgtgattaagagccccagtgccaacctgcaggtcctggggtctttagctccatgtgacaaaataaaaggcaacagccggtgtggctcacaccgcagagcttccatccctaagagccagggagggtggaagtctgaggtgagaggacactgctggcccagcacatctgtacattttccttcttgggcatctttcctcagatctcctcttcacaggccaccagtcaggtcgattgagaaggcaccccagagcctcccttaccattctctctaaaggctctgtctgtcagtcattaggtgttgcactttagtacatggatttgagggatggcgttcagttcagaacagatttcaggcagagtcaagataacaggtgcccaggctctggactcgaggactggcacccaaggtcatccactgagcggggccttctgaggcttggtgttcagaggagagcgactgcttccgtaccaacacgggatccacgcatgccgcctgatgttgtggtgatgaaaatatcctggaagtggtgatcgtggtggctggaccgcagtgtgactacacttcacgctgtcgtgagacacctaaaatggttaaagtagcgacttttatggcgtgtatatttcaccacagtaaaaataaaaatgaatgcccggtagtgttgagtctttcagaatgcagcaagtgagagcagctggtggttggctttaatgaagctctctcatccgaccctctttttctgacttgatggattctgggcagaatcagccctttgtcccttgggtgagccttgagtggatccattcaagttccccatcacttggagactaattctcgctgggatgctgtaccagagtctctagggaggagagaggaacgcattttaattgctgtgtatcagtatgcagatcacaagggtgctcccaagttcccttttgaacagtgttcataaggtctcctaaaacctttaatgttttaatggctttggatagacacttggtagaagcaagcttgttaaaattggtgcttgctaatcagaaccacgttctttggggggaaacttggagcggggagcacagatgcaatttaggaaatcactcagcggcagctggagaatgttctcaacgagttagaaaattggatcgaacaatatgctatgaaagatggcggccgtgtcgaggcttagaaatgtgaagtgtgtttgtgttaaacgcgaatgagtcactcttctgtttgccattaacattttactccaatcacgaatatacgtccaaggttattacggttttcaagttttacaactatatgttgcaaacagaggaagtgggaggctggggactctcgactgatgccagtctgatgtagctgtggatcctgcattggggaaagtctcagaattatagatggctgcctcttccatgatcttctcagggttttcgcagttagatctcccacactaccaatccctccttcatccttgtagtttataggagctactatgacaaaacgccgcaactgggtgcttataaacaacatgtatttctcacggcctgagatgaagtgctagcagatttgttgttcatagctggatgtcttcttgttttgccctaacgacagctgtggtccacgctttggtttaggaacagcactgaccctgtccatggtggcagattcccatgaaggccccagtgcctcacaccatcacactggtgattaggcttcagcgtatgaacacatacatggacaagggcttcagcatccagcagtggcttaccttccctgcttcagtctttcgtacactctcaccatcaggatgtggttgctcatcatgccagaatgggggacattgttctttgcagtctgccccactgctggtgcctctgtaacccagcactccagcattccacatatgatggcatgttgaatgaggtcgctccttctcagcctgatgactgtgcctcgggaggaaggcgagtagcctgcgtgcctgactttctctcctgcacctccaagaagcattatggctttctaggattgtgtctggcagatgctcatagcccattaaccatagcactcagtgtgggtttttgcactgccttggccttcctgcccacacaggactgagtacatgagagcattccagagccacaacacccgccagggccatagcatctgccagggccacggaaccccctgtatcaccatggttccttccttgcagaggggcctccttctcccacattttctaaaatagcgattcctaccttgtactcacatcatgacatcatgacaccacaacgcgttttcttctgcctcaaacacacacacacacacacacacagattctttaccactcacacacacatgcatgcacacttagaaattttactttttaaaatttaaaagacattctgggaaaaaaaaacccgcctaacttagggaaagtataaaaccactagttagaaaattattctaaggatttccattgtcttggctgtgattggatttgttaggaagaaagcatctccaaccattggcttgggccttgcatgtgtcagagcccacagggctgagggttaacgcctccatggcagtcacatgaagggatgaaggcgggtggccctgagtgagggcacagctcagctgaagccttgagagctgcatccaaggaaggtttatcaggtcgagagatgtaggtgagaactaagccacatcacggcatgctgaaagaggaaaacttaatccttcatagagtgcatgaagggatacatagattatacatggatttgggagtcttggttctgctaacggctgagttctagaaaaaccttcagttttttataaagacttccggtctccaagtggaagcaaagatggttagaagcctagagaaggatacagggcagagctgatagggtttgaacactggtgattgtgttgtaggcctttccccgtgtctgtccctttgtttctcagataagtagtcttaacatctttgttatttataatttttcatattttaaaaattaaactgtaattatgtcatttcccctttttcctttcttccctccaactcctcccatgcgcctggagcccctgctccctcttagaatcatggcttccttttctttagctcttattatcacacatacacacacacatacacacagacacagacacacacagacacacacactcacacagacacacgcgcgcacacacacacgactcacacacacacagacacacacagacacagacacacacacatccttaaatacataaatacaacccagtcagtctacatgatgctccacaagtggttgtggcactcatggctccacaagaggccgggcagcctccgttgacatgtctataacacaactcctgcacctaaaaagctcatgggaacatcactgggaagtgggaggaaacattgccggagccggaaggaacaggaagttcctgtgagatcctgtctcctaaacatgtcagaagctgcacccattaatcctnnnnnnnnnnnnnnnnnnnntggcctgcgtgcctgactttctctcctgcacctccaagaagcgttatggctttctaggattgtgtctggcagatgctcatagcccattaaccatagcactcagtgtgggtttctgcactgccttggccttcctgcccacacaggactgagtacatgagagcattccagagccacaacacccgccagggccatagcacctgccagggccacggaaccccctgtatcaccatggttccttccttgcagaggggcctccttctcccacattttctaaaatagcgattcctaccttgcttcttcttgtactcacatcatgacaccacaacgagttttcttctgcctcaaaaacacacagacactttaccactcccacacacatgcatgtgcacttagaaattttactttttaaaatttaaaagacattctgggaaaaaaaacccacctaacttagggaaagtataaaaccactagttagaaaattattctaaggatttccattgtcttggctgtgattggattttttggaagaaagcatctccaacccatggcttgggccttgcatgcgtcagagcccgcagggctgagggttaacgcctccatggcagtcacatgaagggatgaaggtgggtggccctgagtgagggcacagctcagctgaagccttgagagctgcatccaaggaaggtttatcaggtcgagagatgtaggtgagaactaagccacatcacggcacgctgaaagaggaaaacttaatccttcatagagtgcatgaagggatacatagattatacatggattttggagtcttggttctgctgacagccgagttctagaaaaaccttcagtcttttataaagacttccagtctccaagtggaagcaaagatggttagaagcctagagaaggatacagggcggagctgatagggtttgaacactggtgattgtgttctagacctttccccgtgtctgtccctttgtttctcagataagtagccttaacatctttgttatttataatttttcatattttaaaaattaaactgtaattatgtcatttcccctctttcctttcttccctccaactcctcccatgcgcctggagcccctgctccctcttagaatcatggcttccttttctttagctcttattatcacacatacacacacacatacacacagacacagacacacacagacacacacactcacacagacacacgcgcgcacacacacacacacgactcacacacacacagacacacacagacacacacacacagacacacatacacacacagacacacacgcgcgcacacacacacatacacacagacacacgcacacacagacacagacacacacacacccttaaatacataaatacaacccagtcagtctacatgatgctccacaagtggttgtggcactcatggctccacaagaggccgggcagcctccgttgacatgtctataacacaactcctgcacctaaaaagctcatggaacatcactgggaagtgggaggaaacattgccggagccggaaggaacaggaagttcctgtgagatcctgtctcctagacatgtcagaagctgcacccattaatcctcaccagcaaggccgcctaaaggaaacctgaacgaggacgacagcaataggcatgcgaaggagaagaagctcaagagatctcaactgtagacaaagaactccaagcagctagtccataatgctgagagcctgagaaatagccttccccagggaagagcacagcagttggttatccaaccccgaatggtcagccctgagagtgtacatatacaagtgacattacacagactgaccgggctgtatttgtctatttgtgtgtgtatccaaggtctgtgacgtcacgatgacgtcactagctctgggtagttaactaggttcccagtgataagcatcctttcccttccgttgagagctccccaagtctgttgagtgactggtcactgcttcggtatgagtgtctccactgcacccttaggctgtcaggccgtgtggttgtcattgtggataggtgtctggggtaggactgtggattgcttcccttctttggaggtttgcctagcaccttccagtagcatgaaagctatcttcatggacaagtagccttacttttgagattaagaaactaaggtgccatgagacttagtaactagctagtcagagtagacagagtagagtagagcttgattccgagactttctacggatctccacctgacagccgaagtctgctgggttatggcctgcagccctgccagttgctctgtgtgaggactgccaaacccagggcagactcaggagctctgttggtgatggcccttagctggctgcttcttagctagggctgggctccgctgggtttgctgtgagcgtgtgggtacacttgaaaggcaacagtcaccgcctcagaggttgtgcacttgagatcattgatgccatcttttttaagatttggacgttttagtccttaaagaagataatttgctcccagaatggaagagtaggattgttgcagagactgggtgtggcctcctccatcgatttccaacccactgttatttaggaaaagaggttgataaaggtacatcagaaaagagttactgaggttctaagggcattccttactgtttttattcttattactcatttttgttgttgttgttttgagacagagtctcatgtagcccaggctggcgtcaaacttgctatagagtggaggatgtccttgaactcctaatgccccctctctctcctcctcagtgctgggatagcagggatgtatgtggttatgtggtgttggagttcgaacccagggcgttgtatgtgctaggcctgtgctctgccaactgagttctatccctagcccctaagaatttttattaatcaatgtaggcattggtaagtaagcacctatgcaccatctaagcaagaaagcagcattttcatgtgatgatgtaaatctacttcttnnnnnnnnnnnnnnnnnnnnacacacacacacacacacacgcacacacagacacacacgcgcgcacacacacacacacacacacacgcacacacagacacacgcgcgcgcacacacacacacacacacacacacagacacacgcacacacacacagacacacacacacacctaaatacataaatacaacccagtcagtctacatgatgctccacaagtggctgtgaggtgccggcagcctccgttgacacgtctataacacaactcctgcacctaaaaagctcatggaacatcactgggaagtgggaggaaacattgccggagccggaaggaacaggaagttcctgtgagatcctgtctcctagacatgtcagaagctgtacccattaatcctcaccagcaaggccgcctaaaggaaacctgaacgaggatgacagcaatagacaggcgaaggagagaagctcaagagcactcaactctagacaaagaactccaagcagctagtccataatgctgagagccggagaaatagccttccccagggaagagcacagcagttggttatccaaccctgaatggtcagccctgagagtgtacatatacaagtgacattacacagactgaccgggctgtatttgtctatttgtgtgtgtgtgtccaaggtctgtgacatcacaatgacgtcactagctctgggtagttaactagtgctaagcatcctttcacttccgttgagagctccccaagtctgttgagtgactggtcgctgcttaggtatgagtgtctccactgcacccttaggctgtcaggccgtgtggttgtcattgtggataggtgtctggggtaggactgtggattgcttcccttctttggaggtttgcctagcaccttccagtagtatgaacgctatcttcatggacaagtagccttacttttgagattaagaaagtaaggtgccatgacacctagtaactagctagtcagagtagacagtgattcaaagagcttgattccgagactttctactgatctccacctgacagccgaagtctgctgggttatggcctgcagccctgccatttnnnnnnnnnnnnnnnnnnnnnnnnnnnnnnnnnnnngctgggctccgctgggtttgctgtgagcgtgtgggtacacttgaaggcaacagtcaccgcctcagaggttgtgcacttgagatcattgatgccatcttttttaagatttggacgttttagtccttaaagaagataatttgctcccagaatggaagagtaggattgttgcagagactgggtgtggcctcctccatcgatttccaacccactgttatttaggaaaagaggttgataaaggtacatcagaaaagagttactgaggttctaagggcattccttactgtttttattcttattactcatttttgttgttgttgttttgagacagagtctcatgtagcccaggctggcgtcaaacttgctatagagtggaggatgtccttgaactcctaatgccccctctctctcctcctcagtgctgggatagcagggatgtatgtggttatgtggtgttggagttcgaacccagggcgttgtatgtgctaggcctgtgctctgccaactgagttctatccctagcccctaagaatttttattaatcaatgcaggcattgtaagtaagcacctacacaccatctaagcaagaaagccgcattttcatgtgatgatgtaagtccacttcttcaattcctgtatcacaagaagctaactggactctgggctggagggatggctcagcggttaagagcactggctactctcccagaggtcctgagttcattcccagccaccacttggtggctcacagctatctgtgttgggatctgatgccctcttctggcatgcagacatacatgcagggagaacactgtacataataaatgaatctttaaaacaacaacaacaacaaaaaaccaaacaacaacaacaaaaacccaaggtgatggtacctaaaaaaatacacccaaggttgacctttggtctccatcataaacacttgcataccatgtgcatatatatatataaaaaaaagataactaggattttagtcaagtcaagttttggaatactatttttgtttagctgtttttatcatgcgccacacaaatttctttttttgtcatgtaatgtgtaaattttcataatcattaaacttaagtttgagaagaaaaatgagcagtcaaagccctttcttttggctactttgcaaagcctgttcgtgccaggctcaggtgcttacagtgggtttgagtactgagctcagatcgctaatttattcttgtatgtaatgtcaaagattcatttttattacttttcagtcatgtatgtgtgtctctgggtgggtatatgcccataagtgtaagtcccctcagagtccagaagagggccttggatggatgggcctgaagttgaagttattatagctcttgagagctgcctagcgtgggtggtgagaacagaactgggctcctcttcgagagcagtgtctaccgttaacgactaacctgtctctccagcttgtatctaatttgcctttaaacagcttttaaaatgcacactgctgctgtgttgccgttctctcgttctctcgttatggcttgagcatctgtttatagctgtgagagccctgctaacgtgctttctcctctggcggcttccgttggcaggtgtatctgtcaggcgttgcacgagaagatcaccattttagtgactcaccagttacagtacctcaaagctgcaagccacatcctcatactcaaagatgtaagtaattcctttaaaaaagcagactcggagtttgttaggagattttttttttaaaatacagattttaagcagtgggcattcagggaaagaaatgcccttgagaagaaagtaaaacagacccaagagcaatgttaggggtttcttgaaggcgcgacctgagtgtgagtaacttagatgtccattgaaccagctagagcctcaggtgtgttgaaactcgggtttcccatcagagtgtgctccagggactccccgggaagccgggaagctctcttcccttcctttattttccgtccgtttcctggagttgagattcaaagctttgaggatatccaaaggacttctagaaatagcagtaggaggtctggggatgtggccccattggaagagagtctgcctgacatgcacaaaagcctgggtcacgtccccagcactccatccactgggtgtgctggtgcacctctttattctcagaggtagagatgggaggatcagaagttcaaggtgttcttatgtagagcgttcaaggccagactgggatacatgaaaacctgtttcatgtgatcaggcaagcaagcaagcaggcaggcaggtaggccggccggccggcaggcaggcaggcaggcaagcagataataataaggacgaccctagcaggaagcagaaatgtcagttattagtcctcatacatacagattataaaattgctccctcaaatctgcaagctgctctagggaggagattaatgatggcgaaggtactgttttcttagaggttttcgtttcgtctctccaagacctaagtcacagtagataatttggaagttacatcttccatgtgtcctgaattgtcatctactgtttgcctaaagggtatctgtactggctggttctatgtgtcaacttgacacaggctggagttatcactgagaaaggagctttagctggggaaatgcctccatgagatccaactgtgggtcattttctcaattagtgatcaagggggaagggccccttgtgggtggtaccatccctggactggtagtcttgggttctataagaaagcaaggtgagcaagccagtggaagcaagccagtaaaggacatccctccatggcctctgcatcagcccctgctttctgacctgcttgagttccagtcctgacttccttgctgatgaacagcagtatggaagtgtaagccgaataaaccctttcctccccaactgcttcttggtcatgatgtttgtgcaggaatagaaaccctgactaactcagtatctttcacaacaaaaccagtgaatgtgtgagcagccccccactcagagccgcctggctgctgtggccacttgatgctgccctgcacaagtgcttcgctgtgctgattcccgacacagtagcatggcaggtggtcccttgccaccataggcctccattccactcagtaggggtgagaaggctcatgggacagtgacaggaaaacaaagtgactgctgtgcctttacacacagctgggacagggagggccaccgaggcagatggacagcttggagtctccatgtgtgtgccgagtgagctgggcctagagggagttggggttagagcacaggacagtgacctggactgacatggcccctgttgttttatacctagcacggagggagtggggtctcctctgtgatttttcctctcccttcccacccccttctcactaggctatagcagtggcaattagaagtcagccttgtagttcagaaggttgaagaatatgcttaggtcggtgagtcagtttcccaggactgctagaagggacggttgtgagctggggactgaatatgctaggaagttacggtctcacggggccgaagcctgctggtgtgttaggcccaatgactgagctgtctctgaaagctttggggacatctgtttcttgcctccttcacccttggcctcccttggcctctagctgcaattgttccaggttctatctctgtcatcataggtgcaggctgtgtttgcccagatgttttcttattactccagctggactcgcatgacttcactttcgcttgattgtctctgcaaaggtcatgtttcttcataaagtcagatttattcatcccaagggttagagctgcagtgtcttaagggatagggctaccatttaacccctgaggaaaactcatcctactgaagtcaaaattagcagaggtgctggtgacaggctgagtctcctccttggcatgttttctttggtgtatgggtgctaatcctctgcagtgggggtgggggaggggaagggggagggtcaagttctccaccacaggtagaaaacagccccctgagctcgctcctgctcatgtttactgccttctttattcagcatcgttaaccactgagaatttccaacataacgtaacaaaataaaagatagtaagacaaaacaaaacaaaaaaacacatcacattgaagtgggacctgacaagaagccgtgaacaggcacaagcactagagaccccactcactcacacactcgcaagttccatgacaatgctaaactggaagctataatctatacacagaggagatggtgcaggctcatgtaggccctgggtttgctgcttcggtctctgtgagttcatgtgagcttagttgatttggagggctctcctggtgtcctctattcctgctcactcataggccctttctcttcacgtctgtggttttttctgagtcctgggggagagatttggtggagaggacaagtcactttataagcagaaagggtcagagactcagtgtctgtgtttactccctctgcaaagcccttccggctgcagttgtggaagggtacaaggaagaacttatacaagaaacccaacaccagacacactgagaccccacctccccaacctcccaggagcgccacccataggaccaagtctttcatcacacaggaggaacacaaataattaagctatatctaaaccacaggatccttctgtaatctcttggccaaagatggaaatgacaaattcgcattagccagagttccccatgtttgtgtacagttattctcagagaggtagatcacacattcttacagcacataggctgtgtggtgatagtggagcgcctgcagaggtcctttagtgcttgcttgatacttcatgcggctaccaaagagaggcgaggaagctgtcaatcaaagtcccatcaaataggttctcaccacaaagaagattatagaaggcaggatgactacccccttagcaacaacttagtgtgtcagccgtttcctatccccctgggaagaaagctccgattcctcaggctggaaaacaattaatttcatgtgcagagagctgagtattctgcctgcagagccagtaggtatagaatagctttgtcccctgtctgcacatggtgaccgttttctgagatcctgcctcctgcagattctgagttttagtttttagtactcaacaatttattcgtccactagcagggaccctggagagaggaaggcctgctcttactattagtctggcccctgtctaacagcacagaggatggctgcccctttggccccctctctggaaatgccctgtctatcagtagtttcctcgtgtgtcttactgattctgagaggaagggcgttattgtgttaacaagagtgcaaatcgaatcttaccaattgtgttaaacaagtgtgcaaatcgagtcttaccaattgtgttaacaagagtgcaaatcgaatcttaccaattgtgttaacaagtgtgcaaatcgaatcttaccaattgtgttaacaagagtgcaaatcgaatcttaccaattgtgtaaacaagtgggcaaatcgaatcttaccttctaagtgccgcagggcgtggtgcatcaggaataacttcctaattctttagctgtcagactgttaaaagcccaaccgcactgggattttcctcagtggagcaccttgattggggtggggtcgcggggaggacacgggagaaggtggaacctgaccaataacctgaccacttctcacttcagagctgttctcctttgattcagtgcccagtactctcctgtgactttagataaatcatttgagtctctcttcatgggataaaacattgtgaagatatctgcatattatctccttgggtcaggaggaaaccacctgattagatgttgtgtggaatgtcgcgtctttggtgaggatcttaaatctgggggcaagctttagtctggaatttagactgggaagtctgcacgtgactcgtctccgagggggcagccagctaaggctggctaagttcatcctacctaggcagaggtgctcgctacacctcgctgacccggtggattctcccatcatctatgctttttgctcctttcagtgcccattgtgtttgggccgtaaagcacatgacaagttggttttatattgctgagctcctagaatttggcaggaagcacaactctcacttgggtggcttagttgagctactacatagttatcaatggggatcacagacccccaaagcaatcataactgaagaccagttggctttagccagtttattggagttattaagtacaaatatctgcctctaaaattccttttgttttagggtgagatggtgcagaaggggacttacacggagtttctgaaatctggtgtagattttggctccctgttaaagaaagaaaacgaggaagcagagccctccacagccccaggaaccccgacactcaggaaacgaaccttctccgaggcctcaatttggtctcagcagtcatccagaccctcgttgaaagacggggccccagagggccaagacgtgagttcatctcctgctccatggctctcttttgggtttacagaccttgtaatccgttcagtcactctgctggtggcatctgcgtttgtcctggagttggacctgcgactctaaggtgttatgaaatgtcactggtaggattaacatagagtaaaggggaccagccctggctgtcgccttctcttggatgtgggctggaggacatcattgacatccacagtggctatgctactaggagttccaaaggtctgtgtgactggtggatgtctgaagtttaggattcaccacaggcaaatctaaggttattttcgttttcattgctacttcacaactgtaattttgctactgttatgagtcataagacatgtctatgtgttttctaatggtctcaggtgacccttaaaggggtcacccacaggggtgaataccactgacttagggtcttgctgtgttacatccgatactttttgttatttgtagtccatttacaatgtaggtggcagaaaggagtttcttggcctatctttgatgctttttttttagtcaaggacacagatgctaatgtagcccctgacagactttcagagttagctccctctcttccttatgagcccgagggccgcatcttattcttgactgagtgtgcagtagtcagcatagattcatgtatgactttagggcatatgtctgtaccacaccttagcctttcaagcaagtatgcactagtgctcctttaaaaagaaaatcatctcggccagctggtggtgcactcgggaggcagaggcagggggattactgagtttgaggccagcgtgggctacggagtgagttctaggacagccagggctatacagagaagccctgtcttgggagggaaggaaggaagaaaggaaagaaggaaggaagagaagaagggaagaaggaaggaaggaaggaaagaaaggaaggaagagaagaagggaagaaggaaggaaggaaggaaggaaggaaaggaaggaaggaaggaaagaaggaagggagaaaggaaggaaggaaggcaggcaggctggccatcccatctcttggcattgacatggcatgggtttgggtctaggacccccaaggatagcaaggtttgagggagttcaagtttatataaatgcatcatgtgtgcagataacctgggtacttctgtatatttcacggcctccctagattacttataatttgcaatacaacataaatactgtatcgacacttgatacatggaattactggggaatagaggccaagaaaagtgtccatgcatgttcggtacagacaactatttccccctccgaatccttttcagtttgtgagagcagaacccatacatgctgtgtctgactacacttgcagctgtcttcgctgcccacatccccagtctccacaccttggatgatcccggcataaatggatgtgttatcctccctctcttgtagacgtttccactcggctgctccgcttggctagcagtttgagccattcggtcattcttggtgtcttcggtgttgcctttgagcttacagccttttgtgggttaagtgtgcgccctaccgccgatctgttctcccacgctggcctgctttcctgctgcattgcctgcagtcaccattcggaggcttttgtgcttccctttcgcttacagcccctcttaccttccgcaggcagagaacacgcaggcagtgcaacccgaggagagccgttcggaagggagaatcggcttcaaggcctacaagaattacttctcggcgggcgcatcctggttcttcatcattttccttgtgctgcttaacatggtgggccaggtacatcatgacacctgtgccctctcaggatattcacacatgggtttacagtggggtgtgctgtgtggcagggagcagccagagtgttgctaaccgcagtcgagaattgtatagaagaaaaaaagtggggttaccttgtaagagcttagaggtaacaccttgtctgggaagttggccttggcacagcctgagccagctgaccatcctaatgaacgctctgggaccctcctctccgtcccacgtcttcagccattttgagtttctagtttggaagtcacgcaagtcttgccaacgctgtgtctcgcttccctccgcaggttttctatgttcttcaggactggtggctttcccactggtaagttcttctggtcagaattaaaggctctacgatctataggtagtagcttcattttcccataggttttaggaagaggtgggatctgttaggccttctattctaaccttcatcccttgaagaggaaaagtgaaggcttgctggtggggtgtgacccacaccactctttatccatatctggtcaccacctgcaccttgagaactgaacatcaggggtcaaagtttgaagggcagccgcagaaagcgttgtgtgagctgagaattgctttctggcacaaggcctttctcctaagcttaggttccttttgtttttacctaaatccataccttagtaatttttttccctcccatgttccacccatagggcgaacaagcaaggtgcactgaacaacaccagaaatgcgaatggaaatataacggagaccctagacctcagctggtacttaggaatttacgcaggtaacgtttagccatttggtctgttatctgagggcctgaggtgcttacgatgggcctgtgtgagtaaccagagctcctaggagtaattcagtaatgtcttagcagattaggagactccgtcgcatttactctgtgaattaattagaataatttttttttttaaatctacccggagaaagaggttgaatgaagactcttaatttgctctgtactggattttgaaagttaaactaggattgagcgttcagaaaaccagccactggaaatatgtgactattgtctattctaataggtcgctttagctaaatcttatatcattatatgaatgggcagggggattagaaacggatccccaccctgtggcttggattgttccaattctgactgaataagcccaggcctttattgaacttggatggaatcctctggcagcaaggccccccaaataaaatcattatcccctcacaggtatgcaaagctccctacagcacactgctcatctctcgggcttcactaattaccgaagagggaagctaagcagggagaggcccagtgtgcaggaattaaaactccttctctttcctaccttgagaccaacaatgttatcacgtctccgactgtgtgattcatttaacatttggtttgcccgactaatattaacaccccactctgttttcacaagagtgcttggaaaaagtatagagttagttttcaaaagaaaatcctcatctaaaatttcaagtgttcccacgggagacaggctttccttggcttgcacgaattaccgctgttagaagccattcacccaggtttagaacttactttgttgacgtctccctaagaaacctaaatccactgactggttaccgtccctaccggcagactgtgcgaaccctaaagggaaatagatccattatctattcaagtagcctgggcggccaaggaaaacgcagctgtatggagttttagaattaagtagctccaggggttaatgctgcttcattagaaggcaacatgtttaccacatcagctcttcccggtctttgtagcagtgtgagctacaagctaatggaaactagggaagcagagttagggggtagctcaggatagaatgcttgcctcctgtgtgtagcatgacacagcacaccatgcctctccacttcctatccgtgcagaatggttcaagaatgccttaatgcaacacagagtttgaacactgctcatttaaactgtgatatgtttccatgagacatgcattgagtgactagtttactatttagttatcttatgttaaaacatgatttgtatgttctcacaattcaaccgtttcaaagttttcctgtgtgtaagccaatgtgatattttcaaattctttaaagccactcagggggtttactacaaggagggtttaccggtctgaccctcttcccggggagcaccacatgatggtatcagaacccaccacagtgctagattgggggacttgtaaataccagctgggatatgcaggcagaaatctttcctctgagtgcttagtaggacatgcaatttgtttttaaagcctgtagtttatactttatctgcacataggtattttctattcagtaagaaaaaaaaccacttagtttttgtcagtgtgtctcataaatgtgcatcgcctttatgtagaacctagatgtttatggggaagatcagagatatttttataaactgtcgggttgtagaaggaagtgtgtcatttcctcaggatcctggctttcctttatttcaggtctaactgcggtcaccgtcctttttggcatagcgagatccctactggtgttctatatccttgtgaacgcttcccagactttgcacaacaggatgtttgagtccatactgaaggctcccgtgttgttctttgacagaaatccaatcggtaagtcagccgccgagctccccagtaaatgtgtcttgttaaggcgtgtactcacgcaacgagggtctgatggcattctggtctttgagaaaggaggaagtccctctgcgtgtctgcccattctctacagtaagcttccccaatacttctctcctccaatagcaaatctacatatcagctgcatggacttatctcggtgtgtgtgtgtgggggggggcacagcacacgggcactcagtttgcacagtgagttgtgaatccagttgtcactcggctcccagagccccccacataacttgcggacagagtgtagtcgcacagtttctaagacacctactgcatgtacacaacattggcctgtacccccttttaaagagtctcactagaaggaccgccctctgagccggaaatgaggggctgtgtgcttgcttcttgtcttgggggcgaccattccttttgtgaactgtgcggacttcgacctgactgataatgaagataagtctaaaacccccaaagtgtgatcaccccttggtaaattttattttatcttgtttattatgatataacataaatatattcgttatttggtattttgaggtagtatcttgctactgtagccctgggcagactggaagtcactatgtagcccaggctgaccctgaactgatgaagccctgggcagactggaagtcactatgtagcccaggctgaccctgaactgatgaagccctgggcagactggaagtcactatgtagcccaggctgaccctgaactgatgacaactctcttgtcttttcctcacaagtactgagacgctggcatgcaccacaacattcgttttaacactgtcttaaaaatgaacagcaacccccactttccttctccataaccttaaactctgtggcttataagtacgcgtttgttgcgtgacatcatgcctttgcatgaacggatagcggcccccatgatggtcctctgacccatttgcttctgcaggaagctccttggtccaagttcctagaaagcgttagtcatcctcacagaccgtggtcacctgggggtcagaggtggggctcgggcagctttgtttatgcaggtggaaatcaatgggacctgtcacggaggactgtggtaacacagccgccattaaggagctgctggatcaagagcagagcatttgcatagtgtcaggtgagcaatttttgaagtaggatgtgttggtgggaagtacagaccctggtgcctgtggctgtcttggctccctgtgagaatcactggttaaggctgtggcagtgctcataggccgggtactcaatgtccccgcaccttggcattcacatacgtgaaatggggacactgtctgtatctatcatatttaaaactaagacttaagcaggtgagagattttcagtgctccaagtggcttcagccccactgtcggttcccagcgactgagaacagtgactggaagttcaccggaagtgcagtgttcttgcccgtagggtggaattccgacctttcctgttttacgtgattgttgtgaaccacagttgtcacacgcggtcgggctggggctgtggtcagaagttagctggaggatttgctgctgtgatcgatgtcgctgctcggcttagacctgagagttatacttccacccggaatgctcagcaggcagtgctcttctgttgtgactctgctcccggtcctactaaccaggtgcttcatgttcgagaatcgtaagcttttccttgtaccaattttcttatttattgaggggtttagggcccagtctaaatcctgggtaactaattttatgtcaagtcagaaggattcatttggcttctctgtcctgagtctatgagcaggatttttttccttcaatgaaaacagagccctaatgaaccccaaacatagtccttacatgacagaaatgtaaacacgaattgtttacctcttttagtggagtatttaaaataaaatacattttaaaactttttaagacttacgttttcatatgagcaaaattctgcacattttaaaatggtgaagagacacagcctatggattatgctatctatagtctatctataccattaattatttatgtactgcagcggtttatgtaacaagaatgggtacagaagcatcctgttgtgtcatgccgtctcggctacgcagcgtgttggctgagcaatgtaaagacacaagcaacgtgtctttagaaggtgttgcttcacagacagctcccaggagcccctgaggtcagctgcagtgcctcgtcatctctgcatctgggcatcctcccagagtctagataatgtgagggaactaggaagatgcttgccagcatccagtgtccagcaagtgaggcacgggaggacaatgttacagaaacgtgaggtgaggcctcatagctttgcccctgcagagcccctcaccacctctgattctcagagaccatgtgccgtaatttagacgtgtcttggtcttacagtcatgggacttgccatgctccctactcagtactgctatctcgtggcccatgtcctccagaccctccgctctggtgctgatcagtgggtgacctttgcccttgtccagagacccaggttttccttggacgctgctcaaaacactggctaccgagccttcaccccaagttcactgagtggtacttaacggagagagtgagtggggtcagacctgaagatacaggtttcttcttttggcccgagattgccaaaagccaggtctccccttttcctcttgatttctttcctcttccttcttctcagcgctccccacccctctcctttgaggtgacttagaggtggctcttacatccattacagggcctcacatctcagctgcagccctgatcttccacaccaacatttaccttccatgtgtagcactgcagttcaagaagatgtttataaacaaactctggtcaagggtgttaacgcaagtagcaacacccagcaggtttgctttgccagggagcctggacccgggaacctggagcctggagccgggaacttctgacactgagcaccagggggcagcgtgagctgcagaattgcaggcgcagagcccagagagctcacccagcgagacctgggattgctgttacagccttcttgggaaattcccccttcctagtttgtgcctttgtaccttgtcagactccacagaaaatgttaaaaagcattttcttttttggccatttattgtgacagaaacattagtcaaaccaccggcagccctcctcccagcccctccggggtgcacagcctaattcagaagagtttttttatttgtgaagtcacctacgagcccagtttccctaaggtgcattaaagaaatccttacctgcttcttgggaacacctaccatttcagaggacactccgattccccactcaacactagacgcaggagtaggcggaaagggtcctcttggctggatgtatttgattcctatagggtcagttctgacttagtgctgttttcctctcaaaatatgagggttcgggggtggggagaggagtggagggggagagaggtgggagaggagacgatcactgaatttgaggttggtttccacgatgtccgaaggcacagtcctttttttccatccaggcacgcaacatccccttttgcttttggaaacgggagagtggctggtagtggtcccgtcttctgctgcccagttttggtacaggcgcatggctgacagcatcaacttcaggttcacagaaatctactcatttgtcagtctgcgtgggagaaagagagttgctggcgccggctgacgggcttgtctgttttctctgggagacacagagttaatcttggggtggtggtcagtgtgtttattcacatggccgatttttctgccatgtgcgtgagcactggtgtgtgcagcatcacatgatgttaaacaaaagtatcaattccgagtcaccatttttggttgagtatgtgagaaataaaatgctggaaaagaggggaaagaagtacactgacttgtgttatttaaacatatatttatattatatatgtttaatgtgaattatattaaattgagaatgtcaccaatagtcctagactttaagagagactttctcttacccatcctaataaaaaaactctagagattgcatagtgattaagattctcagctcgactgagtgggaaattgggcttgtcgatgacatcacaaacataaactattctgaattaggctctgcatccgggaggggctgggaggagggctgtcagggaggagggctgtcagtcagtggtcttaatattttcctggctctccagcccggaaagagagcgttcagaatctggggtaagttgctaaagaactcctgaggaagtgagaagagagttgaagccacatgggagtgtaccatcagaaaggctgtcttgctgcagcattgatgaaaccgattgtcaacacaccttgtctttgccagaaaagcaagagaagaaagtcctcaatagagaagaaatctaattgcaggatacccgtgtgtttattcagtcccagtgaccactggagttagtgctaaatgcatattttaacaagtataatacagcactgtcaaaattaccttgacaataataggcctgttaaattatagctctatacatgtggaggtaaaatggctctgcttagcacacattaatctatgcctgttcacacaagtgcttctgctgagcaggtagcatgtttaaacaagaaatactggtcttaaaacctctgatttatggtaggtgttttgacacagcatcattcaggcgatttacaaggcacggcttcgtgttaaaatatctcaccggagtcatcatttggcaccgacataaatattcagcggtggtgctggaaacgggtgagatgcccgtttgtgccagatcatcccctgtgtttcctttcaagtgagatctgccgtggatacagctacaagagatgacagtttcccttccttgagagcggatgagctgtaagaagttgaaaataagaataacggcgtcttgacagctgccgtggactcatcctgcccacgttggctttaattctggcataaggcccatgggttaaaaaaaaaaaaaagaaaaaagaaaaaagaaaccaaacaacccctttccttgctttatgcacattgtaaagaatatatttacatgtacatgagttaagtaaagagaccttttctgttcaaaggaagaacttagtcatcggcagaaaagctttgttgcaaaacaaaaacacacattccctgtctccttttttccttgttaataataacaaacgtgagcgagtacagaagggttacataaaagatcgcgttaatcatcgtgatcctcaatagccacgtaaatattatgttttctggtttgaattgaaatagctaatggtttgaagtaggtgtggcaattaattcctgtcaagttgtcacgtattaaaaataatgtttttttttccacataacaatggttatatgtacttaaactcttatgggggggtgatattaagtgatattttatgggcgttgcccatttactgctaatagcataataaaagcctttgttataagtttaaatagttacatagttacatacatctgattgcggttgttatttaatcagtgatctctctaactgacatgattatagtacttttctacagctggtacacattacactgttttagtgtacggttttaaacctgctaaaatgttcctattgctctttatttgtggattttctccatgataaattgggcatggaaatactagcaggtgagtatcacacacacacacacacacacacacacacacacagagagagagagagacagagacagagagagagagagaacgagctagctttgtgttcacagttgtcaaatagaacatttagaacataagatttggggagctgctaacctgtttaaaatgatgatcatgttgtattacagaaagttaaaaggatgacattttgcttaattatttcaaattattttccactaaggcatatattaaatattacatgcatatttatatttcatccttgtccactctatcataaatgttactcattttgcaatgaacaaaactcgggggaaaaatctcaatattggcatcattgagcctgtgacattttatctcacataaagtatatatatatatattttttggtcttctatccagtttatcatagttcttgttagaatgatagttattctttatagtatttagtatgtgagttaatgctagccttgtgaatgtcttctgtgaaggcggatagttctatgcctacgatgttaagtgtgtcatctactgtgagccatccagtgatttgggatctgtgctgtttgagtttccagctcatttagagctcggcatgtgtgcattccttggccattgccttctgggattgaaggtgcaaggtcctacagtgttgtattttgaaagatttctccccaatgctagttctagagccagaagtgcttcgagcaaaaattatattgaggaatgttcataatgtaagttccgcttttgtgcaacatttccagagaaaatgggttggagttctgtaccaagttcatcatgaataaatattgaagctaggggtagtctggctggaataaagcatagtatggggtattgtgtggaagtcagtaaggactagaattctgtttgcttgctttttttttatagttaaaaatccatgtcttgtgttagctttgtgcttcctgctgtcttcaaacgtacctgttatttcatcaccacatttccctgactcaagatcgggcactttgtacttgatgagtaaacgcatattggtttgatagagcaggcgaaagctttgtaggtgcagtctcatctccccaaactacgcccagggagaacaatggagattgatggtcattaggatatgaccgcagccttttgttttatagttagcgcatgtatggaatcaagctctgctttcctgagagcagctgacaagagatcacagatagatcactctagaccgagtccacagagtgggagggcccggatggaaaagccaacactggttcctcagaagctgtgattcataatctatgattctggcccctagatgtttaccaactgaggagaggaaaggtcaaacacccaataaagttcgtgaaaggggacttttagccttcccttaacttggggtttggggtgctttcatagttgtgttttataaactgtgtggcccaatgaaacaggtgaaaacgcatctgttttaagacttgggccgagtagagggtgggaggttaaggcagactgaggttctctgctcttatctggagaggccacagaccagtgattgattgcttcagtcccccggcctcggcctccaacaagtaagcagaggagtttcttttctcctcaggcatctgttggttatcttctatggacctctattaaatctcatcttcacaagcataagcctaaatagccctagacaacaaattattttttaaaaaacataaaaataacccagacactgttctttgattcggcatagtactgacacaattggaaatttccagttgtgggtggagctctagattcacacaggcccctaactcattcccatccatggcctcagagtggatctcttcagcatctgtgacatcagtgactggctctgatgtcatgaggtttccaaaagttcttctcctggtacttcagggtgaattgttttcaaactggaaccatgctggtgggaggatggagtttggagacttgagtacatgattctgtatttaagatcacaattattgagttatagcagactcagaaggctctactctgacccagacactttcctgatccaccagagaagtcaccatgcaacagcttaaaccaggaaccgggcaggggcgtccctttatgaagacttgtgtgcactctatgccttctagaagtctcaacaggaaatagaatacaagcaatgatattttcctctcttagtaatattatcttgcaatcagccataatccattgagtattctcattcttggaaaccaggattaatctttgaggggaaaaatccccctctttaagtagaagccctttaatatctagaagaaaaacttgacaagcttcaaagtgcattttgagtggaagtttattaaaatgctgtggttgtgtagaaagctatcacagaatcaagttctccggtctggaaattcttttgctttcatttctttctttctttcttttttttttctttacatttgcattttaatagattgtatcacgtgggcaaatgtttcaacctcctgaacacctggaaagtctattttagacttgttctgggtgtttggaaatctttagccagacgttattcagcatgcagtcagtgtcatccaggtgggaaaatcctgcctgcaggtctgcctttgctgcagagtggagcaccgtgcagcttgtgggaaaacatccttagaacaggtagccctgcccggggtggggggcggcaacccctcctcctcactttgggattagtggatagcttccgatttctcactgaacttaaagcagaagtttagagatttttggctcaatggctggactccttttgagctcagggaagcctaggatctgatctagagatcagaggcccagttaagaacagcggcagccggtacctaggacatttgcaaagctacttcagtgctagggtatttgttctgacatatattttgtcacgcgtataattgcacacatgtagatcatctgtgctttatggcatagtcagagccctggttaatacattttcattacttttaagtacataggagtagaagaacaatcccgtctcaaaacagaataaaacaaaagaaaacaatccaacaagaatagatgcacaaggaaacactgctttcttgtaagtcatcatgaccaattttacagggggctggagcaatggctccgcagttgacagcatcagtggctcccgcagaggacctgggattggtttccagtctgtgaccgactcaccaacctctctgaccccagttctagggtaatcaatgcttgcttctgacctctgcaggtgttgcgtacatacatgcaggggtcatacatgtacatacaaacactcatacacataacagttttagataattaaaagaaaaatttcttctgttagagacagaatggtctagaatcatgaaattaactgggggcagggcagtgtgtggactataaatttatttttccttttttggagaacaagatagtattgacatattaaaaactgtatctcatgctagtctgaatctctctaaactccatattgtttatcataaagatgagagttaaacatggtttagtgtgtaccatagactgaagttctcatcagtaccaacttttcccttttttgtccatccatccgtctgtctgtacgtccatctttcctgtttttttgtttgtttgtttgtttgagacagggtgtttctgtgtagccctggctgtcctggaacagctttttgactgggctgaccttgaactcacagagatctgcttgcctctgcctcctgagtgctggagttaagtggaaaagaatatggacctcttcatgaattcgcatgccttccttgcacggggaccatgctgatctctgtatcgttccaagtttagcatatgggctgccaaagccttcgcatggtgctggtcttcatgtggccatgttggtgtgaggaaaagtgactgcattccttccctgtggtggtgatcatgtggcgggcactggaaagtcattctcccttgactttcagactaaataagtgggtgttgacatcaccagccaagccagcatgatgagagggggcactgtgtaatctagacatcagctggttatcacaaatccagatggacttctcttcctttaggagtcatccggtctgtaggccaggcaagtacatccagtgcttcttccataactcaggagctccatgcgaagagcttccgcttcctccacgccacattgtctgagcgagcatccttcatccgcactccagaagctgtaggagatgaaagctatttagttgagctttcaggaatgtttctagaatgttctttattagaattaccaagtgctaagatgacaggtcaaagtgtgagcttttgggctgcagaacggggccacctcagttttggatagatgttgcacatcatctatcatctttttttgtttgtttgtttggttttttttttttttttttttttggttttttgagacagggtttctctgtatagccttggctgtcctggaactcactttgtagaccaggctggcctcgaactcagacatttgcctgcctctgcctcccgagtgctgggattgaaggtgcgtgccaccacgcctggctgcacatcatcttttaaccccctccatcctcacatcggcttttgattgggcgtcagagtggacagaacactggttgtcgactaggatgttctgggttgaagcagctgtcctcagtggcgctcatggtcccgtgcgtgtgtgagatttcgtttctcatgataccatgtgttttatatcatttccttctgttaaaggtgtataaggcagaaactttggaaatgaaccaatgggtaggtttacccagcaggaactgcaatgacccctccttaatttccctgtggtgactgcgagccaaggtagtatgtggtgaagaacataactttggaggctacctacctgtctgcagatcacagcctcatgcatgccagactatgaggccttctcaaactgcttccaacaccataagtagcatgggattgatagaactctgtgtgtgtgtgcttgcgaatatgtggatgtgtgtgatgtgagacactgcctggttcataggtaattaaaattgattggttgaatttttcttttttgactgttaaaagatgacatgatacaattttagggattttcctccctctgactgacaaattctaaatcaatagcctaggaagatagcttagttctttttctgttactgtgataaaacaccagaactgccaacaacgtagggaagagaaggtttattttgacctatggttccggaggagtaagagtttgtctcagagtggggaggagcagcaaccaacagcagagggggcgtggcagctggaccgggaagtgagagctcacaccttcaaaggcaggtatgaggcagacactgtgacctggaagtggcatatgatttaaattctcaaagcctgtggggagcgggtgtggcggcagtcccaaaggcgccagagactgcagctaagtcatatgacttgcacctgacttcctcatataagacacaaacatcttgagtactgcgcaggtgtaccaggatacaggtgaatccaatttggtggagatttgcccctgctgccctgattagctgaagcctcgtgactggcgagggggcatggcctgcagtgcgtggatgagagagagtataaaaggagtgagaggcccagggttcgggggagatatataaacaagggagatataaaaacaagggagatataaacaggggagatataaaaacaagggagatataaaaacaagggagatatataaacaagggagatataaaaacaagggagatataaaaacaggggagatataaacaagggagatataaacaggggagatataaacaggggagatataaacaagggagatataaacaagaagaaacaggactgaataaatgtgtgcagaaggatcctgtagcagcgtcgttcttcctggccagttgagcgcgtgcaacaaaagcccaccccccagtgacgaacttcctccccagacagtgccaccagctagggcccaggcgttcaaatacctgggtctgttgtagacatttctccttgaaaccgttatacacgttcccatacgcagcgggtttgcgggaagcgtgctgtcttggctttatggaaaagcagatcacctcagacgaacaagcctcaaacgaaaccggcattgtgtggctttgttgctttgcgtgttttgtttttgtttttgttttcaatggggcttagcttcattccagagttcactttaaacttaatttggttttacaatgagagctcaattttgcatgtaagtaccaaacatctggtttactttttgtttgaagatgatatgactgaagttctgtacagaagtctatttgcaattaaggaaagacggtttgaaattctataaattgagttctatttaaatggcactttggaatcattccaggtgagaggatggttgtacttcctcggagtgggagaaacttcttctttttttttttttccttttttaacactattggcagttaaaatgtagagcttctatgtattcaccttttgcaaaaagcgtgaaaaatgacaaatttcacaagtgaaatctaaagttgacccaaggcagttttagattgttgggccttcaaattttattcctgggatgtttttagagacattctgtggtttgttcactgcagttaattctgggcactccttctccatgtctgtcaagcggtcgttctgacgcttcaaaacttcctcttgcgcaaaatacagttacggcagcctgagaagaaaatgagatttctagttggttcttcgaagctctgggttatctttttagaacattgaagggtgtaataaatcaaacagggcaaatataactttctactatgtcgactgccccattagcatcaataagccagcaatttagatgccataaactactggctgattctaatacccttgagagatatccagatacatagctctgggtggagagatctaacagaaaagtgcttgctgttttgctgccagtgctgaaggtgtgtctgcaggtggggagcccctggccaggctcttcaagaggggaagtcaacattagtcatgtcagagtctccatcaccagctctgtgctgacatttggtgaccctgtcacactataggatttctttagaaataattggaaagaattttttttttagatttatttatttattatacactgtagttgtcttcagacactccagaaggaggagtcagatctcattatggatggttgtgagccaccatgtggttgctgggatttgaactcaagaccttcagaagagcagtcagagctcctaaccgctgagccatctctccaggccctggaaagaagttttttaagttaagaaaaagctaagaaacccctaaagccgacaggttgtggaaagataccgaagggtttcacagcatttccctgcccattcctttgatgtctcagagatcagtcctatgacgggttgtgtctgttggcaatgacaaatctagcttcttatcaaaccgtggatcggccgagagtgggacagatttggcctccttccctgtgtcctgtcacttaacagcaggcttcgttcatttattttggcaacttaaacttctccaaatgttgtcagtttccttatctcccttcacctgctgtcttaacaatgacaacagaaaacaaaacacttaccctggtctctgactcccgagggtctgccatgtgggtgcacaattcctcttgttctcttgtccaggcctcttggtactgtccccattcatttacttgagggttgaaaaaaaccaaaaaaacaaaaaaccttaaagaacaagattcccacgaatcgttaattacagtgagaatttcagctcaacatttactaacctctcagcatgtctgtgtcctaggaatttggagaatactggatagtgtattctctgttctccacggatatcttttctgtttattttgggcatgtacatgtgtggtgtatgaaaccgtttgtgtatgtgtggtcgagtacgtgtggtggtcagaggtcaatcactctctcttattttttgagacagtctttcaccaaacctggaacttaccaatttggtgacattgctaccttgtctggccagcaggcctgggggggtgggggtggggagggggaagggggcacaagtctctgccttgccaccacctacccactgatgctggagttactgatgcacagcactgtgcttgactggagttactggtgcacagcgctgcgctttggggacctggagtccacccctcatgcctgcctggcaggtgcttcagtgcccaacactctcagcacctccttgttcattttctaaagatgtcttactaatacccgtggatcaccacgatccaactgtagtaacatttctcttttctggtaaaaattgaattatttcttctcaagtgagggtgggagtcatagcaatcggaaatacattaacattctctaaaacttgtgtgggcttagcagcccaccactcacccactaggaatctaacaggctgtgctccagaatgtgacatgtttgttgaaattacaaagtctaccttgagtctagtgtggaagtgagtgagaggcatttcagcttctccattcctgctttccttattctgtccagtcgactcttgcctccttgtttgtatcagtcttcgaaaggattttatatttggaaatgaattatttctaaagccacgagagaaagaaaactgtcatggaggaagagctgctgtttctggatgacagatgacaacttctgtcttatgcctctccattttcttgggtcattccccagtatattacccaacctgcatgtatgtgtgtgcatatgcctgcctgccttcctgcctgcctgtctgtctgtgtgtgcacatgtacatgccaagggcacacagctggatcttactgtactgctctgaccgcacttgaatgtcttgcctggaatggtcctactacaaaccccaggtgtatgccaccatgccaagtttttataactttatgaccaaccaaccaacatgtcagaaaagtgttagctctgagatgtataacatttgctattgtgcaggtgacttagaaccatgcttacatactgccatgagatgttctttttttttttttcctgagctgcatttttgagtgggaacactggaatatttgttgtaatcttttaaaaaatatagacatagaacacaaattttcgtggctcgttcctataatcccagcacttgaaaagttaaagcaggagggttgcctgggttcagggtcagccttgtgcgtgcatgtgtgcacagtgtgtgtgtgtgtgtgtgtgtgtgtgtgtagagatcagggggaagaaaacaggaaaaacaatttcaaatcttattaaagtgttattatcaactgttctaaaacatccataaagacaaattaagcacaactgcatattcttctagagctctttaagtggcctattagaaatgcagtataatgtttaataggattaattttcatagattattattatatttatttattttgtattggtagtgagtgtgtggagttcagaagataacttctagtacttggctctcttttcatcatgtgggtcctggggactgaactcgatcatcagctttagtgacaaacacctgtccccacagaatggagatttcagaaggtccttattggaggaactgaggtcaaacactggtggtcattttacaattccatgcgcctgttctctaggcccacagaaacgggagaagcacagggtgaacctccttagtgcagatattttgatgtcagacttgggggcaccagggctcacagtgatggatgactcctgggggtgactcacggggaaggctcacagcgatggcagccgagagtcgcggtgtacagatgcggaaggatcccacagacagacccagttccttcatttgcttatggagttaggctttggggcagagttcagagtgtggctccttgtcctttactcagaaagaacaaattatctcgttactcatttcgctggccggtcactccctcattttatatttacaagaaagtttaatttgtggaatatgtaccgagagagataagcaacaatagctaacaacagaacagaagagtgatgataatgtactatgattaaaagcatttaaaagtttgaattatttgtttctggaatgttccatttaaagaccgtaggttgctaaagccgcagatgaaggtgaggctcagggctttgtcctcactgttctgtgctctggagaggtcgacgtgtttgggggaaaagcagtctctgggagtgtgaaccctcaaaaaccaagtgttcagagttagataacttggtctctgttttttcccttgtagtttttcataagcagtaaacgatgggatagaaagctaatattagctatttttttttaatttcttatttagaaaacgtaagtacatgacttaattattactttttgtgcttttggaaagtgcattttcgtttcttttatgttttgatgttgtactgcttgttgctgtgataaaacacagcacaacacaaaacacaaagtttggagctaagacgaaaggatggactaccccagagactaccccacccgggggtccgtcccataatcagccaccaaacgcaggcactattgcatatgccagcaagactttgctgaaaggaccctgatatagctgtctcttgtgaggctttgccagtgcctggcaaaatagaacagaatgctcgcagtcatctattggatggatcacagggccaccaatggagaagctagagaaagtacccaaggagctaaaggtatctgcaaccctatggaggaacaacaatatgaactaaccaggaccccggagctcttgtctctagctgcatatgtatcagaagatggcctagtctagttggccatcactgggaagagaggccccttggtctagcaaactttatatgccccagtacaggggaatgccagggctaagaagtgggagtgggtgggtaggggaacagggtgggggaagggtattggggacttttgggatagcatttgaaatgtaaatgaaggaaatacctaataaaaaaattaaaataaaaaaaaaagaaaacgtaagtacatgacttaattatgactttctgtgcttttggaaagcgcattttcgtttcttttatgtttgatgctgtattacttgtggttgctgtgataaaacaccatgacagtcatggggtgaaaatctcggcagatggcaggagcccaaagcagcaggatccttcacacagcacacaggaaacggagaacaggaagtgggtcaaggttacagctcttaaagcttaccccaagtgatgaacttcccccatcagggtcatctcttctaaaggtcccatgaccatccctaaacatcaccaccaacagggaccagatatttaagcccatgagcctatggggacatttctcattcaagcgaccacacatcagtgctcattgccaagctgatagaatcaaaacccaccttggagacagaccactgggcatgtctatggggtttatcttgattacatcaatagaaatggaaagacccgccctgtatgggaagccctgttcactgggtgggatcctgaactgggatggcttctgaaggtggatgtggtatgacccactgctctgagcttctgccccttggctccctcacattgatggactaaaccctcaaactgcaagcacacgtgagttcttaactgacgaagttgcctttgctggcgtgttttatcatagcatcagaaaaagtagtaagaaaatagtttccattttaaaattacaaattcctaagttctaaacgctccgtccgttagcaggtgaacagccggtgtctcatttgttaatctgaggcagcaggcctgtgtaagacttcagtttctcctcttcagcctcattcctaagagtccttttgtgtgtttactaaaattcattatttacgcgctgataggaatagggttggggaaggtcttctaccttctgtgacctacaatttagttggagagattggatatagaacttaattcatcctcaatttgagcctctttcttaatagaagcctcagaagtcttcagttctttgaccctttgaccctttatgctttgttgaggacacgcactagacctggacaaaagccaggtgactctcctgattagttgttattgtcaacttgacacaaccaacctaaagctacctgggaagggggagcctcaactgaagaatcgcctcaatccaattggcctatggtcaagtctgtgaggagttgccttgacaggtgatagacatgggagggtccagcccactgtgggcggcaccatccctaggcagacccatctaggctgtataaaaaaacttgtagcaggatgcaagggagagattagccgtctagtggctcttgccttgagtttctgtcctcaaatgatggactgtgactgggaagttttatgtgaaaataacaaaattaacccttccctcctcaagttgcctttggtcagagtattttatcacaacagaaagcaaatagaagtagccatgtatctcaatggaaggtcataaagaagtgaggcttagttggaaagaacattgcccctaaagggccaaggactatatgtgttctgatttgatcagggaaacgctgctggtctgctctctctacccactccagtcttgattccacctcttagcatttttcatttgtcttgctaatttgtgtttgcttatgggccttaaactctgtagccaatgattgctttgaactcctgattcccatgtgctagcttgacagccatgccccacctctggtgtgtgtggcgctgctctgaaatgtttcatgcaagctagacaagcactgtactaactgagctacatggccagccccacctcgtagtgttggatatatcaacctgaacagcctgagctatctggcttgtcacctttgcctcctggttgtaatgtcttggtgaattaaaactctcttactcctttctgatgaaaatattaacagtttccaattgtgactagtaggttcattcagctttaagggaacctttcagagatgagccacaggactttcatctaagggagtggagtccatgacagccgcagagattggattttatttcattctgagcctacactggtattatttaacgcaaccaagttctgaatgctggtagagaacacagctaaggtcatgggctgaaaggactttgatgtcctgcagacgcctgatttccccctaatatgcatgaaaagcttgtgcggtctggctctcaggggatgaatatttgttcctgtgggttacagtagcagacatgacctgtgagtgatgggagatgtcgggtagaatacggatttggaggaaaaggggtaggaacgaatatgaaaaaaattagccatggaaatctacaaatttccaagactattccggcagacttttcagagggactttaccaggcacggcaggcatggtcccacaccctgcaagcggagaatttctgattaaaaaaaaattttttttaaccaaatgagtttgcattcaaaccctttttcctcgcgcaggaattcctactctttcccttcgcgcgttgattctgttggggagggaacacgccatagacggttgattcttaggaccataccgttccggaacagattttggtaacctgaattaatgaaatggtttgggagtcattttgctcatttttgcaagaggagactttgtgtagctgcagagtggttgggagggtgcgtgtgcccgtgtgtgtatacacaagcatacggaggccagaggtcaacattggctgacttctgcagttgctctccaccctagtttttgagacagagtctcaggagcctggatctcagccatctagccaggctacctggccagcaaaacacagggatccttctgctgcctctcttgcctaacttaccacttcaagctctttcctgctgagccatctctctagtccccaagagaaaactgaatcacttgccaggctttaatgtgtttgtgaattccttggtggcccttcacttgctatgggactctctgctgactcttgttcagcttctggggccaaaggccatctttggttctcagcaggtagacaccttccctcatgacagcgagctccatcatcagcacgccgggtgtgggtggtgggcatgctgggtggtgagtgcgtgccagagtagaggtgcagagacgcattttctgtggctggcagcagccatgaggggagactcagagaagtcgttggtgcaaaggcagggggttgaggaagaggagctgtcccaaaagttggggctggggacatggaaatagccagggactttggcatggactgtagaacggattggaggtcaacttggaacccacgggtttccatttgtgcagttgcctactctgtaccgagggctgtccgagcagttatggaggcacatgctggtacatacgtgattgaccgtcaaatattctgctctaaggcctttttgttttcctagtagagcacccactgattgagggtgttgtactaggggtgtggggtgagagaaatagagcaattgaataggacactgggtggctcagtatcttgaagctgcaaagaaggaacacagaaggaagagcaagacgaattcttccatttgttacattttaatcccgccttccttgaggtagaggcaaaccagaaccatataaatgtgcatgtcttttctgagcactcccggccccattgggtatggggctgtggaggtgccgaggctgggggcacttggggccgggagtatttatttttgctaccccccacaagcttaccctcacgcttttgtatcagcgccaagtttctgtgttgcagctgccacaggcagaggctgggacgttcctcttgctctgaacttgaccactggtgatttgtttgttttctcacctttactgacacctgggcttggcaatcccttgtcattcttcgtctgggtggtcaagtgccagccagacacagcattggtctcagttctcaccatgagcctctcacagtgtctcttttctcgatgggtaaataccgggagttcttctctgtacagtcactttatcttccatccatcaagttgggcactgtgtctcagactaggccaagaagtctacaaagacttcgggtcttttgttctcatgcgccttgaatgggaaaggcagacataaggccatagagaataagaacagaaggactgcatgtatggagggccaggaaaccagaagggtatgaaagggggagcttattggagaagctgggcggattggagaagctgggcggattggagaagctgggcttttggcatgtaagtgtctgtggtaaagctaagatgtgagtgcatggttggcttgagggtgagcctgggacaggggaagggcgtggctgagtagtgctgagtggttggcagggatggagggaggatagcaaacccaggccaggggagagggtcaggagcgcaggggacactctgttgctatatccctggagaaatagggggtcttttctgtgtgttaaggtgcctgttgacctgacctctctgcttgtccagtctccattttattgggaattccacaatggactagaataataatagtccacagtggactagaaggccctggttcacagttttatttttgtttatcctgaataggaaggtgtcttaagacgtcacagctttgtaagcatgttacaactggtccgagtttaacctcccagtctgtgagctggctaacacttactggaccagtactgctttcctcggttcctgtgagtgcctggcagagaggcatacaccagcctgctaggtctttaacccccagatgatttcatagggagtgaaataagatccgttcatgtgcatacttaagttgagaccgatacaaatggatatattgcctgcagttccttttattatgaatactggctgatacttaaatattcttctatcgttgttcgttcgagtgaagcctttcagagtctgtgcgtgtggagagcagctgcagagacctggcactctactttctgtgggactccatccctagaggctttctatatagtaaggcctttatcataaggaaagatggacattttcccttaaaaatacaaacatggcttagtggttccccccctcaacccccaccccgactcctccttccttcacaaataataaaactttggtgcttaatcagggttccagatgtttgtatgtatttatttattcggatatttatagtgtctttgtcaaagcagtttcgcctccctgggtgcattccagaaatgttaaaaacatacatggtaaagccaccaagatcaaagacctgggtcttgtgaactctttgcaagcacattgggtcgggacagtccttaaagcgatttatgttgagaaaacagaatgaaagctctcactgtccacggcgagtcttgtggaatgttctggatggagactgcaggacctggcaggacctggcctgaaggacctgccctgtcgcagactttcccctctgctggtgtgtgtgtgtgtgtgtgtgtgtgtgtgtgtgtgtgtgtgtgtgtgaacattgcttagaagcatcccaacagtgcaggacctgcaccctcctggcatctacagagtcgattctctttctatatgttttgttgttattttgacaaagattctcataatgtagtccagaatggctggaactctctgtgtagcctgggcgggtctataacttgtgatcctctgtctcagactcttagaggctagataagaagcgctcaccatcacaacatcatacccggttttctgtgtgttgctatctatgcccttgctatttcttcctttaaaatagagaaatgaactatcatttcaatcttcttaaatattgatcctgtaggatcttacactgatcactgcaagtatgggttttattgtctctatattttaagagtacgtagtatctacatcggcacgggaagcagtaaggcttcttactgtgagtggttaatggtgctgactagtctctgtaaaggagaaagaccctcaagaaagaagcattagttgagccaggcaggactggttaatggtgctgactagtctctgtaaaggagaaagaccctcaagaaagaagcattagttgagccaggcaggactggttaatggtgctgactagtctctgtaaaggagaaagaccctcaagaaagaagcattagttgagccaggcaggactggttaatggtgctgactagtctctgtaaagaagaaagaccctcaagaaagaagcattagttgagccaggcaggactggttaatggtgctgactagtctctgtaaaggagaaagaccctcaagaaagaagcattagttgagccaggcaggactggttaatggtgctgactagtctctgtaaaggagaaagaccctcaagaaagaagcattagttgagccaggcaggactggttaatggtgctgactagtctctgtaaaggagaaagaccctcaagaaagaagcattagttgagccaggcaggactggttaatggtgctgactagtctctgtaaaggagaaagaccctcaagaaagaagcattagttgagccaggcaggactggttaatggtgctgactagtctctgtaaaggagaaagaccctcaagaaagaagcattagttgagccaggcaggactggttaatggtgctgactagtctctgtaaaggagaaagaccctcaagaaagaagcattagttgagccaggcaggaccagttggtgttctgggtaagagggttttcagtatggatgtcctgcttgggtcgggttccgtatgaacacatagcctcttggcaataacagcagatcacctttgatggctatgaggtgggtacacggcaggcatgttcctggcttctctctggagcctctagcatcttaggtgttggattgaacggttctctcttctgctgtccagtgtgatgcccacccataggtgagagggcagagagtaactgcacccaaactgagttcagtctcagctcagcatctgtcttctccagctttgcgtatttggccagacatgtctagtattcgtttgagacaggctcaccactgaggatgctggctgctagcgtgttacccgacatgtgtagccttacctggattcctttctccagcaatagtgctgagaatgccctttagcaaagctgctggtgccacagaccataatattccctttaaaactggagatgccctttaaatattaataaaatcattttcaccatgaaactttatattaaattagtctgaaaaaaatcatactatggctgatgttttaaacaggtctactctcatcttctgatctcagtcttggaccatagactgggacttaactagaggtaaatgctgcctccctgatggatcatttggaattctctcgggcccaaagactagtcgacatttaaaaataggatttctgcatttttttttaatctataatgttttgggggcttcttgttatagcatattttcctgtaatcacttatggctagtgtttatgaacaataattgaaacttacaaagtaagtgaaaaaagccagactgcatacagttgtcaaaatatcttcttttgctaatatcagtattttctttaactttgttatttatttgtttatttttggtgggtgccagggatgaaactgggcgtgctaagcaagcagtccaccacagagctacatttccagactatcaaattagttagaacctttattagcgtatgaatggcataatggcatcttaacttttacaagaaaattgctagattataattagatcctggaatacagggttcaaggaaagaaacttagttctgaaggtcacatttatttatttatttatttatttatttatttatttatttatttatttattgcgacaggatcgcctgcagcctgcaaggcatcagacttgaagtgcagcttagggtagtccttctgcctccccacaactgctggggctcaatcccagggtcctgggcactgacacagaccgaaccaaaccccaacctctctcgttaactttacaattttactatctttgctcccttctgtggtggtttctaatttgtgaatgaaaaccttttaccagggccacctggcccacctcacgctctgctctcgtcctagcagggtaaataaacagggcgtgaacttggtctggattgagagtcttcctgacctgttgttttattctctgccttttagaagagaatgatgaaggcatgtggtgtgttaacaccagtgccctatcggctggctcctcgtacgggtcctgggtcctgatcctttggaacctggttttggctttaagttcagacttaatagaccacttgcagatactctgacaatgatgattggagttcctttgaggagctcaagcctacctcttcttcctaccatcttgctgcctgggcgccatgtctacctggagcatccatctgtcgctgctcagccagcatcaaggaacttgtcatcacttgagccatgtccttgtatcgatggatgttctgagatatcattttctagcgtaatgtgtggagtgcttccttgctctagatttaagagctgcccgcacccctgcccgtttctcgtcacaggaaacccatctcctacatgtacagaggaagcccgcagttcagccttttctccatcacacacccctccccctttataaaatcctggtatgtctccagcagctctttggctttctgtttttaggtcacagagtcccagtgggaacggaccgttggcgcctcccaaaggctgttaatcatgcttttggttacagagacccactaattactgggttccgactgggctcctgacttgagattgtgttggaaaaataggaggctttcgtgactctatgactgtgtcgatttagccgtgtcactcatggggcgggttctgtttgtgttgatattttgcatcttaacttggtggtgtttgcaaggcacgggaaggcaggcgtgcagcgggccctggagtacggactctgtgatgtgttttcgaggcaggaaaattgctgctgctttgcaacccctgctctgcagcaaaggatgcagaacggagtctcacttgttcttttgtggttcgggcgccactagtgtccttctggtcgctctgccctcagtgggccagccttctttgtctgcctaggtgcagcttgggccttcgttcctgagtctgtgttcttggctatgtttcttttgggtgtctccgcagaaacagaattgataaatcataagagttacggtatgtttcctgttttctggagtcatcacagtatcttacccaccaaatagtctaccaacgttctaatccccacattggcagttcctggcttttaacagtatccttcctctaggctgtgaagtgctgtgcagaagcttttcttcagtcaatagatgatgtggtgcctcttggtgccctcagtgatgggagtgagctaggtcccctgaggcagtgggtctccagcagcaagcgctagggaccctgggttcctttattgggagtgtgtggggtttccgtctcctctcgccacattcccttcccgtgcctttttcttttattgccccatgcttgaaatttagatcaaatgcaaactgtatttagatgtattcacggtctctcaacacctttcctgctttcttttgacaggattgccataagaagtctttttcaagcagtaaattaatttaagtggcatgtaccccacctgaattttcttacgagttggcagtttagataaatggatattataatcgctgagcattctggaccaacaggccagggccagcgtgggagacgctacaatagtgataatattctgtcagtctggggcagggaaggagacagcgagaggaaaaatccagggtgtgttttcttatttgtatttataagatgcctgtggggaatcaggaaatgctgtatggcagtttacatggcacatggtgggagataaggccgaaagcatgctgcctcgcaggcccatggaggagatgcagggcaggccggttaatcgacagctgtgtctgacgatacgcccaccatcaccagcaaagattccctccctgcttaaccccaccatttccttgaagaatgcggtctatttttaatgactttattgatttgacgattggtttacaacgagctgtatttattgctggaacgttcggtccccgtcagcactttaatacacataaatctacttttggcaccactttgatagactgtaaaactgcttatatttgcaggaaaatttgttttgccacggtgtgtttatgttagactcggtgtgaatttttccccctccttgaaatcattttatgtcatagcttagctgagaaatagacacactcggggatgctcacatcaggcactgttgaggcaacataaaacaaattgaggagttcacagccaagaggtcacagtttcagtttcacatggaaggttctctgatgctttaatttttactgtggtgtgaagatgtcacagtgtttgcctcacaatttacacacacacacacacacacacacacacacacatatatatatacacacatatactcatatatatatatgtgtgtgtatatactttatatatttactttttaatatttatattatatatattatattatattatattacatatttaccttatcatatatatgtgtgtgtgtatacatatgataaagtaaatacctagtaagtatatcctatgtttactgttataataatctgtatataatttcagtattttgcacacaagagccagtgaaagggggactgtatttcccattattcagtataagtggagttaaaataaattttctatgagacttcctaactttttcatttaaataatgttatatctaattagctttgatgtgttttaatgaatgcaattttgaggtatgaactcactcacacacacacacacacacacacacacacacacacacatatatattatatgccttttccactaaatttcttagtacatattctcttcttcagtgaacagaactataatttttatttagttagtttttgaaattttaatttaattaacgtatttatttccacgtttttaccagtgggacccaggacctcctccatgtccaaacacactaccactgaattttatttttaccttcacgataaaaccagtgataacctagtgattgattatgcttgggttagactaaggcaaatagatgtgatgtgttgataaatcccccaccaagtggatccctatgcggtattacagcctggaacccactggaatccttgtctacctctgagatcgctaactcagatccaaatatacgatgatgtgcaaaggttctgctttaaataggcagcagcatttgtggccccgagtataggtgagcatgcttccagtcctggggcttccctccacagcagatgcccagcagtggctctctctctgcctgaggctctctccacaggaagaaatgaacttgcagagcagtttaagagtcctgagctgtgctcagcagcctttggcaattatcagccaaactggaagtgggtcggtgggttttcagtggaaactgtgttataatgggacatttaatttcaaagagccttgttgataagggaggcacagggaaccaaaattgtcctatgggtttttggtgggctggcaagttgtgtgggtttgtatagcgggaaatcacttccttctgtggagatggtcccagcttctttgtgtgtgtgtgttgaggagagggggcacggtggacggtggttctgagtctggctttgcgagcacagcatccaggtaggtggagtctgctgtccagctctgcatgcatccagatgggaagagaaacgttgccggctgtcgtgttctgggcggacttgcagacgcctctgggcataggagcagctgaatacatggtgaatcatgcagtcgaacagcctgctaagtgagggagaaaagaatatcacgcacagaggtttgatgtctttttatgggagaacaaaggagtttcgattctttcacgttgagtttagcttagccattgtgtggcaaaggaggtttaatgactcattgtttaactaagggcttgccaagtatttgaccattaaatagtctccagtgtgtagagagttctcctctcacagacttcttacttgactgtgattaattggcatcgaattgttatttaattacctctgcagaaatctaagaacagtttgtgttctgattaagttatttgatgtaataacagctcctcagagctgggaaggtcagcacagcctttgggacaactcgccaccaagatggcccaacttctgttgcctggaactcaacagaggatctccaaagtattaaaaaccgagagtcgcaaaagtagcttttacttaaaatatatgcatgtttgacagttgtgaacttacattgtaagtctgcaaagcttacactggaatttgtgagaagctattaattggctcatgttaaacccttgaagcaagaaggcatggagcctgtcccctcctacagcccaaacacttcacagtgatgcccattggcaacattgagctggagaaggccgccagctggatgcattgagggggagaaacatcggggcttaggtgtggttttggcttaggaatggctgacctagtgatgggggatgaaggccgtccttatgagggtagagtttggagtggcgaggcccacaccatagaagggagacacttgaacctggagaccaggcaaggtggaggaatggaaagaggcagatattgaaagaagaaataatgacatcctgaagcatgcgtggcgtttcagaggagagtacgatgctgttgacgaagtcaagaagcctgagagttgagcaacagtagctacctgctttagaaatccttgaagtcttagactcagctagggatactgaggtggggagaagtttaatgctgggactgggagagacctgggggctggggagggtggtggtattttaatagttcagaattctctgtgaggacagggtgatggtttaactaacacatgtccagagctttccctgacaagataagtaagttaaagccattacagtactgtgtcctattgttgctgcaaagcttatctggacttagaagtaacacagtagtccaagaggctgttctttgtaaacactttctttaaatcctaacaaaggtgtatatatttacggttaacagccaagccagcttggcgtgacatctgttggcaattccctggtattaaaatgatgcgctgaagatagaagtgaagagcagatttgggtgttggttgatgaatttccagcacaccttcagttgttttacatagggcgggtagtgggagggcccattgtcttcaagttccatcatgtcctcacgccaaatgttttgctgtcctattttttttttttgaacgttgcgtgcgctcgtgtaagtgttggaaatggaaagagctgattttgcatgtcaggcggcagctaccagtcagggtaatatcagtgagttggacgctgacctttgtggaagtagaattccttggctccaggagtgcttttggcagctgccgccatcttggtgcagtcacgttcttgagacagatgggtattttcaggcctttgtttttgttctcttaatacccatttttatgaacgaattcatgagcatttggccatgaatgatagtcaaggcatgccccgcttggacaagcaagcagtatgttcctgcagcaggagaggtcaaatggttgtcagcttcctgttttctgagcaacagaagttcttagcttcctgcatggttcacagtctaagaatctcctgtatgcaagttatgtttgagcattttccaacacacaggctttgtagcttttcatcagacctgctttattctatagttccagtctgggagagtcttctagagatctgcgcttcctatatcgtacacagttacgtggttatgtgcaacatggttgaaattcattcattgaagtctctctctctctctctctctctctctctctctctctctcacacacacacacacatgcacaaacacgcacacacaccagagtatttctgactgaaatcctcaagatgaactggacgctgcagcagctggtcttttgggtttagctgttgttccttcacagaattcatgcctgattctgcgatagacaattttggggtgcctcatacttccagtctcaataatatttcgtctcttagccttggcactaatagaatttaattagaatttctcttgtgcttggcagaggagccacaagtggccgacttctgaaggtggtaggccttacagccacagaggcagctcagcgtgtgcatcttattggggcgcttttcaaagaatggcattcttttcttatcttgcatctacctgtgaggccaaagagagcagaagaggaggaagcacttcggctgcttcatgtgtttgttgtgttcattcattgttaatctatttactcaaagtgacttaggtcacttaatattgaggtggagttattttaaatcttttacttcaattgctgttagccaagagagccttcccgaaactcttctgaccaggggtgatagttaaagtatttagcacccgacacagctgccattagtcaatcagagaggggcagaggcgtccacagcagatttgctcataaccattcgtgccagagtaatgcctgcccagcctgacacctctctggctccttcttcctagcaggtgtttaatagagcttgcagagctgttctgtaaagcagcagcagcgagtcatagatgtgttgacaagagcacgccttctgaatccccgtaatactgggtgtgggtccagcttggcgacttagtaacttggagttaatttccttgagttatattcttcatctcaacgtctgagctgccttgtctttaaatggggacagtatcattgttatagtgcagtgactgtgtgtgtatgtcctgttttgcagtctctgaccttcagtgtctggtatgtatgtgatggtgctttagaaactaagagtgagcccaaatgaccataagaaagtctgccatcggtcctgcatggtgagggtgcggtgtgaattggcatgggctccatcagtgcatggtgagggtgcagtgtgaattggcatgggctccatcagtgcatggtgagggcgcagtgtgaattggcatgggctccatcagtgcatggtgagggcgcagtgtgaattggcatgggctccatcagtgcatggtgagggtgcagtgtgaattggcatgggctccatcagtgcatggtgagggtgcagtgtgaattggcatgggctccatcagtgcatggtgagggtgcagtgtgaattggcatgggctccatcagtgcatggtgagggcgcagtgtgaattggcatgggctccatcacagagtcagaggtgggggcgatctcttgggccattttctgtagatccctagcatatgtgtctggagctggcttggaggtagacaatgtcctctcatccaagtgtgccccctcccctggctcttccacgcttcctccttacaggcacagctttcgagaaccatggatagaagtcgaaaatgagatatcttccctactgtagggaatttctggtggagtcctctcagtgcttcatcttttcccactgctgttgcatacccaggactgtctccatcttgacatactataggttgtccatgttctctcatccaggcaaacacttgttggcctttgatctttcccgattttgagttctgaaggagccttttccccagcccggattctgtacaaactactctattctttgtcctcctttctgattctcaagtcttctctctgtgaaacgatcaggctggcaccacttgacccctctctggtcctcagtgttaaagtttctgcattgttgcaatgcgtggtgtattgtccatgctttcttgtttctgcggtggtgtgtgtgtgtgtgtgtgtgtgtgtgtgtgtgtgctgccagcaatgtctttattcacacacagtgctcttcccttgacttcagttttcttttctgaaattttcagttacatatgttacaaccacagtctcaaaatgctatttgtgtaggttctttgcaagactgagagagcgcatttatatagcgtctacaataggatactgtaataattttctgtttttattgtatattggtagtctcttattgtgcctaatttataagcttcttggtgccatgggtcagtgtgtgtttgaaacaacacatagaaggtttgatgctagctgtggtttcaggcttctgtccagtaccttgaaatgcacccatccttgctgacagcctgctaccgtggtgccttgtgtctccttcccggtctgcctttcatccttcacaccttcttacggacgcttccatggtctgtatctgctgtggctcagcacccactacctctctgcctgtaagctgcacccagagcctgtcaccccctctccagctcttccagtctgatctggggatgctgtgctgttagactttctagagagcttgaccaccatcctgcctctgtctgtaggttgttgtacccaaacgcagcctgtggtcagaaatattaaatatagtttgctggaacacagatccatttggtggtagcaatgcaaaggaaatggcaggagtaaccagcttgatgctatgtatgacaacattcccaaccaagaacaactgtcaaggaagatgacaggaaacatgcagaattggaaacagagacctgaaattggcaaacaaaccatttgctgtttgtagcagcagggctttctgtatatatatatatttttttttgtgcacaggaagtatttgtgcacttccagcatgttagccattggtttggacagcaacggagtttcacggaacaaacctaacaaaaagtccacccctctttttgacttatgtgaataataatgaaaagaatccaaagcctttggcttccaagaaactccgaagagaattgtaaggaccaacattgcatgaaggtgatctgagatagaagagatattcttggactaaggccttggcagatggagcccaggcaggattgagacacttctggaaaacatggataaagaacagaggttcagatcagagtgagggtagccaggaggctacctggcatctctgtcttccttctccagtgttcctaaaagtccaatagaactgatatagtaattgagatgcagattaggcaatttcaaatgaaaaacgaagacaggctggtgattatgagaaatcaagataagacaaacgagcctttcatattttcgtactagtgtttgggcaccggtcctaggacagggttcaagaagttgggtgggggtggtcatggatcggtttcaaaggtctatgtttggtcttgccttgttgagtttgaaatgctctgtgaaataaccacgtgttttgagtaaggccaggaagaactgagtaggtaagatttgggatacccaagaaacaggaaacagaaagttaaaaaaaaagaaaaaggaaaaaaaagaaaaagttcggggtgggggaggagacagagagagacacacacacagaggaagaacaaaccagaaaaatgagcacactcgttaagtagctctgtccttggataaagggccagctgaaagaagctatctatcttgaagaacgaggttggtcatgtttctctctactatggcataagatgtccccagaagtctgagcaggtggcccccagccccattgggaagcgctgcagccccttcagcaaggatgactggtccttgtctcctctaacatgagcagtttggtcatagcctgcagacctctttggaaatctctacatgagtgtccaatagataggggaggcctactaagtagaagacaggcagttttaggagattatgggcagaggaggagaagaacctgtgtgtccccattctcatggcctttggtttcacatcattgactgtcactgtgctggtggcctgtttcgacagaaaatgagccagagcggaggacctccagaggagaggacctctccacagctcctgttctgttctcacaccgggttggctgaattttgttttagagagtctaggctgacccacccataaaatggcttccttgtcacccatgagcacagctgtcctggttgccctaatgactcagctgggttctgctcagcgctctctgccttggactgtcatttgcctagccaggagtcattgtacctagaagagtgtcatccatcttgtctgtgctgtgacagatcactctggaggatacgtcgatttagatgccacacctcatgaggccggttcatttgattattcccctctttctccagtctctcggccgtcggctacaggcccataggggaccactctcacttggtgcccagcctgagtgtggcacttctgcctccaatcttttctgctctctgtaggctaccaaccaaacagtccacacacactccacccacccccagtgtgatgtgctagcagtgggactcagggcctcacacgtgccgtggcacagatatcttcttacgatcaagtcaccgagctgttactcgcaaggtcaagtatggtatgaatgagtggtacctaagactgtttgtgtggcagagaagatggcttagaggggaaatgcttaataaataaagtgtgcgtcagggctgaacctcagaagtatcagatttaaaaaaaaaaaaaacaggatataaaagtcaacatagtaattgattatatttatttgagaggtactgtaaaaagacatataaaacagaagggtacgttcatggtgacctgaggctggggattattgtaaatggcaggagacattggggagggggtggtgatgagggaataaaaccattaaacttactttgtgtgaaattacattatttagtaagggtactaagatacactgaattacaaaaaatatacttctgtaaaaaaaaatcagtgttttgatatagaaaaataaaaataatgcctttaaaaaacgagattataaagcagggaggggctgtcctgggtgggcaagtgtttcctgtagcagcatcaggacccacgtggatctccagcaccttcataaaaagcccgatgtggccctggacccctgaaatgctcggagaaaggaagataagtaaggcttgctgaccgcttagtctagatgaattgacatagtctagacttagtgagcgaatctaactcaaaaagtaaggtgaagggtgagaaaggggaacattcatctttacctctgacttccacacatgtatgcacgcttgcacacacacacacacacacacacacacattcacagacactaacatacattcacacatacagacacgctaatgcacacatcattaacacacatacacactaacatacacattaacatacctatacacacatatatacacattcacacattcatacacatattcacatactaacacacacattcacacacacagagattccagctagatgtcggtacttcatataactataagaggaatctgactaagcaagaagtcaggagtctaacaactgtggcagtaataccagaatatattctacaataagttcctaaagtttagtccctcatagctttgtgttttgaaaagaagtttgatgactgtgtctgtgaaattttctctggacagagacagagaagcagagccacttgcaaggacccagtgtgacaatgtggacttcaaggcagcccgcctgtcccagtttctcatactctgtccttgccatgtttcctttcttacaaagcatgtgagctgggaaagtattcagaacaggttagagtctccttgtagataattatttggttcccagacagtgttgcactggccacatctggcttgtggagctggggtagttcctagggatagaatttgtgggtttgaaagggttaaactctcaaagttgtttgtttcccctcggtccgtctgtgcagtatagtgttagggtaataagggatttttctttctttttagatttacatttattccttgtccatagtaatctttcataaaaacaatttcttccaagtgttgcatgtcctttgagagtcactattcagtgtctctgtttctgtctccctctcctctcttcctggtcccccttttccgatccctcttctgtgtttgtgtctcccacgtatggcttttataaatatgtatggacattctaggattctccaatgagggaaaaacatgctgcattcgtctgagtctggcttgctttacataatgtgataattcccagttgtttctgtttcccagcaaactttaacatcgctcttctttatggctgacggaggctccgtctgtgtaataccatcttctttaatcattcatgggttgatgaccacctgggctgattttgtattttatattttggcttttgtgaatgctgaggccagagtcatgggtatgcaggtatctgaagtgttgaggcagtgtctttggttgtattatgtaggagtggtgccttaggtcacatgggaaggctggttttggttttaagaggcacctccatgctgattttcataatagcgaaatcagtttatattcctgccagcaatgcataatgctgtcttcccagtatctgacaccttaaccagcgttttctcctgatgataagtctgagtagaacctcaatgtattctaattttcattttctctgcagctgaacagtttggactttttcatgttttctggccatttgtatttcgtaatttaacaaccatctattatattgtcttattggtgctttactgttacttcttgtgtattgtacatgtttatgtgtgtgtgcacatgtgcacaggtgtgcgtgtattgcatacatgtgtgtggatgccagaggtcaatgctgtttgtcatcatcattattattttattattattaattatttgagacaaggtctctgacttagcttgaagctcgtcaattcagctagcttggctggtgagtgagccccatcagtcctcttttctttgctccctagtgctgataagcacttgctgttgagcctgtatttttatgagatctggggaccttaggtctgagctcaggtcctcacgcttgcatggaagagcactttaccggaagaaccgtctcctcacctcctggctgtttgatgggcttgtttgcttcttttggtatttgggggttttgttgttgttttttttagttatttatatattctagatgttaatcctctgtcctaacatactttagagcagtgggtcccaaccttcctaacgctgcaaccctttaatacagttcctcgtgctgtggtgacccccaactatgaaacttttcatcgctacttcctaactgcagttttgctgctgttacgaatcatagtgtaaatacctcgtgtgcaggatccctgacgtgcgaccaccaagagggtcaggatccacaggttgagaaccattgctttagcacagcgtggtaccgggaagagcggatatccacatataaatgaaggagcagtcctggtctccacttttcgtgaaaacaaacaaacaaacaaaaaaaacccaacaacaacaaaaaaaacacttcagaagacttcatccaggctcaaatctgataaaagaaggggagggcttggcttctagatgtaggcacagctacaggctctctggaaaacaactgctgtgtctcaggaaacaacacaagaattgacaaataggattgcacagcgaaggaaatcaatactcaccagaaaggaagaaaattgttgacccagattcttttgtttgtttgtttgtttgtttttaaaatatgttatggtatctggcctctagctctgggcaaggtgaatatgaagaacctggggctctgcttcacacagagccttgcaagcaatccctaggggtcagctttgagtcctgttcactggctctacaagagaccgggccatctcagtgcgtgcagagaccgtggtggagggaggacccaggtatccgagagatgcccgtagcattaacaggttccttgtgagaagtctggacaggctgtgactaggtgtgtgtgtgcgggggaggggggctgtcatggcaagtgagcttagcggttctgagggcagaaaagacacagtagcctttgggtgttctagaaggcaagattcagcttaacgtccgccaaatgctctaatggagcagtttgcttggactgggttcccccgggaaacttgctcccctccccgctcgcctcccctgagacattcctgtggggaccacatgtcatcgggatgaagaggcagagtatggggggactcatcataaggatttgatttggagacttctgagcaagtgactctgaggcctcgagctctgcctcacagacccgaattcaacattgactgtaaggcagaaacatctcccgcaagcactgtttcttctctcacgagtttcttaaaagttaccctgagcccctcttgtctcatgttttctgtggacactggtggataagagtgagggctatgggggaatctttgacacgtagttttgtggtacctgttgtgagtgtctgtgtgcacagcggcggatagaacaagacctctggcgtcttcctgttccactcttggcgttattgccttgagatgtggtctctcactgaaccagaacattgcaggttgggcccggctggcccaagcttctgggatctctcctctaagacatacctagctttctagttgggtatcagggattccagctcaggccctttggaagctggatgaagatggctttttcttagtgtttttctcagacctgaagattcttgaatccagtaaaacgtaaaggagtggtttgggggctggagagatggctcaggggttaagagcactgactgctcttccagaggtcctgagttcaatccccagcaatcacatggtggcttacaaccatctgtaacggggatccaataccctgttctggtctgtctgaagtcagctacagggtaatcatataaataaaataaataaatccttaaaggaaaaaggagtgcttttcacataagaatcacctctagtaagccatttcatcaacactgcttttaaagctgaatcgggtatccgttatgtctggatcttgcccatgtttaaaggtgtaactctccccctcgtttttaccatgtatttagtgatttgagttcactttggtttgtgtgtctttaagatggggtctctcactgaaccagaacattgcagtttagcctaggctgtctgtctggccccctcagacactcctggctttctgcctgggtaccagggattctactccaggaccttacacttgccgagctaatgctcttacccactgacctgtagttttcttcattggtattgtttctttgtgaacttaagaattagttcatacaacccatagactatataggggaaatttgactatgtgtagttttctcagctgtatctgatttgagctagtcaatctctctcccctccaggcctggtctagggaagagtagacagggcatccttgggaattcttgggcacttagacttaagttagactccgcccgcagctgttggaccagaatccacagtttaatagctgaacatcctctccctctggtatgcttcagagtctggctaacagttactatctcagcttttggggtttttttgttttgttttgttttgttttgttttgttttttgagctcttgttaaaaagtgcctggcatcctgacaggattccttcgtacaatgggctcatttaaccctcaggatgaggctctaaaggaggtgttagtaaaacttaagaagagttgtcgatgagcctgccaaagatgtcatgaaagacactttttggagtctgcatgtcctgagctggagacaggacagctgaggcctgcttgtctccggtatgcacacccgtgtgctttctggtagaacctaggtgccctggaaggattacatttgtaccatgggctaccaaagcatcagccagaaaattgctcagggagttgcccgcctcaaagtagactatctatctatctatctatctatctatctatctacctacctatgaatatatgtatgtatcatccatcatcaatctgtcttatctatcatctatctatctatctatctatctcttatctgtctctgtaaaacacgtttgctagaaaccagttttgactggtcccctctgaagccttcagcactccccgttttcttgggctcatcttcaagggcagtgcagtgggtggtagtgactgaccttggttgtggatcactgcttctgtttccctgtctgcttccctcttgtctccccttcctgctcaagcctgtggctgtcagcctggacacccatgtgacaggaatgtcatggacactggtgggagtgttctcctcagtgggcagcgtcttgagtttcccagggtctgatgaaccatctctaagggtagaacactggtactgtcatgtacatctagaaaaattaattgttaagattaaagaaaaatttacatggcaattagaattcattaaactttgtgtttggccattttccgtctttcttctttgtacttggattgacctagatgagacctaaaagtcaagggacatgcttaaaccgacccaactctgtcatgggcttttcccatttcctctgtgtgtgtgtgtgtgtgtgtgtgtgtgtatacatataaatatgtatgttttaaaatgagggccacattgcagttctctgtccggcatcattcagtagtatttttattttctttaggtatcactctgtgttctttctttccgttgccattgacatgggcttattttgtatgaatgcatgatatattaaacacatatgcatttaaaatattgtttcggtttgtttgcaagttatctctctccggggtctgtctggagagatgcgtaatttcttgcgttctgtgcttgcagggaggattttaaatcgtttctccaaagacatcggacacatggatgacttgctccccctgacgttcctggacttcatccaggtacgtcacgcactcagatgcagaacggtgcctttttctttcattccctttctgcttttcaaggcctttccgtgagcgtttggggtggccatgggctgggggtgcgtgatgttacctcaacaaaaggccgtgtttgtagaagaaaggtgtggctatgttttggaggctaacttagcgtgagtaatgttctgtgtaggagtggccgtgcgtttgtgtcagggttggttcacggcagctacacgctggtaagtggcgtcccatctgcctcccaggtatctggcacggattcgacttactgtgaacacatttcataatacagaaacaatcacctctcacggaaagatagcccagattaacaaaattatgcattgtattgccacaaagggcaaatatttactgcactgttgttttgttttgttttgttttgtttttgaagggggtggggtaaaaccaggtgtggttacttacaaagaacagattagcaataataaggtgaaaataatactttgttagcaaggacaatagagactgcttattgcagattcagagctttaaatgcaggcgtgtttaagccaataataggagtacgggatcaaactcttgtcagaaaatgtctgtttttgtttttttggcagcctttcttttcacacgttgattgctctgtcttaaggtgtcttttgaaaacaggatcccacagaaacgcctgcttttagcatgttgtttttgtctgtgaacttgagggccaagggaatcatgttgggtcacctgtctctcatctcctccttcagtgttggtgctcctgcggtttgatttgttttgttttgctttcttctctcatttaattctgtctacttttcagtgactcaggcaggggatcttttttgtttcccccctgagcgtttattttggagaagaaatgcatctctcaaaagctgtgcgggttttagaatcccagaggcctgaggctcacttaccgtgagattgaagccctttccctcctaaccaccggtttctccccggaagccaagctgcaggccggaagtgcaatgggcacaggggattcagttgtgcccgagtctcgcaggacccctggggtccacagttgagccggaatccctgttagtcacacaggaagggagcccaggctgtctgactgcaaacggcatgacccataggtgaagacctctcctccttacacccacccagggcccacaggcggagtctgcaccgcagatgagcgctccagactcttttggttctgcgaacttatttttaaaatgtttcccactggctttggctacgctcttatcctccggaagcaaccttttgctgcagagccctcccgccccgtggaagacagataacattaagcccatgttttgacagcgattattaattacttctagaagaattagcacaagggctctctccacagcagcgagccaggccgaggctgagtttcccaagccggccggcccgccgccgtgcgtttagcagagtgtgatccctgctaattagaatcccttatgtgttttcctagcgcctatggaggggcgatacttgacgggtgctccttgatttcagtacaaagcattctccgcattgtgaggagagaaaattctagcctcgtacttcagtttaaccagatcccagggtctttattcatcccccacccaaacactcttggcacacttagccgccgttgactacctctggttccgggtagccggtttctagaatcctagaagaggttcatcttgacgctcgctgttgcccctccccagaaggagttttacgtgaaggatagctcacttatcaagcacggttcagctctgttgtcgatcacctcgtttgcaggtgtctttaataagccttcccataatcctttcaggaagaaatattttctccttttaaaaatagtattagctaaatataaaagcactgatctcctgccattgtcgtggggttctctgagggacatttcccaacattcgttgtttaaatggttgtcaagaggaatcaagtgaaacttagtaaacagagccgctccctcggactgtgtgcgcagccttggctgtggcagatttgcatctgatggctgagtgggcttctcactgaggaatcgctggcatggttttgaagtatttggtgcctgttgctttatgacagagcaaagattttctttcttttttttttttttatgagaggcacacacacacaaaaatgaatttaacctgcccttaaagaaaggccaacaaaaaaatttaaatgtaattcctccccccttccccctttttaaagtaggctagggctctgtcaggacaaaaacaacccagtggtgttctgagactcttaatggaatcatgtaaacttaaaataaacactattatggtaagcacatagaatgaaaactaattttccaaatcaaatacattatattcaattcattttccccaatcaaccaaatgtttaaaacctgttagttataacagcaatctcctggaaattaattagaagcctattagctctgctagctcaggcggacggcagggcttgctccttacatgaataagtagtctctggaattaaagtgtagcaaggtcacagtgactgtcccatgggctcacctagtgcacggacttagtacttgatattttttggtgtgtgtcggggggggggggcgagtttggcagggggtgctttgcttttcaaaaaattttgtctactctaatttggtcttttaatacattgaaaaaaaaacatttggactaaaaatgtagctcttctgaccttatctcatttctaagaccgtggttctattcccagtaccactaaaacaaacaaacaaacaggcagacagtcaaacaaaagggccaatgatagtaacgacagaaatgtgagaattagccatcagataaaaccattcaggtcacgagaccctgctgtcattagcagcaccagctttctagtgtggatctctgaagtgggtggaattcttcccagtccctgtttactagtgcatgctccctgaagggttttcttagctcctttcaagactgaccttagtagcaaacttcctgtctgcctttgctcataatgccatcagcaaaccctgctgctgacatcaggaagtcaccagccagctcctactatgtgcagggaatttcccaggatgcttggctcagcttgtctggaccagttaagtgcagctggatccgatcctcagggaagcgagcattcatcctgcatctccatcgaacatggcagcgtgcagaccagcaggcagagcagaaaccagagctcacagctgaagtggtagaaagcaaaagacaaagacttctgggctcctggttctttctataaaagccgtgcttatgggcatgcttttctggataaggaagattggatggctgtagaaggaaacaatgtaatcacagttacccccatgagctgtttaatccagagcatgcatgcctgcttcatcgccttttctgaaaggcgaaggcagtttagttagttttgtaagtcagtccagaacttgagtatgtaattctgaggaattgaggggattgggccgaggacaggacccttcatttgtggcattgtacctagagcccctatgttctgagtcgggacaaaagttgggacagaggtctgtcaagataccagtgggatgaaggaagttttgtttaaaatgtggacaaatgtcctgccacatagaagtctaattttgtcccttaggcttcaacaaaaggttgatatttctgtgaacatggatggggtatgttttaaagtactaactgttggtgttggtggtaacggggcacaatgcagtgacagttttcaaagtcctcatcgttgattgctgttgtgaatcactgtgagaggttctcatggaacagggtaagaagagtctgggagactgggcctcggtgggcatgagtggatcgttagtgactaaagatagattactgacaggctgctgcaaggggtggaacagcactgaagggtgttctgaataaaatataaatatatgactggaaataataacataaaatgccaagttatattggagttgccggtggctcacattatacctctggcttaaaaagtgttgttgttctaatgtgttttgtttcttggccttttcaagaattgcaagcactgagagagagagagagagagagagagagagagagagagagagagagaatggctgtatatattagtatatgtatgcatatgttatatacatgtgtacataaggattgaggaagatgcccaacactaacctctcatcttcacacacaagcgcacataggtatatacacacctgcacacatgttcagttgaggctgtccaaagttcatcatagctcattaagtgaagcctaccctgcagttttagggaatataaagatgtgtcatgtttacatttctctgctctgaagacactgtcattctgggctcatgggcttttctcctcctaagacacaggaccgctgatctggtttgcacacatgatgtgcttgctttccatgcttgctttctctgcaaacctgaagaaatctcagcagataaaaattcccttatgctgcactgatgttctcttaagggatacatcactacctgaaggatgtggctgggcaggcctggatgctgtgatgcagtgagggatgggcaggccaggatgctgaatgcagtgaggaatgggcaggccaggatgctgtgatgcagtgaggggtgcagcaggccaggatgctgtgatacagtgagggatgcagcagcccaggatgctgtgatgcagtgagggatgggcaggccaggatgctgtgatacagtgagggatgggcagcccaggatgctgtgatgcagtgggggatgcagcagtccaggatgctgtgatacagtgagggatgcagcagcccaggatgctgtgatgcagtgggggatgcagtaggccaggatactgtgatacagtgagggatgcagcaggctaggatgctgtgatgcagtgagggatgggcaggcctggatgctgatagcagtgagggatgcagcagcccaggatgctgtgatgcagtgagggatgcagcaggccaggatgctgtgatacagtgagggatgggcagcccaggatgctgtgatgcagtgagggatgggcaggcctggatgctaaatgcagtgagggatgggcaggcctggatgctatgatgcagtgagggatgcagcaggccaggatgctgtgatgcagtgagggatgggcaggccaggatgctgaatgcagtgagggatgggcaggcctggatgctgaatgcagtgagggatgcagcaggccaggatgctgtgatacagtgagggatgcagcaggccaggatgctgtgatacagtgagggatgcagcaggctaggatgctgtgatgcagtgagggatgcagcaggccaggatgctgtgatacagtgagggatacagcaggctagagtgctgttatgcagtgagggatgggcaggcctggatgctgaatgcagtgagggatgggcagcccaggatgctgtgatgcagtgagggatgggcagcccaggatgctgtgatgcagtgggggatgcagcaggccaggatgctgtgatacagtgagggatacagcaggctagagtgctgtgatgcagtgagggatgggcaggcctggatgctgaatgcagtgagggatgggcagcccaggatgctgtgatgcagtgagggatgcagcaagccaggatgctgtgatacagtgagggatgggcagcccaggatgctgtgatgcagtgggggatgaagcagtccaggatgctgtgatacagtgagggatgcagcaggctaggatgctgtgatacagtgagggatgggcaggcctggatgctgaatgcagtgagggatgggcagcccaggatgctgtgatgtagtgagggatgggtaggccaggatgctgtgatgcagtgggggatgcagcaggccaggatgcagtgatgcagtgagggatgcagcaggccaggatgctgtgatgcagtgagggatgcagcaggcaagatgctgtgatgcagtgagggatgcagcagtctaggatgctgtgatgcagtgaggaatgcagcaggccaggatgctgtgatgcagtgagggatgggcagcccaggatgctgtgatgcagtgagggatgcagcaggccaggatgctgtgatgcagtgagggatgggcagacctggatgctgtgatgcagtgagggatgggcagacctggatgctgtgatgcagtgagggatgcagcaggccaggatactgtgatgcacagtgagggatgcagcagactaggatgctgtgatgcagtgaggaatctcctgagttcattgttctcttatcccatttccattcagtatcctacagtgccctggcctctgggtctgtgcaccatccctgtgcacagaagtggtctgatggtgtctgagcagtgcattttactctgagagactcatgactttcagagttgtggataaggtgaggatgaacagtggtgtcactaacagaaccttctacccctttgagtgaagccattaatttgggaaccctgagggctgaatgtggcctagctggtctgctcctgcttgactggtacattgtgtttgccctcctgtctcttaaaagcacaccatttgcaaagctagtaagtggtctgccctccgttgctggcgctctgccccatagtcaccgcatgcatcctactaaattttctcaggatgcttgtcattgtaacttaatgatgacattcttaccaacaaaactgataccatataacaaggagcttgataggctgaaagctttgaaatgactcactaaccacttctcttaagactaggtgccgtggtgcacacatatagccccagccagcactgggaggctgaggaggctgtcctgaccacctagccagagttggatcccaaccccccccccaaaatactcagttaaatgctcttctccccccacccttggtagtaaattaggtttccgtgctgtctttgttactaggttactgcagtgaagaaatacatgaccaaggcagcttatagaagaaagcatgtaactagggacttgcttacagctttagagagtcagtttatgaccagcatgacagaccagagcagggagcagggcagcaggcaggcatggggctagagcagtagctgaaagctcacatctgatctgaaagttggagggagagagacagaaagacagagagcctgggcctggcgtgggactttgaaacagcaaaccctcatgtttccaacaaatgtcttatcgtctgtcctaaacagttcaccaactgggaaccaaacattccaatatatgagcctatggaggccattctcacttaaaccaccacaggtctgaagagtaggtgggggaggggatgtcctggaggaatacacggagaccctccttcccagtgtcttgagagttgttgaagactcgttatttataagacttttcaggaggaagaagcaggtatagctcaatgaatccaaggcttgctctaggttgtaagttctacattgtacatgttttaaaattaagactaagctgcagggaattatttccgacctgccttacattcgtaggtcatagctttcaggattctattgcatcctgcctggaggaactggacaaagttttgtgggggatagtctctgaaccctaggaagtagagaaggcacacttgtcaagactcccagggtgtgtgatgtttgtaatgagactatgttgtggaataataatagcacaaggtgttgagacaaggcttcagacaagacaaaggcagtggggacagatcctggagagacggtgtcctgagaaccagcccttaacgttgtagtagttggtaggatacggagaagagggcaccgaaagcagaggactggcccagcacagaggcagagggtcagtgatttaaacacggagcatctatgtaagaatgcgatggttaagacaaatcctgactctcactctgtggtgcagaacggttcatccctcagggatgcgtccatcacaagccatttctgttttaggcagtaggttctcaggtatcccaggacggccttgaactcactacatagcgaaggatgaccttgcactctgatcctcttgtcttcccaagttctgggatgaggaggcctatgcctccatgcccaatttacatggtgttgggagttgaacctagagctttgcatgtgctagaccagctctaccaccggaactacttccttaccccataggtaaccctgaaggccaccagatgtggctgtttcattacatcgtaggagctggagaaactgagctgccctccgctctagatgaggacagactgtttaaaaagctaatgtgtggattctctcctgtgtcttcctacctgaggtcacagagcccttaaaaaatcacttcagtccgtgctcttgcttcttcaggaaaagccttaagtttacgtgctgtggagtgactgtgtgtgacagagtggcacttaaagcataagggtcacatgtcatgtgtgatagcattggggagtctggcaaccttcctttctaattcactaagccttaccactgaccctctctatcctcacagagctacattctgtgcatgctcacagagctacattctgtgcatgctcacagagctacattctgtgcatgcttacagagctacgttccagacattgctgacagagatacatagtatagagcggtaaagatggaagaaaagcgcctacctcatatggagtgcaggagagagggttgccagcgtgccagcaaaattctcttccttcagtttagttttgttttagaagtaagattctgatacattgtataggctgtctcggaattcttgggctcaaataacctttctacctcattttctcaagcagatagagttgcggatagagtgataggtctttggctgaacacccccgggaccctgtcccctacacggcccactgccccccccccccccagatctggggatctaatccagagctgggcacctgccccaccactgagccacaccccctcccctcagtgacactccagcaaaactcatttaagtaacaaaggatatgcttcttttaaaatataatattatctctaagcgagacaaataaattggtaacagtgatcatcgtctgctctcttgtgttccattgaggtaactgtctgacacagaccagacccaagtcccagctcgtgagcttgtatggaagatgttgggtttgtgagtgcttatcattttagtggctatttcccattctgtgccacatgatcagggtctgttgttttcagaacagatcattgagcagtaaatatttcatactaatgtaatctctggactattcccaaagcttccgtggtccccagtagcatcgagcaaagtgtctcacttatctggaattctggcagctaacatgcccacttccgaacaaagcaattgaaaatgtagtgacttgtcattatttagtggggttgaggggggagtgtacttctgagtgtgcaaacttgcacacagctgcgttctgcaaaacgctgccaatgatttagagcttcgttgcaaagccattcttcttcacttcacatcctcatcagaaagaaagagagagagagagagagagagagagagagagagagaaagaaagaaagaaagaaagaaagaaagaaagaaagaaagaaagaaagagaaaaagaaagaaagagagaaagggagaaagggagaaagggagaaaaaagagaaaaagaaagcaggccaacaacttgactgagcttaaataactgacttttcctaccctttcatggcacacaaaggactaatcctaaggctactctagccaccagtgcgggcagtagtggagactaccactgaacacagacacattgacttctgctttatgaagtgaaaatgccaagccaaaggacgcgaaggagccgtccccagtcccttcttcctgggggtgcaggatgagcaaaagctactgcatctggatatggggaacaaagccagcctaggacttggggataataggctgggtcactggcttttatagaagcccaggggtggaactgcccggacttgtctggtcccactgacccttgcacggctttgtgtggagatgtcaggggaagtgtgtagaaagcacccaggacaatgacttcgtcattctgagatttctatggtttgctcggcctactcccaccttccaattcctctcagacaaaggacggtgttaggtaggttgcctcaccctggttttcaaagatctcattctttaaaagtaaactcatccattttttaaccgaatcagagtgtttttcatgcttttggaaatcaacaaaagaggttttacttggtgcatttgcaaggagggaataattaatcacctggaaatgccagcctcagagatagcactgtgccagctgcctgactgaggtgtgccccctgatcgtagacagtcgagctgacgatagcagatactggcaatattgaccaacacataacccaggcagcccatgtgattggttggtatcgttcatgaggccccctgactactattcctggaagaggagaagtttgggatttttgccagtcagagagttagcaccacacttggtagtgtggtgacagtcactggggattctcccaggcttgtaggcaatttgtcccagcatgtgtgctctggcgataatggttgtagtttagcaagaaggcaatgaagacgtaaagagcaaaaaaacaaaacaaaacaaaacaaaacaaaacaaaaaacaaaaacaaacaacaacaacaaaagtgaacaattttgttttttaaatcaagcctggtggtgttctacaggagcacaaaactttataagctaacatggctgggtggtgtgtgtggtcaaagaatagaggtcttcactgtgcctccgcacccccacccccgtgggctctcccaccgtcagccatcctacacagttgttaaggcagagagtaaagtggtggagacttctagagttccattatctcgctgttcttgcttgtatccatttttgtccgtgttctggtgttctggttgcttcaattttattaaaatcgcacacttcctattttatgttttttttttttttttaagatttatgtatgagtacactgtggctctcttcagacacaccagaagagggcatcggatcccattatgaatggttgggaaccaccatgtgggtgctgggaattgaactcaggacctctggaagagcagtcagtgctcttaaccactgagccatctctccagcccaggattttgttgtcgttgttgtttgtctacacttattgcatgtgtgtgcaggagcatgcttgtgaaaatcagctctctcttctgccatgtaggttccggagaagaaatggaggttttcaggctcggcagcacacgctgcaccccattagctgtctcgctggcctgagcactttgctttgtacatacactgtgtctttctaatcccatctggatcatggttcatcatcatcagtcctgtcctggagtctctcctgtttctgaatttcacaacccacttgttcctccaagccgtttctctggctcctgatgggggattcgctgagggtctgaatccagcctagaagtagacggtacggcctctaccttgtggtgcagggttcagaccccctgagagaggtcacccaggccttgggagctatgtgtgttctgagacacatttccagtcttctagtcacatctagaaatgatgtctagtcttcacatgggtcctcttccctcctctagaagcacccagtataaatccttcttgacactgtgactctataaaattttcagcacatgcctgcacataggtgggagtggaaccctggtgacatagttttctgtggttgaattcctttgattatttaggtctcattccatgagtgtttcagtgatgaattttgtccatttattctccatctacccctccgcattccttcattctcccaccaccgccaccgagagatgacgctgtattggaagatagcatattttattcatctgttggttgatggatatttggattgttgtcgcgttttgtgaccaaccctccttgtatcagtatttatgtgccacgtatattttcattcccttgagatgaaaatgccttgggtgggatttctgtgcttcgggtaggtgtatgtttactaagaaaaaaagaaaacctaccaaaaagttttcacagtgccattctactcacacatcgcatgcacagtgactgggggcgctctgcctttggtaacgcatggggcttagtgttaccagttctcttgatcggagcctttactgtaggtatggctggtctcgctatggttttagcttgggtttccctgatgattagcgatgctgcacctttttttttttttggtgcacatttatcagccactcggaacttttctgtgtgtgtgtgtgtgaattttttggttcaaatctcttgcttattctttgtaaatttattcttaaaaatcttgttacaggttgatttattggaatgcgtgtatgtttaattctaataatttctcccctcaccccccacccccgagtttgtgattttcttttctttgtttttttaacagtatcttttggccagtaggctctaactttgatggagtctaataatgacctttttttcttttgtgtatttcacagttatttttgtgtgtcctaagccgtatggaggtacttcatttttttattggtgtgcttatgtctgtacacacatacatgtgcgcgtatgattgaagatggagtccagtgtcgacgcttctttctcagtcactgcccacccttctttctggcatatgtgtttatgtgtaggatgtatgtgtatgtattcgaatgtgggcacatgagtgtacgtgtgtgcatatatgtatgcacgtgcctctggataccagaggctgatgtcatgtcttctttgactactgtcttccttacacgtaccggcagggtctattcattgaacccaaagctgacctcttgagccggtctagcctccaacaggttagaaatccaggcccatcaccaggccctcctggcattgatgcaagcattgaaagggtagccctgacgtggcgcagcatactctttagtcactgagccatctcctcagccctccatcttgtctttactctcagtgagtctagagctttccaattcggctagactgactggccagcgatctctcagcagccccctgtctcttcctccctggcacggggagctgttacgtgcacactgctatggtcacctttttatgctgcttctgggacactgaactccctcttcacacagcgtggcaggtgattcacctcttgagatatctgttcacctttctttggtttttccagagaacgtctcgatgcgtggccctgcttggcctggaacttgctatgcagactaaggggctggggttgtgaccgagtcccgctaccccagcgataccctgctcaatctttgtccacattttcaaaggcctcgtgtgttttcacgtactttgggtgtatggaaggagtgcttgctgtttgaggcttctctctcctttaatttccccccctgtgtgcattcacggtcttgatgtcttggctgcctgcatgtgggctccggttgcctgtgtccttccgcacacgatctctctattctttcacggatactacagtggcttggctattgttcattttagaaagacttggagcccagtagcagtttgatccttcccactttgtctctcctctgttaaatctcttttatttaagttctaaattcaccttacctttttgttgttgttgttgtttttataaaagccttacttgttttggttaatattgtccttaattgttcttaccctcaatgtagaaggtcattggtatatctgtggttaactcaactttatatctgttgttcaacaaagatttggggctctcctttgcagctcttgtgatattttgtaaacatttggtgttagagttatactgacctcatgaaaataaaagagttggcaagggatttctgtctgtggtagttagtgttatgtgtcaacttggtcagattaaggttcccaacccaaatagtttactcaaacagaaaccaaggtgttgattgaaaggtattttgaaaatgtgattactggtttataattggttggcttcaagtaagtgaggtcatatcaggtcgtgtggattaaaaggtcttaagagcagaggcagaagaaactatggctgcggctgacagctttccccgcctttcagatcctgaacttgcctcacctgccctgagtcacaggggccaatgaatgatgatcaccaccagtgatcttctcaaaatgtttgtcttgagctatttgtatttctctacagtcctcttccttttcttttgcagggggttgggaggtttgaaacaggatctcactgtgtgactgtggctgacctgaattccctgtgtagaccagactggcttccaacccacagacacccacctgcctcagcctcggagtgctggtattaaagcaatgcacctccacacccagctgtcagtcctcttttctaaaagaaaaccaaaacttttctaggattggcatttttttttctctcctaagtatttcatagaatttactagtgaagtgctatcacccaagagtggagcactagagtccaagagtggaggactatagcccaaagtggaacagtatagcttaagagtggagcaccataatacaagagcggagtaccatagtttaagagtggagcacttataagccaagaactttgacgagtcactaaattcctttcagactatgaattctgattctcaaacagacattgagctgctccggttgctatttcttgtaatataacctttcgccaccatttctcaagacataagctgtctcatcaaacatgttaactctgtgtgtctagtcagcccttttgatgcccatcttgcctcttgtgatgggggcaattctcctttcttcactggcctttgaagcttactaatttggtagtgttttgaaagacccacagtttgttgtttttctatctaattaatatttttttttcattctcttttatgctgtcctttttatggcctctcattatatagccttgattggcctggagctccctgtgtagatgaagctggcctcagacttacagcaatccttctgtctctgccttccaggtaatgtctttaccggcctgagctagtgtggctgcttcgtttcttttctttttttttcttttttcccttttggttgttatttctgcttatttgttctcatatcctcctttaaactctctttatgcttatgtgtatgagtatcttgtctacacatgtatgtgcaccaaaaaatgtgctcgatgcatgaagcagccagaagcgagtgccagatgccccggagctggggcaatggatggccatgagctaccatgtgggtggtgggattggacccttgtcctctgaaagcagtgagttctcttaaccactgagccctctctccactctctttttgcatcctaaaatctggttttagacctttgacacttagacttttctgttttaaaaagttaaagctgtacatacatttacctctaaacatggcattagctgcaactcccaagttttgatagtatctggttttcatactttttttttttttacaaaacacttccattttaatgtgtttttgtaaacccagtattatttagatctgtatagtggaattcctgatagccatttttctagttttcttgtttttgtgatgtcgttaaatccgctaaaaccaaatccgttcttgttgtcgaggcgtgtggacgcgtgttttgtggcatagtggatttgtgctggaaaggaattgtccttgtcaccatagccgttggctaacatttgctcgttcgctcatcacgaagtcctgtgttcctgccagttctttgttagttgttctatcagttgttggagtgagcatggcctgctttggtgccatgtgactgtgactgggtttgcctgttagttctaagtatggtcagattttcctttaatattctgaagccgtagttgaggttcatacaagctggtttgtgtttctggataatggacccagtttttcttggacttatgaaggtgtgtgtgtgtgtgtgtgtgtgtgtgtgtgtgtgtgtgtgtgtgtatgtgtgtgctgtgggactctgggcacctgtgagtgtagatgcctgtggaggccagaatgggggcgtcagatcccctggagctagagttccagaggctcattggagctgtcctcctggagagcagaaagtgctctcgtttcctgagccatctctccagccccctgacccttcttttctgatgaaatgtttccctttatgagctttggtgtttgcagtgctagtgacactttgtttctgttcaaagtgtttagcatcgaatacctttattttaacttgtacccaaagtgtagcatcgtttctgcaggttgagtgagctttgtaacaagcattaacccctgaaagaggaaacttgtcacaagcagacagattccagcacttaactttgacttccagtccagagctcatagatgggagacatgggacccagagtagctgtggatatgaaatggtcacgtcagccatgtggcaagtggtcagagcggtgactgtctgcagatttaaaatcttaagagaggattatatacaatgctgcacacaaacccatcatgccagtatgccttaaagctctgacttaccagagatgacgagttagcagagctcagaaggcaagtataagtgaagagacccccagagtggtagactagacctgtagacatggtcagtgtttaatgggtgtggtcttatgtgcaaagctctcagcatgccccctttgcctgcacataccctgtaggtggagggtggtgagtctaatctgataggtgttacacttacttcttagtgctttccaaagcctacttactcttcagacttttaacgccctccgggaatcccatgtcacctggcagcgtaatttgttatgttccttttccactctgagatcagtttcttttatctcacgtgttcccaaaatagtagataaaagagctccttttatacatccatccatcagtaaacagcttactgatcaaaacctcgtcatcatttctccctcgctaaatcagaggaaaatcttggcgagaggtgagtcctgctttgcttacgggtagcactagagccgtatctggcaagatcagccagggtggaaggcaatgcaggcaccgcacactctggcaacttggaatggattcctcggtctcactgatggctgaagtcaaagctttccgcttgcaccgaggtgtgatccgtttgaggctgattttattcttgataccgcaaacgaatagtagaaaatgcctggtgcagattgagtggcccttttgagtagacatgcctttttcctctgtgcttgagacaggtaagagacagttcacgtaaggagtgaagtgagccaaatgtatacataggaggatggcacacacaaaattagactgcagctttgctactgtttataggaaacatactcttttggcacctgcatcctctagaccagtggcaagacatctctttggagttaagtttaaagtaaactgcaggtggatgcctaggaccgcccccccagaactgagagcagctgtggtgttaaataccagaaacccgaataggtccttgaaattaaaagtgttcctatgaagaaaatgcatttaaaacctgtattattaaagtgtgatttctgaggaaatcactttattctagttctagttttactttttgttctcgttctttgcttatagaggcaagctctatataaatacctcaggatggcccggaaatcactttgtagcccaggctggctcaactctgtagtgactctcctgcctcaacctgccaagggctaaggttgctcttatgcattaccacacccagtcttgagggaacgtcatcctggggaggttctgtgggctttagccctgtgagtgtaagtccacagaatgtaagcagccaactttcacatttcaccccaacagtttacggtttcgttaaaattaagttcactatttccccataagccatgttgctttgaaagattaaaagccgtttttcttaggaaattttgtattttaacttaaacaatatttgctcagtgagcaagaattggtatactgtgttagctagcatctttgaactttttaaactttcactggttcatgagctgggtagggggttaatctctatcagcctgggcaagcaccagccaccttgtggattaggctggtttaaccttaagaaaccaaccaggtttccttggctctatgaagactcgatagaagccccagtgtaggggaatcgagggcaggggggtgggagtggttgtgtgggtggaggaacaccttcatagaagcagggggagggaggatgtgatagggtgtatctgggagggagggaagctgggaaaggggttagcatctgaaatataaataaagaagatatccaatataaaaaagaatgctgagaaagggggaccaatgaaaaataggagcatacttatatatttatttgtaagtatgaatctttgcgtttcacactctttctgtgtgtgtgtgtgtgtgtgtgtgtgtgtgtgtgtgtgtgtgtgtgtacagatcagaactcaaatcatatgcctttctcaatctgagtcccaccttatttttagagacacagtctttcactgagcctggagctcccactgattcggcaaactcccagaatcccaggcatgcagtattatacccagcttttagcatcatcgctggggaatctgaactcgggttccgtgcttcagggactgtactaatgaatgtgtcaaagaaggagtctctaaagcactctgcacctggggtaggcttgttggttgtagcatccctgccatgtggttttggcctcctgggatggggaaggatgcttagtgctccagtgaggctcagcggaggagggagagacaacccattacattacagtgtggttttggaaagcagaactcgttgctgaggagggtctgtctctgtgctgctccagacgttgctcctcgtcgtaagtgtgatcgctgtggccgcggccgtgatcccttggatcctcataccattggttccgctctcagtcgtcttcctggttcttcggagatacttcttagagacgtcacgggatgtcaagcgcctggaatccacaagtgagtacccgggggtcttggatggatacggtaatgggcttggtaacgcagagagcatccgtaatcgaggggaactgtagttaagatctgtgaaattctacaggctgactacaccccagcagtcctcgcctggttagcgttcatttggcagttgagcatggttgttacacccatcagggatcatttgagtgggtgacttcccaggtgtgactttgcagcttaacctgagaaatgagtagatgccctgtggacagtaatactcccccaaggacagggagccctctctgttgttcatggcttacctcccgtggacacaggaggcacacaagaaacgttttctgataaacatttctctgtaggctagaactaatttagaagggaagtaggggagtcagagaataaaggtgaggtacttctgggcgagcctccttttgtgcatcccggtggtgtctttagttcacaagtcttggtgcaaaggaagctgtgagcattcagagaaaggctggtcgtcccacaagcaacactgtgtcatagactgtgtcagtgtcaccaggccttgagccttttccttccaaatatgtataccttggtatagctttgacctagaaatgctcataattttgtctgggcccctgctggattcttgggtgtgagtcaggggctgtgctatggttttgctgttgcttcggtagccactgccagcgccactcacttggcaagaggcttaaacctgacctgtcctatcctgtgctccaatagatttttagagctctggagtctattttcagattgcacttcatagctgcatctggaaacatagttggctttagtgggagtttatcacaatgtcttttgttttgttttgttttgtttggggggggggtgtttttgcttgtttatttgtaaaagtaaacattgcaaaggccagtggtacatagttgcataaaaccacaacagtacttggatgcgtgacacaagctgaccctgtcatttagtaatgcctagattatgaaggtatgttgtcattcctgtcaggatgctgtgatccattagccatgtctgccacgggcatcagctatcagagtattaacctgtgccacatattttaagaacatatatcccgcagtgtgctcttccaaagcgtgccatgtcaggttctctagtgtgttgcccaccttgagcggcttagtgagaactccagtattggggataccgaccaggtattagcagagagagaactgtgggttctctttgtgacaaagtctagagaaaaacacccagcatacttaacgcagattactctccttttgagatactggctcagatgagaagagtgttggaaagaagacagctgtatagtgtggtccgagtaccccgatatgttcttccctttgtgagggcttttaatgtctgccctgcagggttctcatcgcttgaggtaatgcttggaagtccttgctggctactaccaatggcaacagaagaaaatcaaaccagttaatgacaagtgtcccgtggtatcctgaagttatcctggcagggcaggaacgcggcctgcaggctctctctaggcttcttctctgaggagaaacataatcccttagcttgtgtcccagaggggcttcagagtcctggaaaagccacaatattaagcaatgcaggatgacaccttcctgaaattgctgacaaatgacatctgtgtcatagagtctacttcaagatatccttctagtaatgtgggggaaaggccagatggcccccagaatgtagcatgcttgttaggtgaactagttaattattttcgtagtccttagcttacccaaatggcatgtgatccgtatgcagataaacagggcacagaagaaactggatcattttttaaaggtacaggtaccttcaaagccacccccaaatttcttggaattcttcatacacaccagtcctggttggcaggtgtttattcagggaacatttcctttctgaaaagaatatcaaaaggagaggtttctttggggtatcgtccacagtcaggtgcctggtcaggagacagcctcagggtgaatgatgcaggcatccacacactcatgaggaggctggccatcatcgccacctccagtggagatgccttgcctctgggaatgtagtccttcctcagtcatccctcagtgaactctgacctacaagatggttctttatcttgctgcatctgtaccctcacacaccccaccccaccaatccatccagctgcagtgtgcactgtaagcatggccatgtgagacaagggctggggctgtgcctcagttgatagcacccactaagctgcaggttcaatactcaacaccacattaaactatcatggtgctgcacatacctgtcgtcccaatcctctggaggtagaggcaagagggccagttcaaggttaccctcgactgtgtagtatgcttgctgccagcctgggctacatgagactccctttcagggggaaagaaaatgactggttggtttgctgggtcacgacttctgatctactcttgctagtacagtcttatccacagtgcagacggagcctgacagggagttacccttgcctggcagtgggcagcccacctgtcaccccaggtaggctgggacctggcagtcaggctgcagtcttctggagacacagtttcaggccatatattttcccccgtactcagagatagataaagaggaatttgtcctttaaattctgataagatgaagccactgagactctagcgagaatctggaaatttcaggacagtgagcatgtctcactagcctcagaccatgaggatgcgtttccagatgggtattcatgaagacgaggcttcaggaagctgaagtcaaggccaggccaatgatgtcccctctgggccagcggtatgggcgcaagtgcagtgacacccaggcacatggtagccgtaaaggactgtccttgcgctactaggaaggcttccctggggtgcagaggagatccctgtccgtttagctcgctttttggccagctggctgtatcaggtactctcaattactaggaagcaatagccacatgctagcgcttaaactagcaatctacggtggggagcgaagcatacatggatcacgctaatgtgctatgataaatgctctaatgaagttactttttagaacattaatagccaaaaaaaattaaattaactaaataactagtgaaagctcatttctttccaaagaaatagctatgaagtagagagagggcaaggatgggttagtgaaaggaacgatgactccgtttgactttggtggactgaactgaaacactcctttccgtcttgaaaaacgtggcatctttgactagggtttgcgggtgggtggacagggtcttctctgggtcgccaccagtgttttgttcaggagctcagagtcctttaggaagcccccagagtactgcatggtatgaagggtctacactgtggaccatggagtccacgagtccagcctcactgtggagcatgggaggcggggaatccgtgtgtccagcctccttgccatccagcctcattgagctttctgttctctttccatgttcacgcagcacggagcccggtattctcccatttatcgtcctccctccagggactctggaccatccgggcttacaaagctgaggagaggtgtcaggagctgtttgatgcacaccaggacttgcattcaggtctgtaggtttatggtagtactttcaaaagctggcagctgctgtacgcttaggtttgagccctgtggccaatcagttttgtcggccagcacctctgcctgtacttggactcctgtctcctgcctctgctcttaggatctgaaccctctcagactccctcatgtctggctttcctgattggcttgctcaacccttccacccctgtgccctgtggctctctctctggttacggctggggtctggggttggcagacgtatttttgcaaaaggcccggcctttttgtgttttgatgactcagaggcacttttaaaactacatgtggctcgttttaacacgctagttatttagatactgcccctaagctatgttccatccccaccccagggtgtgcagagcttgcaagtaaggaacaagtattggagctgtgtcctttgttgtagaaggactagaaacagtccacctataaggtgatgaaggccatttctctgtgttcgttgttatcattatatattataatatataccttactcatgcctttcaattctttttctcttctctcctttctttttttgaggcctctgtactgtttggggtagggtatgtgtcgaacattgctccgcatttcctgacttcctagaagttttgagtatgcaaccttgctgccctgttctgtcagcatctcaggacccccggccttcactgtacccagtgtggcttcttcaccgcagttagcggcttccgtgctcactcaacattgcctgttctgctttgcaatccagaggcttggttcttgttcctgacgacatcgagatggttcgctgtgcgtctggacgccatctgcgccatctttgtcatcgtcgttgccttcgggtcccttgttctggcgaagagtaagtgcagatgtgaataactatttatggtatgattacaatttatagccgtgtttgcagttattaaattaaactcttgccaccttgtctaatggcacattcggtgtggttctaataaagtgtgttaaagctcttactacacgtcagggtggataaggtcacgcagttcggcccagtgagatggtctgcttaggttctttttatttttgttagagtgagttgagatctatacagatgacatttttgaaaatccctggtctggtagccaggagatgagagccaagtttgccgtcagcactttgggctcagccctgggctctgtacttgagcctgagaacttcctggtttgttgatgagccagtgcacacagttaaaagagatgagcagctggacagaacacggtgctcactgccaggcgggcaccagaggaggaggtgtcagcgcgtgtggcgtgaattggccaagccggacctctctgcagcgacacctgaaccgcaacatttaacggtagaacaatgggagtcgagttttactgtcaaaagtgtcggttcttagaaaaacaccatcttgtttgcagtagtttccagctgtggctgcaggggacatagacagtgggattatgtaacaggctttaaaccatagtgacaaatctgaataatggcattgtacctcacacaaacaatgccctttcttcagtgtatgccagtccatctgagattaataaactcatctaatagtcctccagaattcttaatgggtttttaaaattgcatcataatctcagtcaataagtagaagtatgaaaactccggctgtataccacttgttgggtcctcctgtaaggtagcagaaagcagcaggctcctgggaggatggagactgattgactgtcctttctccttcctcctcccaaagctttgaatgctgggcaggttggcctggccttgtcctacgccctcacactcatggggatgttccagtggtctgtgcgacagagcgccgaagtagagaatatggtaatgtttatctgaaagttctcagcctttttaaaatcctctttgccattaaacgacataaaagcaattcttatgtaaaatattaaaactgttattttttgcatcgcggctaacagaggtttttggtttttttttttttttaagatcccgctcccatctgtttaatgttaatgtaaaataaaatgtatacatctttttctctgtctcatgtatgctatgtcagcaggttttagattcatcacaagctgtcttcagatgtaataaatgcctctgtaggagggaagttctgaaatcctagagaggatataagctaatttctcagaggcctgtttatttttgtttcttaatgggtaattcctcgttcttggtaagagaggaattcagtattttgaggttgttggtttaattaatagctctccccactcccccacttctacccgctcgtcaccagtttttagcctcatctcccatgctaggagtagaaggcagggggcccggggtcactgctgttcctccctggtaaggcaagcttccatcccgaaggtgtttctcggaggtagctggctgtagcaatggcagaaggtttagtcaacatgcggactgttccctcttcaaaatatttactcctgctaatgacagaaacagtcactgtgagatactgccattcgtcccctctcacacgatagtgagtatccttctgtagcaagagattattgatgagagggcataaactcttgattttacaacccccccttttttaattggatagtttttttacatttcaaatattatcccctttcctggtttcccctccaaaaactccctatcccaccccctcatccccttcttctatgagggtgctcccttacccacccatacccacttccgtgtcctggcattcccctacactggagcatcgagcctttctaggaccacattgatgcccagtaaggccatcctatgctacatatgtggctggagccatgggtccctccatgtgtactcttgggttggtgctttagtccctggaagctctgggggagcgggggggggggggagggagtctggttggttgatgttgacaaaaccctttcattgtgtttgtggaaggtgttcgtgtgtacgtctgttatgtatgcatgttgcgtgtatatgtgtatgcacagagggtagagatttgtacaagtgacttcttcaatcacctttatattttgagacttagatgctgcgaaaacccaaaggtcttcacgcctgcgtggggatccgcttatgcactgggtcttcacgcctgcatggggatccgtttatgcactgggccatctctcccacccctccccttgctcttttcactcagtgttataaggttgaagcgactgtctataaacagagctggtgttgatgagcaagactgtaaatcatcacagtcttcaatagtctcagttagcatcaagacccaagtgacccttacccagcctcgtgtgggtgaaatgcacccgagatcaagcccctagctggcccctgaccgtgtgaacgcctttcctcctttagatgatttcagtggagagagtgattgagtacacggacctagagaaggaggcgccttgggagtgcaagaagcgcccacccccaggctggccccacgagggagtcatcgtcttcgacaatgtgaacttcacctacagcttagatgggcctctggttctgaagcacctgactgcgctcatcaagtccagggaaaaggttggtctgacccatcttgctcctctagactttcagctaaagataccgggccagatgtccatgtggatatccggctgagcccgtcagcaagactccctgttcccccgtggatgccagtcagtccagccacctctagaggcagcagaagtaacatcaggacacaaacagcatcagggcaacccgccacatcctcccccttgaacacgaaagataagtttgtgatcctgcttagtgtctgccttcattccccatggtcggtagggccggggtcaccgagcttactcagctaacaccagggaaaccgtaagtgctggagttagaagttccttttgtcctacagacttgaagagtctgtccctgtccctcccttcaggaccagcgttatgctttacatagcagctgtctcttccagtgctttcctgtttcagagcctcaccatggctggctgtggccatgagtctgtaactctctcactaagttcttctgaggatgattcatagcccttttcattcagataaactatctctgcctctctggaaggctcctctctctcacaagcagaatcattcacgatgaccgaaaggtgagagcagcctcagtgtccacggaaaggctcggcagagtgcggtgggtgcttccgcagatggtatgcagcctttaaaaggaaacagcgaaaccccagcacattctacaacacggatgtaccccggggataacatacccggccagagaagccacagaagcgcaatcctgcatgaacccactgtaccgcctggaattgtcccactcatagagacatgaaggatggtgttttccagagccggggacggaggggcgcagggagtgatgggtcagatgatggatgcaggaggtctacttttgcaggctagaaagccctggatatgtatggataacaatggaggttgcgcactagtgtacaactaatgagtactgctgtccactgtgcttaaaatagttatggtgaggaattttatgttaatttcccacaatttagaaactgcataaaatacttgagagtgatagtttatatagttgtcaccccatgggatttatagtcacctgagagacagacttctagttatgtctgtgtgtggtgggaggtggggagagggtatcttacttagttaattccagcagggaggctggtccactgtgggcggcaccattccctgagctggagtcctggactgcatactaaggagaaatcaagcttgcataagcgtttaccactctgttcccgtgaccgtgaaggcagggtgaccagccccctcatgtttctgctgctatgagtgcgtcatcatcatggactagagccttggctgccaagacaaactctgtctctctgcttctgtcagggtattttgacacggtagcgggcaaactaattaagacaaatacatctgtgtattttgcagaaggtgtttgtttgtttgttttagggttagagcatgaattgaagttctggatatagctcactgtgccctggggcttcctttggaagttaggggacattctgatccctgtcattctgcagggcacatggtagatactgaagagagatggctatgaatatgagcaaatgagaagcaatatacaggcaggaagaagcctgtagcaaaaaaaaaaaaaacaaaaaaaaaaaaacaaaaaaaaaaactttatattttaatttaattttatatttttacttaatgaatttacgtcctgttcactgttcccctctcagtcacaccccacacacaattcttctcccctccccctccctttcttctctgagtgggtaggggcccctctgggtctctctctctctctctctctctctccctctctctctctctctctccctctcactcactcactcactcactcactcactcactcacttcaagtctctgcaaggctacgtactttctcttccaccgagaccagacaagacagacaggctagaagaacatatcccatatataggcaacagcttttgggatagcctccattccagttgttcaggacccacatgaagaacaagctacacatctgctacatatgtgcagtgaggcctaggtccagcccatgtatgttctttgtatggtggttcagtctctgagagccccaagggtccaggttagttgactctgttggtctccctatggagttcctagcccctttgaggctcacagtcctttctcctattcttccataagagtccccaagctccatccactgttgggctgtggttgtctgcatctgtctgagtcagctgctgggtggaggctctcaaaggacaacatgctcctgtctgcacgcataacagagtatcattaatagtgtcagggattggtgctcgcccacaggatgggtctcaagttgagtcggttattggttggccattccctcagtctctggtccatcccccatgcctgcatttcttatagtcaggatacattttgggttgaaagttttgtgggagggttggtgtctctattgctccactggagttcctgcttggctacaggaggtggcctcttcaggctcaatatccacagtgttgtgagtcacagctaaggtcacctccattgattcttgggtatttcctttatcccaggtctcctcatactggagatgccctccctccctcctcacccctgtcagttgcagatttccattcattttcatggccatctagccatctctcctgtccttacccacacctgatcctgaacccccaccaccaccattctccttcccacaccccctccctcccagatccctccctccatctgtctcttacgactgttttatccccctttctaagtgtgattcaaacatcctcccttggtccctctttcttgtttagcttctttggttctgtggagtatagtgctggtatcctgtattttatggctaatatccacttataagtgagtacacactatgcatgtcctctggggactggattacctcactcaggatgatattctcaagttccagtaatttgcctgcaaaattcatgatgcctttgtttttaatagctggatagtattccagtgtcccagttttctttatcccttcttcagttgaggggcacctgggttgtttctagtttctggctattgctaatgaagctggtatggacatagctgagcaagtgtccctgtgggatggtggagcatcttttaggtatattcctagaagtggcattgctgggtcttgaggtagagctattcccagttttccgagaaactgcccaattgatttccaaaaatggctgcacaaattcgcactcccaccagcaatggaggagggctcccttcctctacatcctcaccagcatgaggggctattgagtttttgctcttagctgttatgatgggtataagacgaaacctcagagttgaacaaaacacttctgcagacaactctgtcaacaacccgtttcctaaacaggcatggggaaacccactcctccccgtgccctttgtctctctctttttttttagcttctgtgcactgagcgcaggcactcaaatgtgaatggcaaacgttctgccaccacgatatacctgggccctggagtgtgaaatacttcaccagctgcttctttaaactctccctaccaccaaaccatttaatggactaatcacagctgtgatttaacgagtgatacccttgcgacatgaaagaataaacttacaacgtggtgcccaaagggtatgcaaggtgcagccttagcaagtcacttggcaaaagcccgaccctaattatttccacggcttccttgtaggtccgcagacagggtggaggactgtgtgggtaaagtgtgaggtacagctctgatgaaagccgagcctctcggttgtgtcctgacagctctgtaggatgcttgcttgcttgcagacaacacgcttatcagatctgacgtcgagggcgcagttctcttaatttgcacgtgtcttccatttccttggaagccacagaagacgaattatgtgaggaactctgttgaacaagttagaaaacaatgtgtagccccagacttgtatccttgcatcttaaaaataccccaaaccgtaggattacctgaggtgctaaaaggctggacaggaaattgaatttgaaggatgaattatatctgtaataacttcattttttgacctgtgtcttcctccccttcctcccccaatgtctactgcagtagtttatactcatttagaggcagctgcaccacgggatgttctctttctcctgtaactgtggggtttagccttctccttatatctcttcccaccccccatccccccacacacacacttgctgactgtcgcttcgtgttggatttaggggaacagatttgttctcttcgaatggcttcctccaagatccctggaagttatgggaaaaactgaaactgtaatcatgacgagccaggttcctaatttctggaaagaacaaaaatgagctcagtagcaccccaggtctccagttagcttccagacactggctgcccttttcatttgggtgattttgtggttgatttgaccattggagagagtactgggccgttcaaaagcattttccagttctagaagtagattgatttgggtgtgtcatctttttattttttttttcttgctcaaagctattactttgataatacatttttacacatgtgtgccaggccttgctataatgggcaagaaatattagtttcctaccttttctcccttttttacataatgttttctgagagaggcttctctgtctgtcacgtgtgggacttccacctccccagcccgtccctcagtcctggctgagcccgaagcatcacgtccaagaatgtggtaggaatacagacactctaaacgcgccagtgggccctcagctaagcatcctatctcacgggaattgttcttgatttctatgggtacctcaccctctcctgggaatggcagagggtggggggttggttggttggttaaggttttctctctgtagccctggctgtcctggaacttgttctgtagaccaggctggccttgaactcagagcttcacctgcctctgcctcccaagtgtttttatcaaagctgtgtgccatgactgcccagcacccccccctttttttatactttaacattctatccatcatgtggtaatataattcttcctgatcacatggtgatgcgtgggttagcatctttctagtggtcacagactggtgtcacctgcaatccggccattccctgggagcagcctctgttgcataccagccctaccagccctaccagccctaccagccctaccagccctaccagccctaccagccctaccagccctaccagccctaccagcccatgaactgccagatttccgttcttttcatcacttcgagacatacaaaagtaatcttttgtgagatggctcagctggaatggcgtttgtcccatgtgatggcccctgttcacctccatcctgactctgaactctggtggttgaaggatagaacactgtcttgcaagctgtgctctgaacccacacgtgttgtgatagaagttgacatactcccccacccccaacactcacaattttttaaaagtagtttcactgccctcaactggacatcagttctattctactttccggatgatcaatcaacctcagacttctctcgcctgagcctgagccatggtgtcagtttgtcctatgaataactgctttctgattagcaagtaccccaatgttgtccatccctgacactagggagcccccacgcaatggataacacagagattgaccggagctttagtccctctcagacagatacaggctcaggtatgcccgacctgggcacaggtccttaagaatctgcacttttctgctttgctctatcaagagtgatagggcctcacatctgcagtgccccagcacagagaccaacacagtaaagcgtacgaccacatttggctgccattatccaggagttaggttgcttagccacttaagctgcataatatatctgccccaagaaaagaagcagttacccacttactgttctagtctccagtacaggatttacctgttaggtctatgctctctgtcttgcgtgttgtatacatgaacattttagggatgatttcataaaccgctcaagctggagatgaactcttaactcctagggaattgctgtttttcctgtaacatggcagaaaaatgcagctacctacaggagaatccagtgtagtcctgaacaaatggtcctggggccgcttggactctgtaggtcatagagttggtatatgtttaaagagacagttttgggggcattggttaggagtggagatggccgcatgagggacagatggagggtttggtggggttagacatttgtaaaatgcataaggtcggaagatagaagtgagtgtgacaggtatttggatgggaggaatcacactcacttccacctgctaggcaagtgtgtaacacacactttcgtgtgcaggaaccctgcagaagtgtctgtggtgctaaaggtggacacattaaggatatagaggtttcctgggtgaaatcccagaaacagagctggaactgagttgtgagtgcctggggaggccagtaggaaagacaggaggaagatgccaccagtggtcacctgctcctagtgagaaacaaatggaggacaggatcctcctgtggggaatcaaattaatgctggttagaaaaaaatagaagttgtaacttctccctggggagtgtgcaaggcagtgattgccgtgaagatcaagaaacggcttccagaggttggcttggcaggaactcacttcttttgaagtccttgtacctgttgctgctcagaaagtaggtccacacctaaggatttattttagggaaataattaaggttgtttggaaagatgtagcttcaaggacatttaacatgatgctgtttatagcatcagaatattttgtaagcagctgaaacattcgcagtaagagatttattaaataaataattgtgtacactatattacatgtgccttaaatatttatacgaacccataaatgaccacagcattcatatgaactttattttgtttaactctatgagcctaagtcttaggcacacatagctaagacatgtatacatgtgtacacgcgtgcacgcccgtgggaagcactgttctgtccggagtgtggaaacgagcgttgatattcatttactttccggatggattgcacaggttttaattaggatgagtttattctattttattttaatgtggccttgtgttcagccggcagctgaggaaattagaaacaaaggtatcaacttagaaagcaaaagctctttggagcttgttgttgggctgcctgggaggaagctggaagcagggtggcctgagaaactgtggggaagtccatagcagtagccattttgagtggaacattgaatattagtcctactgagtgagtgacattggatattggtcctactgagcgtggagtatggagaattgatcctgttggggctggaaaagaagtctcagctgttaagagcacatactgctcttctgaagaccccagttcagctcctagcatgcacaacaggcaactcacagctgctcgtaactccagcttccagggctccgcctcctcaggtacccatgctcacatgcacatggccacactcatgaacacatgcacatagtctttttttaaaagtctaacatgttgccaccgtgattgttggagatgagccttggctaaattggggaaacagaggctattgaaagagctaagactggatcatctccatgcgtcactttgtggcgtggccctgaacttggtgatcgtcttcttctttggcatctgtgaaaaatccaccagttactggagaaatgccctttagatgacaattaatggctttcataggcacaagtcatcaatttttgtttagtttattttgttttaaattatgaggataagttagcagttaacggttctatagactggctgctctcagccttctgtttttatgggcacatccagatggtccctcacagactatagccatttgagtcttcaccaacgcattggttttctacatgtcacaaacatgggtttacctctgccttcgcgtgtggcagtttgtacaagtgaatatccagagatgggagcaacataagtgtgtatgcagagacacacctatgtacagaatcagcacttctgcgaggtataggttattgttgctcgtaagatagataacatccacagagattttaagactaaagccagctgcttacaatcactctttttggaaggccattgctgatggtgttagaaaacatccaagcgatgtaacagaaaatgcccagcatatagttgggtttggctcctgtttagaatggtggggttttctttttccatctcctaaatttacttaccagtgatagaaagcatgtctgtgccctccactgactcaagtttttttttttttctttttttttgagacatggtttctctgtgtacccctggcagtcctggaactcacgctgtagaccaggctggcctcaaactcagaaatccgcctgcctctgcctcccaagtgctgggattaaaggcgtgcgccaccactgcccggcgactcgagttttaataaggatgatgctctcacctgttgagcaagctcactggagaaaaggctcatttctgctcataggtttcagcatccactctcaaagccagttttcacaattcagtttcttccctgaccaacatccacctgcattatattgattctttgatcttattgtcagtacgcttcatttctctctgctctggctttaataagaggaatgattcttcacacaaacctttcccaaggggcaattgtacgtattaattggtttgtaaaatgccttttgaactgctcagatgaaaggccccatgtaaatagcaaaagctatttatggtggtactgttgttggtctcattatgtatgtttgggctactggaggactgccttttaaggtgtggagacccgagtttgcaaacgtgaaggtattttctctagagccacaatatatactttctctatcaacgatgaattcatggtaaatgataggacactggaagaaacgacgattcgggagtgtgcgattaacaactctggaattatccaagcagttcttaaggttccacaaacccagaccttggaagtggggctcatgagaagccatcttctcataagctactaaagaaactataggcttgtccctgccataaatgtgactcttgtgtacccaagggggtcttacccagggacaccttgcccccccagagaacatttgccaagacttgacattttaggttgccacagtttggagggccctatgggtttctggaaaggacggcccagggatgctagtagacactccacgaggccacttcagcatccactgtgaggaactgccctgcctcacaggtcagcagacctgaggctgggaacttataaaaagcagcttcgtagctcgcccttgaaaatgagcatgctcacctaggtgagctgcagatggctcatttttaacccctgcccccggatttcttcgcaggttggaattgtgggcagaaccggagctgggaaaagctccctcatctcggccctcttcaggctgtcagaacccgaggggaaaatctggatcgataagatcttgacaaccgaaattgggcttcacgacttaaggaagaaaatgtcaatcataccacaggtatgcaagttagagcgtccacacacgcttcttttacgggagtattgaagtttaattgcttttaattttattgctgggttttttttttaattggaggaaagggttgagccattaaccaatagccaatagggcatacttcagatattttcaacatgtattttcgtagataacttgagtgcatgcgtgtgctgcgtgtgtgcatacgaaacagagagacagacagacagacagacagacaggggaagatcccataataatatacttaggttcaatctagattcagcgtccctggtattacacttttgtcctctgataatgacataatatgtagtgagtaagagccttgtgtaaggatgcgtgattgtaagtgtaatgaggcagtgagacaataataattaataatagtcatcatcatctccaggctgtgagagttaagaagcaatagacgctttgtagacactctccaaatcaggacatttgggaagtggcttaaaccggggagagggagccgagggaaggttcacatctctgtttacttccaggcaggcagtggcatcaccgccgctgagaaccgcagtggctgagtgcttcacgccggcctggattgtggctggcagggcgctggtggtttatgctgccatttcttcctccttgccaccccatagccgaagatgtccaggcagtgtcaagagagtggatcactcatgtagcttttggtttagtgtcttgccacgttgcttttagttctacccagaataattcagaaagtctttattgagtaatgagcgtcttctagttaggcagccacaggcagcatagggcctgaccccacaggcctgcagcctgcagctcgggagcctggcagcttcgtcccgccctcggcattgacgctctcgatcacatggattcggctccaggcttgctttggggaggggtttattttggtatgttttcacactctgtaatcacgtggccatcaaggggagttggggaacctgcacacatgcacacatgtgagaaatgcagaggagagacatgggagaaaaggcgaagcagctgtgctttctgagcaggtgcccgctggggggttgcttgtgtattataaagtacagagaacctaacactcggagagaaggggactgtgggctctgagcctgtggcctcccaccctgacatgtagggtacttgtcatggtagagcaccaccgcactgtgatgaggtggtggagaaattaaacctctgaggtttactagtgggaagctaaaatggtacagccaccgttttacacacaagcatggggactcctcatgagactgataataggactgcaacatttccagcaattccacttgtgagtgtaggagtgtgtgcgtgcgtgtgtgtgtgtctgtgtgtgtgtgtgtgtgtgtgtgtaaactcatgcacacatgcacatatgaaccaaaagcagggaacagcagagatatttgctcattccagttcatagcagtggtattcacagtagccaggaggtggaagccacccaagtgtccatcagcagatgaatagcgaaagacaaatgtggtttatacaaacagtgggaagttactcagcaataagaagggaggaagttctgatgcgtgctacaacaggagcaagctccaaaagcatcatgcagcctgaaaccggccggtcacagaatgacagagagtgaacagttctgatcacaggaagagtgtttaaattcaaggagccgcagtcgatggggaccactggggaccccaggacaggaaatggctttgttgaatgggaatggggattaaagttttaagaacagtcagcctgtgattggtgatgaccactacaaaggatcataaaaacacttagcaccactgctatgagatttaaaatgacggagaggggagggaccaggagacgctcagtgagtaaaggcacacactgccaagcccagtgccctgagtttgatcctcattgccacgtggtggaaggaggaaactgatcagaaagttgttctcttagctctgcaagcaaaccctggcacacatgtatgcacaccctcaggtaagtaaatgtaatagttaataataataataataaatgattaaggcatagatttcttgttgtacttgtattctgacaagttttttaaacattcaaaagacccttttaagaaaaatagaggaagcaatcttccatcacgtaactttcccctgagcatgagaagcatggttatcatagaaatcagagctcaaatcccaggggctttgaatctcagaaatgggcctgagaagaggccagtgtgtctgtaaagtagctcacagccttggatggtaggatctagaaatgtgccccacgctacttttaatattccttagtaagaaatggttgtgtgcttgtataaataaaagaactctaaataaagaagctgcattcagacgattcttggctctgctgggaatggtttagaagcacatctgagcaaatgctaacacaccttgacatcaccaggtcttggtgctgttccatgagatcctcctttactgcaaaggctacgtggatctgctcccaagaatgcgttcagaaaacagtgcttagatttgtgtctttgtagaacacgatcactatgcgctgcaagcacagccggtctcctggatgctagttggttgacataagaaacaatttggagaaactatgcatgtgtatagaccccaggatagactgcagtgtggaaagaccccaggatggtctgtgcagtgtggaaagaccctaggatagaccgtgcagtacatgcgcttactgtcaacctgccccgtatttttatccatctccgactgctgggagggaggccttgatggagtcacctcactccccaggctgagtttctgtaattaccacctctcagattcttcatgaaggatcagctgcgtgatagaatgggaatggcctgatgtgtgcttcttaaggataaatagtaactattcataaatagtaactattattaaggcttatggtacagtcctatatgtgtataacccattctagaaagacttaggccattaacttctctttaaactcttataatccctggtgattttctttaaatcaaattatttacataaactaaacttagtgaaagaggaagcaaaaacaaaacaaacaaatcctcccaaactcagagcattactcagaggcacaccaaaacccgcatgcacgtgcggcacacagcggggagaggatagctatggtaaaacctgacaagcctaatgtttttctcacagaagcaacacttctcctaacagctggtctgcagccctaggtgctgttgcagtctcagtggagttcttttgtctttgtgctcttccctgcccccatttcttaaggttttcctccatctgactgctttaaaggcttgttgcagctgtgacagcctccatgtttcccttcttcccaggcccttaacccatccccaaaccctcatttgctgaagagtcaggcccagcagctgcatagccaggagtccccatgccacctcctggatcatgctggtttgaaactgacctgtggccaaccatatgaactccatactaaaatctgaatgccttgtgggtcatctgcccacctccacacacccacatgctcagaaacaaacatctcacaagcactatcactccagtctgtgctgtggtattttctcagccctgtttatataaaagagaaaatgacagtcaggagcctcaaaattgatttcatgagccactggtcacacgcctgccctttgaaaatgctgtgcccgctgccctgccttggggactggtgcctgctgactgctaacaccctggaaaaggggagcctttgatagagcagccaggaaggaaaccaaagatggaggagatctataactcattactaactatcacgatagtaacatcagaacttagtattaaccagtctccacattctttttctcgtgaatgtttataatcaaacgacgtaatgtcagttattttagtcattgtctctctatccaccctgcctaggaagggttcctaaaactatagccagagaaaacgaataaactcagacgaaagtcaaaagtcgcggaaagccggtaggcatcttttcctaaggctcttggctcggtcaggcgctttggaaggcagttttgtgaaagtggccttgcccaaaaaatacaagtgacaaatagaaaatcattgtagaaacgtggattcactgggtgccatactgaaggagcgccaagatactcaaccgtggaggcagagcccatccttgtatgtgtagagaattccaatctacagagcgacgggggtcaagcatcctgctgccctaagtgagcaggagccaaagctgattgtgtagcacgggaagcaaaagagaaatctaggtccgccaccgagttgcaggtctagatgaaccaagccagcagcccgtttggggagcagtaacttcttgctctcttctaagctcctccccttggttgatggctaagctcctccccttgatagatggctaagctcctccccttggttgatggctaagctcctccccttgatagatggctaagctcctccccttgatagatggctaagctcctccccttggttgatggctaagctcctccccttgatagatggctaagctcctcttggtagtagacagctaagggcctgtcatttgtcaacctctcaggggcaattcagaaatagagtttaaggaacagagggttcctaagattggtgacagttctgggcgggactcctgagctcctttaagtaacaagtgaacggagacggagccccacttgagctgtatcttcctagagcagaacaaatggctgacacctgtacttcctccgtaccccctaccaccttcgccaccgccaggaagagagcccaagatgagcctggcttcaggaacagcttatcagaaaacatctgcccatgtggatctcaacattttttttctgggtagaatccctttacaagcagagccttttttttttttttttttttttttttttttggcaccaaggaaatgttctcaatcaaagagcaattcacagcaaattcccatttacaacggctagcaggggctgatgtgtaccaacatctgtaatctttatcatgatcaaacagattctttgtgtatgtttaatagattccctttgtttgtaccaaaacaaaaagccaggtgctttttaaacagcccacttctttttaaaattcccctgagcttctaatgagtttaaaaggttaaccagaactgctatgcctctttaaggcccctttctgatcacctggtgtgtgtgtgtgtatgtgtgtgtgtgtgtgtgtgtgtgtgtgtttcaaagagaaaagagggtaggtgtggtgttactagtaaagaaatacaattggatcccagcctaatgcagtccctttgttcctgcacactgaagtcttcattaaaacccatggcactgttccctggagctggtgacctttttgtatttaaaggcgactttacaggacttaaattcttctctttttgtgggcgaacaatgttctcttcttctgaggttgcatgatggtgagttcattcagaggctacaggactaagggaagaagaaaagagaaactgagcctgggggacttcaggtgacgccacctttgagaccgggaaccgctgcccggcataaggatcagagtagacggggcttgggaggcagagcagagacagttcgggccccaatgcgtggatattttaggagagggatgtttcctggttggtgcccccagaagatgagagtaagcgttgaacattacgcttgttcatttgtactttttgtcttggtccctggttggcttaagtgtctgaagttgagcgggttaagtttctccttagcataatggaggcctagcttgtagtcagtgcattcaaaaagcctagtaaagtctctaatttggggaaccgggattatcagcttggtaccccagatggtttcatttagactggctgcttctgggtggcacgcctaataagagcgtgtgttatgttagtaccagccaagctcctgccactgaatgtgctgcaaaggcttacaacagtagctggatgatgaaaaacaagtttgacactaggcttctggttttattgctgtattgaataagtgcatttattttcctaatttgactcttattaaagcctatatcatcagaggaaatactgaggctaataaattaggttgtcggttcctcccattgatccctaccctgaagtcttctgcctgcaaacatttttttacaacacttatttataagactagtttgtgaaattcattgcttggaggtgggtactttaaataataatatctaccagaaataataattaacttcacccttatctcccctctcagtatgtatctgctatgaggacttttttatgaccttttgaagataatattagggattttatttggcaggtggataaactaaatgagcagtgtataatgcatttgtcctagtaaaagcagcattgtcaacaaattgcctgctacttttaaagaaaatatagctccaaccagttaatgttttattaaatcactctccttgttcaacaagtcttgatgaaactttacttatgaaatgtgtatccggcgtgttgtaacaaagaaaactgctcttgtttacttaattattttcttctaacattgctaaataaacatgagtgattgcccaatactccctttgagttgacagtatagatttaatagagacccttattttagtgaatagtggtctagggataattagccaaacttcccaagggtctcttgtttgaagctggtgtttaggatacaagagaaagcaggttctgtggctgatacatataatatgatacatataatatgaaggagtttctaatgggaggaggtagggataaggtaggcgtcagtacctgctcgtgagatggggcgttggaccagaactgtcattcctctaaggcaccaagccaccattcctactatgctaatactgtgaactttgtatgtctgcagtcacttacatgtattagtgttcaaggtggggcactgcagaagtctaggagttctctgtcagagtctagacctgatatattggatgtgattttgctgtggaacctggaggaagaaaagctgaggtagatatcagatctcctggacaaggaaagtgacctgtccttcacataaacgaagaaaccaactcttatttcccacgtgggctcaaagctgattcctgaccatggttacctcaaggctctcatatacacactcttagagccacttagtcggggcctctgcgtagcgtattggccgtggtgctgagtctgtgtggagaggtcagaaaagcatcaaagagagaacagttggcagacagcaacgtgccttctgtgaacctcatataagcaagaagagaatttacctgtcttgttagttgtgctcactcgtcctccctccgtgtgtgtgtgtgtgtgtgtgtgtgtgtgtgtgtgtgtgtgttttaaatctgaagtcagaagaataatgtttattctgctgataagaaagtcccaccacatgcagatggccatttgtctttcatcttacattctgtaattttaagcataaccttagataagcctttggtattccttcagtttgatttagttgccattttcaaatttcttatgacttcacaatcaactttgcacaaataaaattcaacaatggtgtcctagttcgggggctgtgagggaatttgaaggggaacagccctggtcttctgacacacatttttttttctgtcattagtgtaaaactaagaagcagtaacagtatcagtctttgaaggaaagtcctcctccttggtcttttaagtgttcaagaccctgttcaaggctaggtgacacatctgtagtccaggagcagtccccgggacctgtgggaaagccgtgacttttgttcttcacctctgtgtaccttgagattcttcacagccagttgggctcttctccgctgcccatgtcttatggcttgggttgtcagaactcctagaagaaaatccgtgcagcccccgtaagcgcacatacacgacgctgccttaaaacctagaaatcagcatgtgattcgggagcaactcctgaatggaagttgcgttagccgtccgagcttcacaatgggtttcggcttaccgcgcccttgtagttagcagtgaggttccccagacaggcagtcctgatgcacagacaagataatgtagggattggctggtgtgacgtcagaggtcatttccacgcttggaagggccactggctccgtcagccgcactcctccttgaatgaagaatagaatgcgacccagaagactcttcaccgaaggaggaaataacaggtttcacccaagcacaaactgttcacaccacgtcctgttttccagagtcctgtgagcacggacaagtagttttttcacgttactccaataaacatagctttgtttatgaccaggaaagtgtttttaacaacaggaacccaccttcctcatttcgttcttaagacggcacactgccacggtttcttctttgagcgttccgtgcactgggaaggtattttggagcacatttatgtgatgggaaatttaagagcagtgacattttatgagcgagcgtgttgaaccttagtggactcgagtgcctttgttttcctttctatgacgtcctgaaagtcagaacgtggcagtgacattgactctcttgggctcttaggaacctgttctgttcactggaaccatgaggaaaaacctggaccccttcaatgagcacacggacgaggagctgtggagggccttggaggaggtaacttccaccgttagcatctgtgtgtgcctctgttgagagcacttggggaagcaggggtcagtgctggaactatctttagttcccacttggaggagcattgatgtttgtgaatgggcgtgaagtgtgtataaaataatatgcatcatgctgcattttaacttccccaaatctgacttagccaatacattatcttgcttgtcctttgcaaacctcaaactctcctagagactcaatgtcctgtacaaatgttgtgagaattcttcccggggggtgggggagggcacatgaacaatgtctccccactcagcacatcccgaggtcccaagaacaaatcaaagttcagttcaccaatgatccctgtgggaaaacaatgggcttattaggttgtttgtttgtttgtttgtttgtttgtttttacagagtgtggatgagggggctatagagtgggtgaccctaaagcagccgttctggaacatctgcacctagcataggtgattcgttgagggagcaccttccataagccttccccaccccgtatactctagctccaccccgagtccccaaggccatgttcagtcagggcagaacttcgtacacatgaacaggaggagtgattggaaatgtgtgtgagggtccagtgaccttctaagggcgcatgccaccagtccatgagctgtcatgatgattgacaggtgcacagaggcccatgagctcaggaaggtgggctgtgtggctcagaaggtagtgctctacagcagccacttagcttcctgctttttctggggcagaggaagcgtctgcgaaaatgaggccatctgttttcattattaactgaagggaaaatgacgtcatgcttaaacaatgctcccgagtctcccctaagaaagtgtttataaaagcaaattacacagaatacgagagcactgtttgcggacaaacctgtcattgtaacgccgcagaagagtccagctggcagactcctggagccttggttagcttgctgtattgatacccttaattttggaggattttcctgttatttgtgtagtgtgtttctgcaggccgcttctcgggggttccttactcgcgcaggcaaaggattttggctgtgaaggtacttctagtttacgtgttttagcataagtggtttgcaagttcacgctagttctgcaaattaattgtaagctgcttaataataaaaatccctcctggagcctagctcagggttttactttttaaaaaatcagcggttaacggagacgcggtaactggctgatggactcttcgttgcagagactcgtggtatatttcttagagacaaacactaaaaatcaccagagctcagagatcagctgccctctgccattaccatagttacggttttgaagtagcgtcttctcccctgtcaccctttctggtaagctccgacatcttttaacttaaagatggcttctgactgtgtgcacacaccagttgggagcctaacggcaaaaggcatcttcaaacgtggctgccgtacactttttttcatctgtcacccacaaaatgaaatgttgctagcttcccttaactcacaaccgaggtggcggatgtgtaagacagtcctgagggtcccctgtgcttagactccacccaagccgccctaacagtcatgaggagaaccagtgacaggcccaggtccacgcatatcaaggtgtccgtgtgctgcatctggggctgatctcaggcgtcttggatgcctctcagcagtgaggcgccagtcacacagtcgttctgtttctctagaaatgctttgccttggtaatatttttaagaaacagggttggatagtttttaaaaattagaatcagtattatagtatgcttccagctggcccctcccctgtatgtgtgtctgtctgtctgtctatgtgtctgtctgtgtgtctgtgttagttttcctctgtgtacatgtttttggagaacgccaatacacttgagtgtacattgtcgtgaagaagccaaagctggatataaagattactttctcagtcactctccaccttatttttttgagacggtttgtcactgaattgggcttaccaattagtccacacggcctgaccagcaaggcccggggatctgcctctattttcccagagcttggatcgcaggtccacaccaccacatctctcccacgtcagtgtggggttcaggacgttgcgccacagcatacactttcctgaatgagctggtcttggttgtacatgtgttctcagtcacatgacctaagaaatcttgtctctaagattgcttatgtaggggttgtaaaacaccaagtgagtcttttggggctttagtgtttttttgtttttgtttttgtttttgtttttcccttctttgtctcttttttctctcccgaatatattatgtgtgtataatctcaaatatattatatgtttactttttttcttttctgaaaatttcagccttctctaatgcattccgattctttcatctcctggacagagagaggcaagactcttagaagatgacgagctgtgaggttttcctggcagtagttagagttgtgtggccacaagggtgtgaaatggcatcaccctgataggtcagagaggcccggcctgggatccttggagtctcaggctgttctgcagtgaggtcacaactcccacctggatggaggcttgatgctgtgtgtgcactagaggagacctggccatgccccaatgacacatgggctccctggatctctatctcatgtcctctgttatccccgtgactcccctctttacactgtatccgaagcagagcaggccctgccttccatgaatagtgggaaagctggtgacctcggctgttctttttaaagtaagctaaagcatgcatgactgaggggccatggccctaaacatagcatgtgtaagaaaaaggagggagaggaagagaccaggagggcaacccaaacctctgatccttttataaaggatgtcagtgcaaatggggaacccgagcccacgggttcacgtgagggcccgcagagagtgtcgctggttttatatcctggaagtgaaaggaagaagtgaggcatttcttacatccccctgtttcccaccccaattcctctcttggaaaggagagcgccagagagagagaaggtgggattgacattcagacaggaaacgtttccgtgaacattgtccattttgttgtttaactttctggctatactgaagttgtgtgctccaaacagtcagtgacaaagagcagaaatattgctactattgagtaccttgtggagcatcctggaaacagtggccgctgtgtaaaacggcagacgtagtaaataaagatggaacctgccaaatgatcacagcagttaaagcaaatcggccgcgtattgtttctgtcttaggtcagcctgaactagagcagacaatgaagaacagggatgtctgtgggtgtcagagtcatctagtgatgtcccagatggggcgatctactaggatatacggtgtgtctccttgtacagggggacaccatggggcaggaacctgaacaatagtgagatacccatcagggaccgtgtctctcagcacctcctctgcacgtagcccatctcccccaggctctgcatttcctgggcttggctcccctctccccctttactcatatcttcattctgtgaaggcatttccatctcttctctttccagacacaatggtctgtcttgatgtaaagtcagtaatctgtcaactactttatggttgctatggtggacaccctggtgaggagcatcttacagaagagggttccagaagggtagagcttatcagggtgagggaggagtgcaacagagagcaggagccagaacccgtgtgctcgctctctcatccacgcaaggaagcagatagaaagataactggaaatgggatgaggggcgaaacccccagagcccacctgcagtgaccacctccaccatggctacacctcccaaaggatccataatccccctaaacaccaataacaaccagggaccaagtgctcagatacaggagcctataagggacatttctcattcagacccccagagagtacaaacagcatcgagcatccctgtcaatcatgcctgggggtgcatagcagggagattgtgtgtgatcataacctcagggacttttataaatatttacaattttgttgtatttttcctattgttcccaacttaaaatataatccaaactgttccgtactgaaacaaatagtttagaatactatagctggatcaactttcccgaaattataattttaaatgctttccctattttaagtatcactgctgtaatatcctggggccaattaatttttataagtgatatgtatctcttacaatcatttaataatatgattgtattctatataaaagcatattcatatgaattcattttctaacttgtagaaacaggtgtggatgagacactcttatgtctccgtcataggtttgaacagttatttattgagagcttattgcagattcctaagctattagatagtcatcgagatagacgtggccctcccacttggaactgaaattcttgtggagaagttagggcaccgccaaatgcataccaaattaagactgataaatgcaataaagaaaagcaacatgaagagacctgggtgaggctatgactagtaacagacaatgtcgattgatctctttgtagcaagcaccgctctaaatacttacaagcactgactcattatgagcaaaggctcatgaagataggcatctgggctgtgataacattgtgtctcatttgcaggtgagaaagcaaagacagggagaagtcaggagcttgtctttgggagagccaggcaggacttaagcccaggcgttacaggttgatgcttttcatcttacagatctggggcagggagatctcagctcagttggcaacgggcttcctgcgaagcctgaggatccgagatcaagccccggagcccactcttcagtctgctgctctgttactgaagtgtcctgaccctttgttctgaatctcttgaagataaccccgagtttggcccgtgttcagtaaaatttttccaggagaaatattcataggccttaaccaccgcccagtgatttagtctgatatcttatgactcaagttcttcaaaggtagattactaaaagcagaccgtggatggggcaagaagatcttatgttgtgttcgccttcccatgggttgccatccactataggacacctatgaaattggagtaaatttatttcatagctttagtgatatcagactgaacttaagaggaacacactccatgactcctgaccttgaagaagtgggtcccagtcgttggagcttcttcagacttttgtgattaattaaaatcttccaaaatggtagggtacctacaggattatttcttcagggccccccccccttcctacaacaactcctatgcagaatgtctgttggcaaacttggccatacttacatttatgcacattatttgcataaattacatttctgtaaatgacattatataaatgtattttacattttctgtagtatatcgtgtatatatagggagagcttcgattctgagacttccacgatttgggggcagaggatcttggtggatgtcatgtagcaggaagggagttagattggtagagtgggtggctctgagatacaccagcttcactgaggtacaatttagatgtcaggaagtagtccctgtagaaatgtgggtcagtgattttgataaatttgtagcattatgggtcatcacagtgattaagatttttatctgtcatcttatagttaacttccatgactctcagtcactaatctgtcctgtgttttgtctctgtgaactcttaaagctatctcttaactaaccattaagaaggggcattttcaggacgttatgtagatggctcattagctaagggcacttgttgctattgcagaaatcccacattcttttccacaccaggccgctcatatcacctgtaactacagctccaggcatctgatgcccttctttatgctcctacgggttacatggatatacatagacatagacacatagacacacacacacagaagcacatatacacacacaggcacnnnnnnnnnnnnnnnnnnnngcacacacatacacataccaaacacaattttaaaagcaaaattaaatcttgtcaaaaagatgttccctgtcttgccccgttttacctagagggtaggtaaaatatgtcttccatgacatatttaacatacttaagccttgttactcatgacccaggaccaacagaccatgcttatcactgcttacctccatcctcacgaggcttccaggaagaagtactccagagcttatcatgaagatatttgtctaatagttcatttataaaagcgtcatccttctgtctacgtctacaggtacaacttaaagaggccattgaagatcttcctggaaaaatggatactgaattagcagaatctggatccaatttcagtgttggacagagacagttagtgtgccttgcaagggccattctaaagaataaccgaatactgatcattgatgaagcaactgcaaatgtggacccaaggtacagagccgaggctaacttggacgtggcccagagccgaggctgacacgaatgtgctgttgaatgggagttctgggtgtggcccacaggaagcatttgatggcactaggggatgtctgtgtgtatcagcccttcatatgtgtggtgcactagtgtctcgtgtgcagagttgtatgttttgtaaaatcatcccatggctgtgcatatctcgttgcaatcataccccagactccagcatctaaaaccttctagctccaagcattcagctgttcagaaatgggatgctgagcttgtatcctaggcctcccaagtgagttagagtcctaaattccaaatctatgtcaagcagtttggaggaagaagaatcatttgcgttgtttctagctagactgtttagattctagctttctaagaggggagggtgtataggagaggttgtgcatgcctgtaacccgagcatctcgaagcctaaagtagaaggctctggggttcaaagccacctgaatggcatagtgtgttcaaagccagcctgagctctctataataatagggatgataataaaggatttttacaaatgttgttgagggtcatgtgacccttccccatctttgctgactcgactgtgacctctgtgactccagaacggatgagttaatacaacagaagatccgggagaagtttgcccagtgcacagtgctcaccattgctcacagactgaacaccatcattgacagtgacaagataatggtgagttctgccctggcagcgcccacagatgctcacaccactgtccgtttatccttccttctaaaaaaaaaaaatgataggaacccccagtaagcaaagccccagctaattcttctgttgccagcagtgcctcaagtgcttatgtatgctttgagtcctactatgcatctgcctttggtgtgctcctctgtctactgtctgttcaaatgtatttgcaggaccatcttaagatgaattacgccccaatgaaatgtcccaaaccaggcagtgcgtcacactattgcttcatactctgttgtagtaggacagtgttattttgtgcatgccacctgtcttagtgtttctattcctgcacaaaacatcatgaccaagaagcaagttggggaggaaagggtttattcagcttacacttccatactgctgttcatcaccaaaggaagtcaggactggaactcaagcaggtcaggaagcaggagctgatgcagaggccatggagggatgttctttactggcttgcttcccctgccttgctcagcctgctctcttatagaacccaagactaccagcccagagatggcaccactcacaatgggccctcccacccttgatcactaattgagaaaatgccttacagctggatcccatggaggcatttcctcaagggaggctcctttctctgtgataacctagcttgtgtcaagttgacacacagaaccagccagtacaccacctttgtcacggcttccctgatcagaaactactgttcctgtggctggagaaatggctggttagtcatgagctcttgtgctgtttagtttttgtcacacactactcttgcagagaactctaacctcagttcccagcacccgagtgtgaaggaagaggaagaggaaggttagtgtggttatcttcgggtttttcctagtttgctctctgttgctctgggaaatgccaggaccaaacgcaccttagaataacggtttatttcatttcatcgtaatactttatggtccatcactgggagaaaccagggcagagactaaagcagaagctgttgaagaatgctcctcactggttcgttctccacggcttgctcagtctgctttcctatacagccctgaccacctgcatgacccgtaggtcctagggatatttcatggggctcagcggcccacaacagggaaggacagaatcttgcagaaatgccaaacaacattctctaactccggccagtcactatttaacccacacgtgggtatgtaggcacgaacatcttgagtttcccttcacctctgttattgtcagtggtgtcagtgtttgccttgctggtgtctcctggtaaatcttcagggcctgttttttccctcattatctacatctttatcctcagtgtggtttgacacgcaggttacaatctggcccttccctcccttcctggcctcaccccactgcactgtccctctctctgctacggaggatgaagccacggtggtgttccccttgtcctgaggtgtgtgtggaggctgctgtctttctgacagctgtgctttctccctcctgagtgttggcagctcagactgaggtctctagcagtgtagaaagagaaatgagtggatttgggtaaggtggcaaacagcgtgactggacttggattgaatgtgggaggagagaggagtccccgtgttggtttccaaggtgatcacgagagccctgggatacatgggtgagaccagggtgaagtcaactcaggaagggctctctttgaacatgtgaccttgcgtttctctgtgacattggccctccccctcagaactccagtgtggggaagtcttcggatcatgtcccctggccatggagatattagagacaaagcaacgtcagaggcgattcccccaagaagcggaaatacgatcagttgagctgctttctgttgtaagaatggcacaggtctccagcttaggggacccaaagacatgcaatctcttctttcacagatggggacttaaaccctgatagatccagccaggatgaagcttcagatgtgttttagaactgatcatcccacaactttcagcttggtagaacaccagtgtgcctgccagttttctgtgactgtaacaaaataccaaaaaaaaaaaaaaaaaaaatcagctttttaaaagatttgttcggctccaaaattggaagtttcgggctgggattctctggttctgtggtgaagtggtgcatcatgggagaatgtgtaacaagacagagctcttccgccatggccagggtgccagagagaaaagaaggagccaagattccacagtccccaaccacattgtcctaaaaactcccaatagactccacctcttaaaggttctactgactctttgaacaaggtagtggtctttggagactttcggaatcaaattgcagtgtgtgttctttgtctaacctttaacgtttgaagcagttttggcttcaggaatgcccattcctcatgtagaaaacaagagttccatcctgttgttccaaagctttacagacataacacatgtcttagctaccgctctattgctatgaagagacaccatgaccaaggcaactcttagaagggaagcatttaacctggtgggctggcttactgtttcagagggctagtccctgatcgtcatgatggaaagcaggtaggcatagtgtcggagcagtagctgagacctttacatcctgttctgcagggttagggttagggttagggtagggcaactggggctggtgtgggctttgaggtttcaaaaataacaaggccacacctcctaatccttctcaaatcggtccactattgagggacccagctttatagcctatgagcttatgggggctgttctcattcaaaccaccacaacctgtcaatcagctgcaaatgtgccaggggccaggggccaggctcagggagtggctaaccaaggaagggatgctgatgagggccataagcaactgcatggcaccatcaagttgagtgattgcaagtgcttaaagtgtattgactagacttccttactctgcctacactcccccaggcagataggaacggttttgtttactgtgagtaaatcaaacaaaaggcttgttgggaaacaactgtggcccaattaatggctttgtttatgtgttggctttccaaagggatttaaaaaaaaaacaaaaaacaaaaaacagttttggttcattaagcaccgttaatgtgttaggctcagaattctattctatgaagatgttctctcaattttaactttattaaacacggcactgtagtgtttatgacagctaatttaatcactctcatttgctcagttgccacaaaacaatggagcaaggctgacaaattagaaaacctccttctcccgatactcagagctatctctgcgttagactcagcttttccccctcattcttgggattagctggatacctggcttctgcgttctcttcagcgcatagcagtgcttccttccagtccctgagctttctgttcacacagctctgggctctcccaggagcaagagcaagagacgcttgactagggtccacagctactaccgctgcctgtgttagaggctgtccctgtctgcaatcagggaattgtagggaattctagagaaccacaggctcagagtctcgggttgtggctccctgttgacaggccacactgtggtcttataatctttacctttcttcttagttgttttcccagataaagtacaacccgtaactatagtcacacacccagcttgaagagcagagcaactcagaactaaccagaccttttacttaagtctctttttcaccttagtgggactttcctttgatgagcctatttggccaaaactaggtcattgaaaaaggagagaaaggggaaaaaatgtcccatcgcaaatatgcttccagtttcaagtcctaaatgttctgggtgcaaataactaacatggcagttcagactccagaaggaggatgtaagcgcgagaggcgaggtgtgaagattaaggctatgttttgctcttgcagaatagaagacacttcactttataaagcaatttgatttcctcccttagtctcttgcatgggagagacctatattttaaaactgcaatcttattttcttttctgtaatgtcaggagtggctatgccctgtggataaactggattaaattattttgaaatggatccatccaattttcacatctgggacaactaccccatctctgcagagatggaggtctgataactcatccttgctaagcttatataactagctgactcacccagtgtatttgtccttaacctgctagacagcactgagcaatttgaggttgttgttcctggagagatctggggttgagcatggctgtcggataagcattaatgtgggatttggtttacagtttatttgggtccgggggtggnnnnnnnnnnnnnnnnnnnnnnnnnnnnnnnnnnnnnnnnnnnnnnnnnnnnnnnnnnnnnnnnnnnnnnnnnnnnnnnnnnnnnnnnnnnnnnnnnnnnnnnnnnnnnnnnnnnnnnnnnnnnnnnnnnnnnnnnnnnnnnnnnnnnnnnnnnnnnnnnnnnnnnnnnnnnnnnnnnnnnnnnnnnnnnnnnnnnnnnnnnnnnnatttacagagcccgtgccttgagtcttcccttttaaactctgtcttgcccacagctgtcggtttgaagcatgtgacttctgagtccttgtcttccattctgtattcccgccatcccacctgacctgctcccagtgcattctggactccttccctcttgacttctcacttctcccaccagtgggcatggcccagctgtgccctgagagtcaagtcctttgactggttttctgccactcagcattgagaacttggtgtgctcagatggtgccaggctttggaaactcagcagtgaattagtgaagtctcgtgagcctgctgtcgggtaggctcatgggataggcgacagagcatctccagtcagggctcgggctgtttgtgtcttgaatgcggtcgtgtcctcccatctgaattttcacgtgtctgatgagcctgtgtgatggtccactctgccgcatcctccctggggaccttcctcccttgcgcagtaacttcttaatgacatggatcactaagtgtgtgataaccgcgctgagtgaacacacagctttgaggtcacctgaattgtcttcccatgcatttttgctcgcatgtaactcgttcattattgatcctggaaaggggaataaaaattgttttttttttcatttggggctatataccatgcacacaggatataatctaagtccccagtgtgattaaaattgcactggactgaacaggtgacaagtttctgataagagtgtgttttcttgagtcaggcagagttatattatccaaatgaggagggataataaaaattgttttcatgtctccttgctagtcctttatatctgataataaatgttatattctggacacccagatgggcatgagtctcagcacggttgtctccggccagggccaagtcacataatttatctgccggtcaatgttcatgtcagatagggagcacgtgaccaaccatgttcctctctgaggagtctcccttcctcagatggtgctgttgtgggatggatggtaaaggcagatgttaccttacttgtcccgagtgtgggggttaacccagatgatggtaaaagctggaaatgggcaaacaatcccatttgatgttacttctcaaggactaagacagatgctgcgaacgtagcttagttggcagaactcttgcctcacgtgccccaagtaatgggtttgttcttctgaacactacaagccaggtgtggtggctcacagctgtgatcccaggaatggtggctcacagctgtgatcccagcactggcgacacaagggcagaaggacctagcaactgcaagtcccagctgcgctctgttactagagcgtgagccagcgtgagctgcagggcagcctgtcctgtggtttgttttggctgtgcttgtttatttgttttattcgtatgctcctgttgcctgcatgattgtctctgtgcctgtggaggccagaagagggcagtggagccaatggggctggagttatagctgttgtgtactgtcatgtgggtgctgggaattaacctagagtcctctggcagggcagcctgtgctcctaaccactgagccgtctctccaggcaggactcttgtcttttaaaaacacaacaaaactattccgtgcagagatttctcttttgtcattaatctcactggaccacgtttttgctggcatttagatatcagagcctgccctgccacccccaactcttagcccattcatttatttgatgtgataacattctggttcctttttaaatactgtgtgtgtgtgtgtgtgtgtgtgtgtgtgtgtgtatccttgcatgtgtgtgtgtttgtgtgtgtgtgtatgcatgtgtgtgtgtttgtgtgtgtgtatgcatgtgtgtgttgtgttactagaaacagaacctaggctgagctacactctaaccctatgataaggcatgtcaaaaccacacttaaaaagcctgtcgtagtttacatttccaaagcgttatcatgcaaattgttcaaaagttctagggctagggacgtatctcctccttgtcgagggtcactttgcatgaattacacctgagctcactctgccagcaaaataaataattatcacaattctgtcatatgcctccaagtgaaaactctcctgggctggagacatggctccgcagttaagagcatatgcagcccttgcagaggacctgagttcgattcccagcaccaacatggggttacccacaatcactggtgacctcagctctcaggagattcagcctctctgacctctgtggacaactacaaatgcacacacacacacatacatggacacacacagggacacataaatggacacacacacagggacacatatacacacacatggacacacacacaaggacacatacacatggacacacacacacatatatggacacatacacacacatacatgnnnnnnnnnnnnnnnnnnnnnnnnnnnnnnnnnnnnnnnnnnnnnnnnnnnnnnnnnnnnnnnnnnnnnnnnnnnnnnnnnatggacacatacacacacatacatggacacatacacagggacacatacacatggacacacacacagggatgcacatataaacacagacacacacatacatatacacagatatacatacatatatacatgaacacataggtgcacacatgcacatggacacatacatatacatattttaaaatatttataaatttaaaaatatttaattttaaatcattaaacttctcaacaaactaaagtacaaattgttgttaatactaagaaggccgagagtacttttttaaatcagtggtctttctgtcacttctgttaccaaccctcctaccttctgagagtgtttgctgactgggcctttacaaatgatggtcacttttgagatctgccactctgagtgtcatttgtgtgtttcaaacccggtgggaaggggaaagacccatcttacattttaatacattcagtaggaagttagacggggagcagttgttataaattcaggctggagagatggctcagcggttaagagcactgactgttcttgcagaggtcctgagttcaattcccagcaaccacatggtggctcacaaacatctgtaatgggatctgatgcccttttctggtgtgtctgaagaaagtgtctgtactcatataaataaaataaatcttaaattcaggcagtctgttacagtcagaggagtcagggtccacctccgaagcgtgattttaagtttactttttgcttctgcagagtagaaagttcatcgttttgtaaagtaagttgactcatttacttagcccttagcaaaggagagacctgcatttcaaaactgtgatttcgcccttcgttaacgtcaggaggagtggctatgccctgtaatgcaatgcttaagtaaaattacacattcggggcctctaaattggcatgccaaattataggacattctaattattatgtggatgtgacagattcaattattcttgaactcttttgagaaagcagcccttagcagcaattcacagtagtaaacaaaagattaacagaaaaaaatgccctttaggggactctataaatgtttccgattaaataccatgggccaaattaactgtaatatccagatacagaaaaacaaccccagccctgcgtagagtttcagtggattctctcgaggtggatttactctaaacacagcccagtgaagaacggagtaagtaccacctacttgggagctgtttccctcggtgggtgcgtgcgtcatttgggccagctgtctccaactctctcttctgtctgaaaccattaaccaaagccactaataagtggacgagcgcctccctccacctctccatccccagagtagaccaatgagctgtccgctggctgcaaggccggcagctaaagggagagagaaggaagccagaaagggaagctcaaaagatacccagccctgtgcccttcagaacgagctgccccgaaggctgtgcgggcttgaggtcatcagaattctgagctcagtgtctctattactttcttagtcttatccagagagaaattagatttctatcgttttcttctgtgcacagcattgctgaagtcgcttgtccgtcatttactggggttgactgtcatcaggcttagtccccgtcatccccaccccccgccccccaccgtcagccccaaagaacctcaggaagcgcatctcccaccagctgctgctcagatcctatccatccagcttggtgatttactctcaagccactgttgcttggctcttctgacatgacccatgttctattaaacaggctgcttctcttcagtccatagattccttagctctgcatgtacgtatatgcaacccctcaaagctcagagtctgagggtttttaaagcactaaaagactccccgagcagccttggcattcgaatgcatagagcaacagacagctgagcacccctgtaataatagtctagaactttcatttttctaacttccctgtaacattaaaataataaaaggtcaggttggcctttgtttgctttgtagctcagggtaatcaaacctttcagggatcctccaggctaccacccaaatagatcgtctgtattctccctggccccgcccctttccgaagcattgtctgtgtgataatatattgctgcaagacattgtgtgtctcagtgggtttttttctgctgatccccaggttttggattcaggaagactgaaagaatatgatgagccgtatgtcttgctgcagaatccagagagcctcttttacaagatggttcagcaactgggcaagggcgaagccgctgccctcaccgaaacagcaaaacaggtgagttggcccagcagccttaattacagtgtgtctcacccgttccctcctcgccatttggcaccaggggtctggtttaaaaaaaaaaaaaaaaaaaaaaaaaagcactgtgtgcccttttcaattataagcctcgggagacaaagcttcaacacgtccagggttgaagtaaggtctaccaggacttggcaggagcccccggggaaggtgtgtgcacatgtgcacgtgcaagcaggcgtgcccgagagggcgtgagccctgacagcagactcattacatttctttctcatggatgcttaacacattgcaatgcaggtattgttgggattcatccaggaagttaggctaaggtgaaaatggaatatgtttgttataaaaaggtctactagagagacgtcaggctgcccctgttcttttccttaaaattcgtaaagaatagtagtatcgcttgctcctgcctatccctataaacctttgttgagttttgggtccaaagaaacctttgtttgtcttctcctaccttctggagaaggtaaatgcgcaagcaggatgtatccagcattgattacacctcaagcaagggcctagtgtgtggagtggaaaggctttaaggacactcagcttgcatgggagctttccgatgtgcacccatgggtgcctcgggtaactgcactctggtctaagggacttactgtcacacagctgtaacagtaggctccagaatacaggtgtggcttttgaccttcatccctctatatttctccgatttctcaacaatataggcagaataaaattgcttggggttgtgtaacatcttaagtatctattaaagacaatagaacaagaaaccacgtgttagtatcctgccagtcgtgggtgagcagtcagtcacacctaaaccctaggctccccttttaccaccgtatcagctcattacaaataggggctggatggagagatggctcattagttaagagcgtttgctcctcagtcatgtgggccagagtttggattccagaactcacgtaacaagcaggcattccactcagacatcgtgtgcacatcccacaggcgtccctaatcacgcagacacacccgacacacgaataagtaaagtcaatttaaaaactggtaagttaatgggttgtgcgtatataaaagtgttgcgttggctaccatgtgcgaagcgtgtgtgagcatacctttagtcatcggtgataacagaccagagaaggccagcgagtgagccacgaaggtgacagcatcggggaacaaggttttgatgctcattagatgcagtgctttgggctatggttcaggttctctgaactttatgtctgctgaggaagctatggcttagagaacagaagggaagaacccagagtcacaaagccagtaagtcactggaagccatgtgttttaaaatgtgcttcacgttgtggacgagatggacgacatcttgaggcggcaaagtgtgtaaggctttttacagagaatttagaaaggaaaacagaagttggaaccgtgttcgggaccaaactttcactcctggcaatggcaagagcctcgtccaggttctccgatgtagcttttgggattaaatgatttgacaactgtttttaataaccagcctagcagataatagatgacaagggtacagaattttttatgtgtacatgtgtgcttctttgtaagagtgtatacatgcatgatattaactataacagttgtaaaactaacatagtaactacaataattatgctacttgtaatataaatataatatactgctttagtcatacctcggttttttgcacagtcagcttccatcaaagctctgtttcatacatagagtttacagtttaggtttgatttcctttttatcacagaaattatttaagaggaacatctgctagtaacataatagctttctattttagttaacatttacactgtcattgttctgtagtaaataatgcttacttctctcctgtcagcttacttgagataattcattctttcttgtgccctggtgccctggaaatctctataagaggttgttttgtgtgctctctcttagcaatgatcagcctagtgatttttccgtccatctgctttaactaaatggtcctctctgtccctacattagtttttctcatgtgactcctatgtggaaatgaatgtcccatacagacagtatatgcctctctttatggctcctctcacattcactttgaatattcttatttttctcaacttgcagatatttatgacttccgttatgagttatactgtctacaattcgagcagtctttctgtgttcgtgtaaggccttcgggttttaattctaggctgctcaacgctgaggtggagccttgttccccttcaccctgtcctcatttgctgcatatgcctttgtcattaataccagaaatgtgccttccatacatgtatggtattgggtttcgttcagagatgcaatcctagcctttctacaaagagatggctttaacccatttgcatttattgaagtcacaggtatgattgatgtctgaaaggttcatcatactgggcattccgtgcttttcatatgtgtgtcacattacccttgtcaacttcataacaccatttctccttaagcttcttgaaatactaattccagttactctgcttgctcactcaatcccgtctccacgtctcactctgtggttcttttcctcagtaagtcatctccaggctgtcccttgtaaaacagtcatttctgtcatcttttcctttctctcttcactgatgacatccgtgagtcagatttcacctccaggtttctcaccctctgcacaggggcttctgctgcactggactgtgtcgcggatgctttcctgaaaccgtcatctgcacgctgagcattcctcgttatcagtttgtcttgatccgtccttcctctcacgtatctattttgccgacctgtcttttcattattgtcaccactttttacttctggataaaatggtttttggtcttttttttttttttttttttttttttatcctaatcacattgctgcaggatggttgcgaataggacattgtttcagatggcagtctataaactcttcctatttctctatatcttagatgtttaaggtgatttctaaaagagtaagactttgctaattcattgctcaataatctaaaaagcaggactaagcctctagtattaacttgacagcagtcccagtggcgggaatctaactagacctgccttacagttgacgtgcacgaggccttgagaatcagtgtgagagagccagagttctgctggtgagcgaggctaccctgacagtctggagccagaatgcagcacaccaagtggtatcttataaatgcagtgtcagtggaagccactgctctcctctgtccacaaggggaaagttgtgtttttgtgatgtagcatgtggtacccgatggacgagtgaatggctggccttggtttcagcccacatcagaggaactctgtgaaaagaatctaagcaaaaggaatgaagaggagcagaagattagcccccagatttgagtatgatggcagcatctctctttccccatgtcctggtgaggcaccattatcgttggccacatgaagaagctgagggagaaaagcccagctaagggttcagagttaccagccagcaggccctagtcccccaagccccaggcatctcctagcctgccttcctgtcttcccgcctcccaggctaccatattaactccgttaacaatgtctcaacaccaggcccgggattctgcaaagatcctctcagaaggcccacaaaaggcaatcagggctgaagcggtttcacgcttctgctctgtagcattgctttccccgcactgaggggctgcctctcaagcagccgtcattagcacacccagcacttagctcggcatgttttcagcctgcagtttgtagccattaattagttcctatgaggtaagtctttgttatctcgtttttacagatgaggcagacagtgtggagggaggctgagtggatgttgcagtatcagctgggtattcaggaaaaagacggagactggttccttttagcctaggctcggcctgcggcttgagggccccatagagaaagtcagccatcttttggcttgatctcatgtagatgctgtgagactgggaatctacaattggtagagtgtctcgcccggcatgcattaatctctgggttcagttcccagcgtcgtattgctttttgtttttaacggacaatagtgatgatggcgcatgcgataatcccaacatgtggaggtggaggaaggtgttgagagttcaaggtcatcctcaggtctacggcaagttcaaggccagcctgagatacttgaaaccctgactcccccaaattaaaaacaaacaaacaaaaatttaaattaaatttagaagaaggtgctcagtctcaaccacaccattatccagaaagtgttataaatgtggtaggagaaattcaagtcagaaacggttctcagccattttagtaaacgtgcgtgtgtgtgtgtgtgtgtgtgtgtgtgtgtgtgtgtgtgtgtgtgtgtgtgtgttgcctgcatggatgtgtatgcagcatgtgaatgcagtgcccacagagtccagaagagggcgtcaggtcctctggaactggagttacaggcagacatgactagccctgtgggaaatagagagtctataggtggagattatgtgaaatttgaatacacagacacaccaaaaagaacaggttctttttatgttcgaaagcatgtgttagggaaatagtctcaaggttgtgctccagtaggctctttcttcttaagcgacatttccttcataaatggaatcttccgtgttggggtctttagggagaagtctgcaagctagtcaagggagggtacttagtggggaagtaggtaccagtgaccttgaggcctgggaagtccctcattcccactgataactttgtggacagcacccacgaatataaatccacagctggaggtttgtaaagtggatccggcatcccgagacccggctcgtgacatgtgtcagctcagagagatgctgcatttttctgttttaaagactcaaacaaaacttttcacattctcctttgaagggaaaaaaaattacatttgaaggcctttttcacgcaaacacatttggagataagagctcacgagtcctgacattatttcattttgtaatacacatctgtcaaggaacccagatatgatacagccgctaaaaactgatgattggggaacagagagacctgacagcatttcatgtcctttatgttccgattacacgtttatcagagagcccgtatctcttctattgcagcttggaattggcagaattcaggaattcaaaggcttggcaaagagctgtcctattatttggtatcatcttccatttgagagaagtcgcctggttgggtcattgtcacagcctttgcttctcttttcattactgtggtccgctatccacagatcgtggctctataggccccacgacggccttgctgcacaaattaagtgccgggatatttcatacgtagaggccagagtttcaatgcttgtcagtcagggtttgtaatatatagggattacaacctgagattagcatccaagcccattgtgctcattttatgcacgaaaatgagaaacttcagtacagatgcccgatcgcctggcctctttgtcatccccccccttcctgtttttaaattatctctgggttttgagtcagtgaaatgattttgcttatcagtttagtggcgtgataaagcatatctgtgaatcaaagtgatcagaagtaaagtggatctccaagttgttgggcattcagcaccgccatgcagagggttttggctggcatttaacagcttttgtgcttgcctgggcttctaactgttcctcaatgagccctgtgatttcctggatggagacagacaggcataacctccaagaaagagaaaggcttgaaaatttactcatgttctgttttttgcctgcctctttcccacaggtatacttcagacggaattacccagatattacattcaccagccccgcggttatgaacacctccaatggacagccctcggccttaacaatatttgaaacagcattgtgaccaccaggacatcatcgtaaagtctgtcttgaaggtgttccccaccccgcccaggggcttgcacttggaggactacagcacacctggtttcctttctttctgccacagatccttcacagacgagagactgttgtctttggatttttccctccgactttactctgtgatttcaggttctaacaacatggcctgtcgttttattttaaaagttcctgctgttctttacaaatccagttctgaggtgcaggccaccaacagcagcgtctaccaggttttgtgccttaacagtctcaagggctgaagcccattcattttataagctgtcaccatgggctgctgcttcctcttgccttaaaagtacactctccaggtgtgtcagggactctgtttacttgaagactgtgtgcagttgccagttcgtctccctgctgtctttgagctaggactcataatttccctacaaaggtctctggttaaaatagaataggtagaattaacaagaaccacaacaacaacccccccaaaaaataatccatataatttaagtatattgctggagagagactatcccaccacctatacatctacaaagatatatgtctaaagttggaaaatcaacttctgctttctcagaatgggagaccgagcgcaggttaggcacccctcccccttgcatctgtgagtccctctgggcggctcgtgtactgatcggatctgtgagtccctctgggcggctcgtgtactgatcggatcggcaccatgacacttcccctagactgtgactcccaaatgcataatattaatctcatttggcttctggtttacagaaggtaaagctcctattggctgtgagccgttggtgaaatcctttcacatcgacaccaaaagctctccccagctagtgaaaacctgaacatcgttagagtcaccgactttacatgctcagaatgctgtgcacaagccacgctttctaaagcccatccagattagtttagctctgaccactaatggcaggtcttaaggaccttgtgattagtcaatcaacaaaccacaacacttcctaggacctgttgtactccgtgtaactataggtctgaatattttctgggtggtggtggcaagggtctatgtcagggttcaagttactaaaggttttactgtcataatttaaaggggactcttcacgacccgtcacaataaaccattctcaagttatctatgtgtgtgtgtatatatatctcaggtttttagactggttgacagaacaaagcctgttttaacagtggaaccttaaagagcacacctacaccaaaccaccaaaaccacgccgagcacagtgactgtttgactcttggtattcagaagtctgtaatgaatgtaattatgtttaggccagtaaatgatgtagattcgtcctttattggtagtcgcagttgatatttcaagagagtgagatgccatgctgacaatattaagatctatttgaatatttagaaatgtcttactgtatatatgtttatgtttatttggtccttagagattaaaagcggtcatacaagtatgttcctatttcatttctatttttcacaccatcacaggacaaaccaaagtcaactgaaataaatgacagtttccatccccattcacagatctgtttgttcgctgagggattgtgatctgactcatgtccttgctggcgaaagccagtgagcttttgtgagatcaaaaggtacctaccaccaccacctgtttctcttggctgcctgggtggaccagattgtctaaagggaggcgtgggttgcagacaacctgaaacagttgctcctgaagctgtcaggtaactctcctttccagaaggggagtattagctcacgccccaaggcctgaacaaacatcaactggatacagtttgtaggttttttttaaaggtaacgtttccctcacactaacagaagaatctattgcctgcctttccatttaaagcactgttgagtgttggttctgagcctgggtaacctgggccagcaactccgtctagaaacttgtgagaagggagattcgaatggcttacatctacaagaaccatacctgtgttgtggggattggtgatctgatttagaaattatcccgattcagagaacaaaacgcctcagagctgctgccatcgagtcttaaaaaccctaagccttctcaggacaatctcagggtccactcagaggtgagcaagaggctaccaagcaagcagcgggaacactcttatgctgcatgaagttatttataaaaacaaaaaaacaactttggcccagtgagatgactcagcggggaatgcccctgcctccatgcctgacagcttgagtgtttcctgaatcccacctggggaaagaactccaatcctgaaagttgacctctgacctccatagcatatgcacatgcccataacacacacgagtaagtgaatcctttagacaaacatcttgatgacatttgctcgaatgtaggcccctatgatctgttctctgccctggtgtgcacataaacacactacccactgtatcagcaatgccatcaggaacataattccaagtatttcagcctgtaggcaactgaaattctcagcagcagtagcaggtggtgggacacagccatgaaaacacctttaactctacaagttttggcttcttggggatacagacacatacatggcacatatatacgtgagcactaacacacctaaaacaaagttagaaagaaaaccacaagattcccacatttgctcagtgggcccagttccctgtgtcaatactgaatactgttctttaaaagagccaggatcaagacagagtcgatggcttccaacacctcctctggaggccctgattaatctcagtgtcccacttagcagcggtggccttcttcaagaagccagcgagataaatctcaatgatccatcacaacagatagaaaggaactgatgattgtaaaagcagcgtttgcttgattcagaagctcatcatagttatttgggggagagaatcacatggaaaccattttaaaattaaattttaaaagcaaattatgttgctgaaaactaatactagcccatgtgaggtagtgcgtatgtcctgttagtagcattttaaggaaggtggggggaggccacagaaagctagggatgtaaaaatgtttcaatttataataatgagtcaattaaaaataatctacatatgcacaccaatgccagttagatgggggaggggagagatgggcagacgaacagacagacggaagtaaacactttctgtaatagaatgacaggagctaaatatagaaggatcaatggaaaaatacctgtggacccactgttgtcaacggtaactcaaactattccaacactgtatttgctaagtgaacctcgtatggatattcaggtagaaataatgtctatgtatgcgtggaatgtgtcatcccatagtaagaggaaaactttatgtttaccatgcaaaatctgacagacaccctcctaaccaggcagccaggtccaacctaaggaaggaagctgaagtcagccatagtgggacaggcagcagcctctctcttgatgtgtgcagccgtgtttataccatctcacgtctgtgacacacctgccacaagcatgatcagtccaacagactcaaagtgaggacactctacagcacacccggtctgtgctccctgaaacagcctgtagccattagaggtttcagaagtgttccagtttaagtgggaacttaagacatgctaattaaatacactgtgatcctggattaaaaacaacaacagtaaagccagtaatggcagttggtaatatcagggtgagagctgtacagttgctaatagagttttaacagtgttaaagcaactgaatttacttcttacgatgtgctatgcaacaaaaatagccttagggaatgcacactggtatggttatcggaaagggcctatgatatctgcaaatgtgattatgtgcatatgtgcatatacatagtatatgtatgtgttctatatgcataggatagagtatatgcatatataacacatccatgattgtggagtgaaatactagcaggagaggagacaaacgaaggatacgaaatttcagtgagagcccagattaaagacacagacaagctgactacgttactgaactgttttacactctttgttcagaaggcaaagccagaagcatcttctgcaaatagaagcctctcagaggtgggctgagcgacccctggctctgtgggtatcatataagtcattaggagatggtttaatattatgtctatttagcagcacgagtagcagactctctcctaaggcctatgacctgtcttagctcaacaatggtgcttcctaaatatgaaaaggaactagttcttttcatcaccttgcatagattcctggctaacccatcagactgcaccggtagtgggctgtgtaaggaagaaacatcacagctttattgctacatacctatgttgtgatgatatacgatagtatacaagcacagaggagaaaggctgagtccgggcttccatgattccaaacaggaaacgatgtcttggtgatttgagatcacattagaaaaaagtaccaagatgtctgatgtaataaatggagctccacatctctggttactttaaagtcctactgaaacctaaagggtgtttgatgttgtttttattaatagcatttccaactgtttttctttattgcgttattggcaaatacaatgaacacagaggagctgccatctccaatctgcaaggattaaaacagaatagtatctcttggcaggaatacagcagagtccacgctttcaccttgagccagacatggtggcccatgttcttacttgcagcacctgggaagcagagacagggcactatctgtgactacagcacagcgagttctaggccaggcaaggctacaaccctatctcagtcaccaactaaacaacaaacaaacaaataccagcaaaatgctggccaagttgtggaaggtaaggagaggacctgcgtgctgtcctctgtcctccacatatgtgccacatacatggttaagcatgtacttgtcttgcagaggacctggattccgtttccagttcacatgtccatgtggttacgactactccaggggacccaacgcactcttctgacactgacactacagacactgcactcctatgcacacacccacatagagacatatatgcacacactaattaaaaataaaacaaacaaacaaacaaaaaacattgctgaagagttaccagtgaggaacacaacctattttatgttggtgcaacaccatagcagccacaatactggtctaggacttaacagtcatctataaaatagtggctcctaaattgtacaatgtatccagacttgttgccacacgtctttgccggaggttcctaaaattacttatcaggcaaagggaaatggctaggcaaatttttcctgggaaacatggtgtttccccagatcaaaataatgccgagctgctgatttacatgggtggggcagaaacaagtggcaactagggacctgaaacaataatctcattttggtggaatttggactttcaagttgttctcaagctacgaggctgctggggtgaagactacattaacaggccagccatcccagccaccaaggcagccacagcaagaagacaggacagctgtccatagacttagccctttaaaaaaagactatgttgtcattagaatggaataaattatgcaaattatgggtctcactgactttttttttactggatattttatttatttacatttcaaatgttatccccttttcctggtttcccctcaagaaagcccctatcccattgcccctccccctgattctctgagggtgttcccccacccactcacccactcccacctcccccaccctggcattcccctacactggggcattgagccttcacaggaccaagagtctctcctctcattgatgcccaacaaggtcatcctctgctacatatgcggctggagccacaggtggttggtggtttagtccctgggagctcttggagggtctggttggctgatattgttgttgtagacttagccctttaaaaatattatgtcatcattagcatcgattaaattatgcaaaaaaatgttgttaccatagaataaattatgcaaataacaggtttcacttagacattttcatgaaagcacattatgtagtttgatccaactcaccctcagttaccctctctgtttaaaaaaatgattatagattatggatttgctgctttcttgtttatttgttttcatttatttatttacagagctgggaatcagactcagagccctatgcttgctagttaaggactccaacacagcaattttttcacctgtatatattcagggggtcgggtatggtgagctgatacatgcagactgcatctaatgatgaaatcagggtaacgagcctttctcggtctagcgttggtccccgcccactcttctggagttaaaagtgtgcatttagacttagctaacaagacttggttcagatgttgccaattgtgttagcaacacccaaagcatcacagcaggaggcataggaaggagtgcttcctgatctccatcagtggggcgctgatcttgacttcacctatgtgtctgtcatgttgaccttggcctccatgttgctgctgtctttggtcttcatggtagacttggaggtcaggaggacttcacagtggagcagtaatagagctggtttctcctggcctccaaccatccaagactgtttccagagccacagggtctctgctggcacgtgacactcgggttcgcttttccgtggaatcctgtcaacagcagctggggctttgtggcctttgcttggttggcttcatctctgggagggaacgaactttcttcaccttcggtaccactgtcacctaaaagctagttttctttctcacttatgatcccacttctctaagttatagtatcaggaccccagcgtaaggagttcctgacccttggtgttcagatggagatagagcttttgagagaaggtccttatggcagtcagccatgcctagtaaagacaattggctcatttaattcccacttcttcagggctaagcttccagttggcaagccacaaaactgcctgtgtactatgcttgaaatagtcttgagaaactcataaaggagccctcactggccattcatgctgatgccttgtgtctttgagttcctttaaaagttcttattgtttgtctatatgagtatattcttggcatgtgcactatgtgtgtaatgcctgtggaggccaaaagagggcatcatcccctaggactggagctacaggtggtttgcgagccaccacgtgggtgctagggatcaaaactcagttctctggaagagcagcaagtgctcttaatcgctgagctgtctctccagttctttgagttccttttcaaaatatgactgaatttttatggagataaaaagtataaagttgctggtacttcagtgtgagagtttatcaatgctttcttcctagtgggaacagcaatagatgccacacgtggttttagagtgtaggtgtttttgacccatccttggaagacctgacatgactcatcaccaagaaagctacttcaacaacctgatttcataatatcaaatcacaataaggaaattgccagtacccaaaaagagattaatagataggacataagaagttgaagcagcctgcacattatgctgccaaatacataaatttaaacactatgcatctgtccatcttgtctgttaattcgaacaatctctcaagtccacactggctgttgaagaatcttgaggataagaacaggaagttaccgtctgggagagaaggaagtttggagaagcaggctgtttggtaaagacaggtttgcttgcttaagtggccaaggagatttgagggcagccagttctcactcagcacaggcaggctaaacatggtgtctggaccataatagaggaataatcaatgttggttgagaaaaaatgaacggctttcatactgagtgttagtggaacaagttcatttctgcctgttcgtgaagctaatccttattttaggtcaacaactgtcaccaacattatcaacattaaacaaaaaattcagatgtaatttaaacttttaggctgatgattaaagagcatgcatttacgcatccaggaaagctccatgacattgattccttcctgccgcgttttcctcttctaaggtaggaagtgtctgctagctgcagtgctcagccataatgctttctagcccagggcaagaacacgactagcagccaccaatcacaaggctcgataggtaaatatatcaaccacattaacgaaatgttgagaccaatacctgtgaaccacccccttaactccaagttgaaatcacattaatgattacaatgaatcttttacaaaacaaacaaacaaacaaactccttccttaatatctggaagtcctgattccatttttcaattcctttttaagatttttagattccagaacttgccttttcgtcctgaatcagggcagcaccgtgagagccccacagccttgcaaaggagggctttgtgttcacaagaacactctaaaggacaaagattgaccactccttctagcctcacaaatggctcagaccctgggttactcgtgctagtagtactgctttacagtgtacccttgcaaggatggaatcaagcaagaggcccatgtaggtgtttgaagggggctggcaccatttgggcgggctcttctgggttcttgaaccttgaatgtgcctctttctacctgataggtgttaaaatggtgaagatgtggagcagggcttgagagcttgtgtttccaaactgccaagcaaggctgctgctcaaggtttgtgcgtcacactcggacagccagtgtctgaggactaaggcctagatgggtgtgttcttcgggctctcggaaatttctcaccagagtaaccagccagcacctaggagagctggtgggggtcctctaaacagcaggacccagagtggaggcttcttgttaggaccacagactggtcctagccccttctttgctagaatcacccttcttacccaggcccgccctcctccttcttcgtcccccctccccctcgtgccaatgtgctgttcccataatgctgggctccgattctcctccacccgctctgccaccatttcatcctttgatctcccacccactcgccccaaagtcaagtttctcttggctcctttctcggctgctctcccactccttcccacgcttctctcttgcgacacaaaacaaatgtaaaataacatttcaaaaatattaaaaatcgatgctgatgaaatcgcggttttgttttcttggaatgggaggcaacaggtccaacaatcgcagacacagattggcctgcgctgtaccattgtttctgggcagaaccctatctgttcacccatgacctgaaatcagaatttccaaacagaaacgtttgccggattagttagggcagactaagtttttctcccataattttattttgacaagaccatgaaagctgctatcgcctcatctaatggaatcaaacaggctgctaaaaataacccttgcaagcttttattacgaacgggaaacacctcctcctcccagcttgcgactgtgatcagcttaatccttcaactttgctgcgaatatttgcactgctctggggttcttttctttccaaggctggtttgctctgtttggcagagttatttgaacaggtggctttgcacaccctatgctaatggaggcttttgtcttccttcaatcagcagagggagccgttctagaaagaaacggttctttgatgctaaactattcacacctgtttgattatcacctcgcgaatcacaataccaagccaggcagaactttctctaactggacaccagaagagatgcgatctcctttgcatctccaagagcatcttttcgagacaagcatctccaagagcatttttcgttgcttagggcaagcgtctcctgtttccatcaggcaacggaaagggcattaaggaaggtttgggggtgcctcgtttgtaaagagcaggatgctaggcttcagaggactcaccagacctagttctccggcttgagcccgcttccccttccctttcatccggggacactttcagcgggagctccgggcagacagtgcgcgcgcgcgcgcgcgctaggtcggggatgcgcttggcgcgcgatcacagggtctccggggacgccccgcgcgctccctggctgcagatcacaggcgccgccctcggccggccagcacgggaacccgcctgctccctggcgcgcgatcacaggcaccgggctccgcaccctgagggccgggaggtggcacggccccagcccttgaggagagcaatggctggcgcgttcccacgggaggcccaggaccaagcagggacttctaccttctctaaaaagtgtcttccacaagtgacaaggtggcaccagcaagggcggtgggcgttctgcctctaaagcagctttgtagacacacctgattctggctacgttggtgctgcttgagtatgaacttttggtctggtctgaacgtagccttttctagaactatgtttttgcatctcatgaaaagaatgaatgaaataagtgccttgcagtgggcagagactagcttggacacagtttaaggagatcagacttgtaggtgtgctcatgatgatagtcagccccacttcctacaggcctgcaaaggtgccttgtgtacgtgcatgcgcatgtgtgtgtgtgcgcgcgcgcgcacgcacgcacacgcttatacacttgagttttgtgcagatgaagcccaaaagctgacatatactgttatctattattactctccgtctttttcagtgaggtagggggtctctcaattaaacccagaatttccccagtctggctagtctgtgcagtcagtttgctctggggattcttgtccactcctgctgcgctggaattgcagggaggttgccgtgccaactaagcatgtctgtggattctagagacccagagttcaattcttatgtttgctgacaagtgcttcaactattagcatcttctgcagcccggattcgatttcttcttttttctttctgttgtgcttgtttgctttgttttgtctttgggacacaattttagtgtgccactatgaagaatggatccaaggaggacaaacaagaatccgaaactgggggagggggggggggagggggaaggatggagagatggctcagtggttaagagcactgactgctcttccagaggtcctgagttcaatttccagcaaccacatggtagctcacaaccatctgtaatggggatcccatgccctcttctgttgtgtctgaagacagtgacagtgtactcacatatatgaaataaataaataaatcttttaaaaagtcagaaactggtgtaggttaaagaataaatcgtgtagaggttgaaaatcatagcaaattgtagaaacttgaaggactaccatgataattgaacagatgca

SEQ ID NO: 56 - DNA, 5550 bp, Mus musculus
atgctgccggtgcacaccgaggtgaaacccaacccgctgcaggacgccaacctctgctcgcgcgtgttcttctggtggctcaacccgctgtttaaaactggtcataagcggagactggaagaagatgacatgttctcagtgcttccagaagatcgctcaaagcacctcggagaggagcttcaacggtactgggataaagaacttctgcgagccaagaaggactcgaggaagccctccttaacaaaggcaatcataaagtgttactggaagtcttacctgattttgggaatttttacgttaattgaggagggcactcgagtagttcagcccttatttttagggaaaattattgaatattttgagaagtatgaccccgacgactcggtggctttgcatacagcttatggctacgcagcagtgctgtccatgtgcacgctcatcctggccatactacatcatttgtacttctaccacgtgcagtgcgccgggatgaggctgcgggttgccatgtgccacatgatttaccggaaggcactccggttaagtaactcggccatggggaagacaaccacaggccagatagttaacctgctgtccaacgacgtgaacaaattcgaccaagtgacaatcttcttgcactttctgtgggcagggccgctgcaggccatcgcggtaaccgtcctcctctgggtggagataggaatctcctgcctggcgggcttggccgttctggttattcttctgcctctgcaaagctgcatcgggaagctgttctcgtcactgcggagtaaaactgcggctttcacggatgccaggatccggaccatgaatgaagtcataacaggcatgaggataataaagatgtatgcgtgggagaaatcgtttgctgacctcattgccaatctgagaaagaaggagatttccaagattctgggcagctcctacctcagagggatgaacatggcgtcgtttttcatcgcaaacaaagtcatcctgttcgtgaccttcactagctacgtgctgcttggcaatgagattacagctagccacgtgtttgtggccatgactctgtacggtgccgttcggttgacagtcaccctcttcttcccgtcagccattgagagagggtcagaggccatcgtcagcattcggaggatcaagaactttctgttactcgatgaactaccacagcgcaaagcccatgtaccatctgatggcaaagccattgtccacgtgcaagatttcaccgctttctgggacaaggcactagacagtccaaccctgcaaggtctttcctttattgccagacctggtgagttgttagccgtggttggcccagttggagcaggcaagtcgtcgctgttgagcgcagtgctgggtgagctgcctcctgccagcgggctggtcagcgtgcacgggaggatcgcctacgtttctcagcagccctgggtgttctcgggcaccgtgaggagcaatattttatttgggaagaaatatgagaaggagcgatatgagaaagtgatcaaggcctgtgctctgaagaaggacctgcagcttctggaggacggggatctgacggttataggagaccggggagccacgctgagtggaggccagaaagctcgggtgaacctggcacgggccgtctaccaggacgccgacatctacctccttgatgatccgctcagcgctgtcgatgcagaagtgggcaagcacctgttccaactgtgtatctgtcaggcgttgcacgagaagatcaccattttagtgactcaccagttacagtacctcaaagctgcaagccacatcctcatactcaaagatggtgagatggtgcagaaggggacttacacggagtttctgaaatctggtgtagattttggctccctgttaaagaaagaaaacgaggaagcagagccctccacagccccaggaaccccgacactcaggaaacgaaccttctccgaggcctcaatttggtctcagcagtcatccagaccctcgttgaaagacggggccccagagggccaagacgcagagaacacgcaggcagtgcaacccgaggagagccgttcggaagggagaatcggcttcaaggcctacaagaattacttctcggcgggcgcatcctggttcttcatcattttccttgtgctgcttaacatggtgggccaggttttctatgttcttcaggactggtggctttcccactgggcgaacaagcaaggtgcactgaacaacaccagaaatgcgaatggaaatataacggagaccctagacctcagctggtacttaggaatttacgcaggtctaactgcggtcaccgtcctttttggcatagcgagatccctactggtgttctatatccttgtgaacgcttcccagactttgcacaacaggatgtttgagtccatactgaaggctcccgtgttgttctttgacagaaatccaatcgggaggattttaaatcgtttctccaaagacatcggacacatggatgacttgctccccctgacgttcctggacttcatccagacgttgctcctcgtcgtaagtgtgatcgctgtggccgcggccgtgatcccttggatcctcataccattggttccgctctcagtcgtcttcctggttcttcggagatacttcttagagacgtcacgggatgtcaagcgcctggaatccacaattagcggcttccgtgctcactcaacattgcctgttctgctttgcaatccagaggcttggttcttgttcctgacgacatcgagatggttcgctgtgcgtctggacgccatctgcgccatctttgtcatcgtcgttgccttcgggtcccttgttctggcgaagactttgaatgctgggcaggttggcctggccttgtcctacgccctcacactcatggggatgttccagtggtctgtgcgacagagcgccgaagtagagaatatgatgatttcagtggagagagtgattgagtacacggacctagagaaggaggcgccttgggagtgcaagaagcgcccacccccaggctggccccacgagggagtcatcgtcttcgacaatgtgaacttcacctacagcttagatgggcctctggttctgaagcacctgactgcgctcatcaagtccagggaaaaggttggaattgtgggcagaaccggagctgggaaaagctccctcatctcggccctcttcaggctgtcagaacccgaggggaaaatctggatcgataagatcttgacaaccgaaattgggcttcacgacttaaggaagaaaatgtcaatcataccacaggaacctgttctgttcactggaaccatgaggaaaaacctggaccccttcaatgagcacacggacgaggagctgtggagggccttggaggaggtacaacttaaagaggccattgaagatcttcctggaaaaatggatactgaattagcagaatctggatccaatttcagtgttggacagagacagttagtgtgccttgcaagggccattctaaagaataaccgaatactgatcattgatgaagcaactgcaaatgtggacccaagaacggatgagttaatacaacagaagatccgggagaagtttgcccagtgcacagtgctcaccattgctcacagactgaacaccatcattgacagtgacaagataatggttttggattcaggaagactgaaagaatatgatgagccgtatgtcttgctgcagaatccagagagcctcttttacaagatggttcagcaactgggcaagggcgaagccgctgccctcaccgaaacagcaaaacaggtatacttcagacggaattacccagatattacattcaccagccccgcggttatgaacacctccaatggacagccctcggccttaacaatatttgaaacagcattgtgaccaccaggacatcatcgtaaagtctgtcttgaaggtgttccccaccccgcccaggggcttgcacttggaggactacagcacacctggtttcctttctttctgccacagatccttcacagacgagagactgttgtctttggatttttccctccgactttactctgtgatttcaggttctaacaacatggcctgtcgttttattttaaaagttcctgctgttctttacaaatccagttctgaggtgcaggccaccaacagcagcgtctaccaggttttgtgccttaacagtctcaagggctgaagcccattcattttataagctgtcaccatgggctgctgcttcctcttgccttaaaagtacactctccaggtgtgtcagggactctgtttacttgaagactgtgtgcagttgccagttcgtctccctgctgtctttgagctaggactcataatttccctacaaaggtctctggttaaaatagaataggtagaattaacaagaaccacaacaacaacccccccaaaaaataatccatataatttaagtatattgctggagagagactatcccaccacctatacatctacaaagatatatgtctaaagttggaaaatcaacttctgctttctcagaatgggagaccgagcgcaggttaggcacccctcccccttgcatctgtgagtccctctgggcggctcgtgtactgatcggatctgtgagtccctctgggcggctcgtgtactgatcggatcggcaccatgacacttcccctagactgtgactcccaaatgcataatattaatctcatttggcttctggtttacagaaggtaaagctcctattggctgtgagccgttggtgaaatcctttcacatcgacaccaaaagctctccccagctagtgaaaacctgaacatcgttagagtcaccgactttacatgctcagaatgctgtgcacaagccacgctttctaaagcccatccagattagtttagctctgaccactaatggcaggtcttaaggaccttgtgattagtcaatcaacaaaccacaacacttcctaggacctgttgtactccgtgtaactataggtctgaatattttctgggtggtggtggcaagggtctatgtcagggttcaagttactaaaggttttactgtcataatttaaaggggactcttcacgacccgtcacaataaaccattctcaagttatctatgtgtgtgtgtatatatatctcaggtttttagactggttgacagaacaaagcctgttttaacagtggaaccttaaagagcacacctacaccaaaccaccaaaaccacgccgagcacagtgactgtttgactcttggtattcagaagtctgtaatgaatgtaattatgtttaggccagtaaatgatgtagattcgtcctttattggtagtcgcagttgatatttcaagagagtgagatgccatgctgacaatattaagatctatttgaatatttagaaatgtcttactgtatatatgtttatgtttatttggtccttagagattaaaagcggtcatacaagtatgttcctatttcatttctatttttcacaccatcacaggacaaaccaaagtcaactgaaataaatgacagtttccatcccc

SEQ ID NO: 57 - protein, 1302 aa, Mus musculus
MLPVHTEVKPNPLQDANLCSRVFFWWLNPLFKTGHKRRLEEDDMFSVLPEDRSKHLGEELQRYWDKELLRAKKDSRKPSLTKAIIKCYWKSYLILGIFTLIEEGTRVVQPLFLGKIIEYFEKYDPDDSVALHTAYGYAAVLSMCTLILAILHHLYFYHVQCAGMRLRVAMCHMIYRKALRLSNSAMGKTTTGQIVNLLSNDVNKFDQVTIFLHFLWAGPLQAIAVTVLLWVEIGISCLAGLAVLVILLPLQSCIGKLFSSLRSKTAAFTDARIRTMNEVITGMRIIKMYAWEKSFADLIANLRKKEISKILGSSYLRGMNMASFFIANKVILFVTFTSYVLLGNEITASHVFVAMTLYGAVRLTVTLFFPSAIERGSEAIVSIRRIKNFLLLDELPQRKAHVPSDGKAIVHVQDFTAFWDKALDSPTLQGLSFIARPGELLAVVGPVGAGKSSLLSAVLGELPPASGLVSVHGRIAYVSQQPWVFSGTVRSNILFGKKYEKERYEKVIKACALKKDLQLLEDGDLTVIGDRGATLSGGQKARVNLARAVYQDADIYLLDDPLSAVDAEVGKHLFQLCICQALHEKITILVTHQLQYLKAASHILILKDGEMVQKGTYTEFLKSGVDFGSLLKKENEEAEPSTAPGTPTLRKRTFSEASIWSQQSSRPSLKDGAPEGQDAENTQAVQPEESRSEGRIGFKAYKNYFSAGASWFFIIFLVLLNMVGQVFYVLQDWWLSHWANKQGALNNTRNANGNITETLDLSWYLGIYAGLTAVTVLFGIARSLLVFYILVNASQTLHNRMFESILKAPVLFFDRNPIGRILNRFSKDIGHMDDLLPLTFLDFIQTLLLVVSVIAVAAAVIPWILIPLVPLSVVFLVLRRYFLETSRDVKRLESTISGFRAHSTLPVLLCNPEAWFLFLTTSRWFAVRLDAICAIFVIVVAFGSLVLAKTLNAGQVGLALSYALTLMGMFQWSVRQSAEVENMMISVERVIEYTDLEKEAPWECKKRPPPGWPHEGVIVFDNVNFTYSLDGPLVLKHLTALIKSREKVGIVGRTGAGKSSLISALFRLSEPEGKIWIDKILTTEIGLHDLRKKMSIIPQEPVLFTGTMRKNLDPFNEHTDEELWRALEEVQLKEAIEDLPGKMDTELAESGSNFSVGQRQLVCLARAILKNNRILIIDEATANVDPRTDELIQQKIREKFAQCTVLTIAHRLNTIIDSDKIMVLDSGRLKEYDEPYVLLQNPESLFYKMVQQLGKGEAAALTETAKQVYFRRNYPDITFTSPAVMNTSNGQPSALTIFETAL

SEQ ID NO: 58 - DNA, 246940 bp, Homo sapiens
  misc_feature (1)...(246940): n = A,T,C or G
agcacagttgacccttgaacaacaagggtttgaactgcaagagtccacttatgtgcagattttctttttttttctttttctttcttttttttttgagatgaagtctcactctgttgcccaggcaggagtgcaatggcatgatcttggctcactgcaacctctgcctcctgggttcaagcgattgtcctgtctcagcctcctgagtagctgggatgtgcaccgccatgtccggctaatttttctgtatttttatagagacagggtttcaccattgttggccaggctggtcttgaactcctgaccccaagtgatccacccgcctcggcctcccaaagtgctgggattacagacgtgtgctgcgcccggcctacgtgcagattttcttcagcctcttccacctctgagacagcaaggccaatccctcatcttcctcttcctcttcagcctattcaatgtgaagatgatgaggatgaaaacctttgatgatccacttccatgtgtatcttctcctcaatgattttccacaatgattgtcttaatggcggtttcctttctctagcttactttattgtgagaatgtagtatataatacatagagcatacaaaatatgtgttcatcaactttatgttactggtaaggcttccagccaacagtaggctattactagttaaggttttggggagtcaaaaattaatatgtggttttttggttgcacagggggttggcaccccaatccctgcattgttcaaggatcaattgtatattattctctgtgcttcttggtgcgcaaacttaaatgagtagcttcagatgctcgctttgttaaggagtcttattccttagtctggcaagtgcttatttgagcttggaagcaagagagaactatgtcatctcttatgagagatgaagtttaatcgtttggaagaaagcgcttgatttgaacaggcactaattaatgtccagattttttttttgatttttcttttttctttttttttgagacagggtctcactctgtcacccaggctggagggcaatgagacgatcacgtctcactgcagccttgacttcccaggctcaggtgattctcccacctcagtctcctgagtagctgggactacaggtgcctgccaccacacctggccagttttttgtatgtttttgtcgagacagggttttgccatgttgtccaggctggtgtcaaactactgggctcaagcaatcttcctgcctcagactcccaaggtgttgggattacaggcgtgagccacagtccccggccaatggcctgattttcagaggatagtcaacatcatacactgatgggctcagaaggatcttggcaacaatgagctctgcatctagcaggtggccacacgggccttgctgactatatagtatggcatctctggctagtcgtcagatccttcacttgctagttgcaatgaacaatgctttcatctccttatgagtcagccgcataacttgggctgcagaaataattaatatcctactcacttagccgggcatgatggcatgcacctccagtctcagctatgcgagagggttgcttgagcccaggagtttcaatgagctatgattatgccgctgcaccccagcctgagtgacaaagtgagaacctgtctcttaaaaaaaaatcttactcacatttcttcattttattctgttactaaattgtgtacaaatatgccaagtgcatctttttttaaggaagaagactaagatggctaatcatgcacaatggctgtagatgcttggtactggttgtcgtgtgggaaagtgctgggaagatgggattataaagtgagggccctgtgaagaagtgaaaggcatggattagctggtgggagaacagggagacaagaaggctgtggatgaaccagagaaggctttgaagctccgtagtaggaaatctctgaggtgcctatggcatggaaggacccatgttgaacccagagtgcaggtgtggaggggggttgggggacccggaagagaggtggacagggtccacattgcctgttgcttaggttgacatagaaacaacaggtagtagagtgaagcgggaagggatgagaaaatgggctttgagcgtgttttaggaagggaggaacgttagaggaaaaataacagaagatcacagctttacaggtgccacctgagtttaatttacttggtcatgggccgagataagctgggttgggaccatgttgagaacacctgtggtgtgggtgctctaccctcacgcgagatccattccagcgatgcctgtgtctggtgatcgttgaactttagtgtctggtgatcgttgaactttagggcatggagaatggctattttggactacagagaatgggaggagattgaagaaatcaggtgtgtcgggctccccttggagccaggccatgggaaactttgtaaggacagaggccctggtgaactttggaaggattttgttttcttttaggcattcaggttttggggtctgagcagaattgctggagtgttacacgagaagtgtgctggcggtgggctacaccattccttcctccccagcactcagtcacttacctacgagaaaatgcacatttgcactggtgtgtgtccttgcaccctctttctgaaacccatttgcagaatccaggcctttaggaaacttttgctattgcagacttatttatatctgtaaattatttaatatttatatttgtaactgagaagttgatatcatggactcgtaatggattttggagtttaaatatgttaaaataggtaatttttacaggatgtgttcattcacgtgacaaatctgggtgacttctatgtgcccagcatgttgtaggtgtgggtggcttagcagcaaacaacacagaaaaaccccatccttgtggagcctagatgcctccaggggaaaacatgatttcaaaaaaagtgaaatataatagcccttctaatgttgacaggtgctgagtagaaaatttaagcttgggcaggggcagagggtgagccttatagggtcaatgtgactgtttctggatatactttgcatgttgaagtaataggacttggatggcttagatgtgtcctatcaaagagtgacaaagaagggatgggctgcagggtcacctgaaggttttcttttctttggaaaatctgggcaaggggaaagatgtgacggctgataactgagagggagaagcctgggaggagcaggatttttttgtgggatgaaaaggtgttctgtttggacattatttagtttgatatgcttatcagacacccaagaggaggaggtgttgaatcagcagttggttatgagtcaggggtattgtatgtgcccttaggcactagcaatgttttttgtgtttttttttaagcaaaattatgaccatcatttcagaaaactattttatatatataaagaggttgaaagcttattaagactagatttagaaaaaacatataatactctgagaaattctgtgtgtagtgtcaggtagaaagtaaagtgttaccagttctgtttataaaaccccctttaggccaggcgcagtggctcatgcctataatcccaacactttgggaggccaaggtggggggattacttgaggccaggagtttgagaccagcctgggcaatataatgagactctatctttacaaaaatatacttaaaaaaatagccgggcatggtagcacgtgccttgttatcccagctacttgggaggttgaggtgagaggaccgcttgggcctgggaggttgaggctgtagtgaggtatgattgcgccactgcactccagcctgggtaagagagtgagaccctgtctcaaaaaaaagagaaaaatccactttatacaaaaatttgcatgagagtattgcccacatttgaaggaacacttaaccttccatgtattatgtttatatggagacttgtctctgaagatggattttggagtttatattaaatttgtttttgtttctgtgttgttttttttttgatggggtctcgctctgtcgcccaggctggagtgcagtgtgcagtctcggctcactgcaacctctgcctcctgggtttaagcgattctcctacctcagcctcccgagtagctgggattacgggtgtcctccaccacgcccggctaatttttgtatttttagtagaggcggggtttcatcatgctggccaggctggtctcgaactcctgacctcaagtaatccacctgtctcggcctcccaaagtgctgggattacaggcatgagccatcatgccaggccaaatttggggatttttggaggatgtgctcattcatgtgacaaatctaggtgccttctatgtgcccagcatgttgttggcttagcagcaaacaacacagaaaaacccagatgctctggggggaaaacatgatttttaaaaaaagtgaaatgcaatagcctttcaaatggcgacagatgctacagagaaaatttaagcgtaggtaaaggcagagggtgagccccatgggagggtcagtgtgcaaaatggaaactcagcatcatttcttcaatggagctgttttggagaaagcccggggcagtcatggttggccgtgcactaacctttctatcgtggaggcgtggggaggggagaggcattctcaggtgttttccttagaaacacaggaaggtgaggaagaacagtggaaactgaatgaggaataaaaggcattcagatttaaagataccaagattagaagttcagagtctagggtggtcaccagacagcagatactgtttaaaataagtgttgaattcctggcaccagaattctagtcctttactattttgtggcttccaaatagagaaagttcatggaaggaaacataaaggtcatctagttaaagtcctgtgtatctatttcactctctttatagatgtacagtagtccccccagtccgaggaggcaggggaactaccctcattgaagaccctcacctcagtggctgcctaaagccgtggatagtgctgaaccctactgattttttttcctacttacacatatctttgttggtttgtttgttttgtttttgagacagtctcgctctgtcacctaggctggagtgcaaaggtgcgatctcagctcactgcaacttctgcctcccagtttcaagcaattctcctgcctcagcctcccaaatagctgggatcacaggtgcctgccaccacgcctgggtaatttttgtattttagtagagatgggttttcaccatgctggccagtctgattttgaactgctgacctcaggcaatccacctgcctcggcctcccaaagtgctaggattacaggtgtgagccaccacacctggccctacttacacatatctatggtaaagtttaatattataaattgagcacagtaagagattaacaatgataataaaatagaataattacaacaatatactcttcaccatttcgttgatagaaggttcactcttaaaccagatctcagcaacctcagcatacaatttttttttccttttcttattggcttgagaaccttaaccttttcacataaaggaaggcctttgcggcttctccttggcatatccaaatggctagcatccttgtacttgctctttgggggccattattaagtaaaataagggtgacttgaacaccagtattgtgatgccatgacaatagatctgagcgcccagggtggctactaaatgactaaaggtgggtgacgtctgcagcatggaaatgctggacagagggaggattcccatcctgggtgggtttgtgggagatttcatcatgctactcagaatagtatgcaatttaagccataggaattatttctggaatttcccatttaatcttttcagtcaactgtgggtaactcaacctgtggaaagcgaaactgtggatatggggggatgactgtatagcatcgagagacacaagtgaactccttcagtagcctgccacaggggatttcattcaacctgcccttagccttccttgttctctaaactctcagcttagctcacagctttgctgtctgcaggtctgagcacaaacctgccttctcgcttacctcctggatcccgtgattccaggcctaagttcaggaggtatacagcagagaggaccttccctccctagtctcttcttttagtattgtttatttctaataaagttgggggaaacttttcttctttgatagactataattttagggttatgcaaatgcataatccattgaaaaaggttttattaggcttggcttctgaagaatataaaatattgaacttgtccattaaagagagaacaatcttgattcaatgagtatcaagtaatgaaataattattttagttccatcatggccagttgttacaaaaaggtcaggaaagaggaggagaagagaaatagaaagggcctttaaggaggcagagagggctaaaagagagctgaaaggggacaaaaggagagagggaaagagaaagtgaggggatttaccaaagataagttagcttttatttcctcctttacttgtggctatggggaacatgaagctcatagaaactgaagactcaggtcagggtcacagagacagggagctgggacctgtgttttccctcttataccacattaagaaaccactattggccaagcttggtggctcatgcctgtaatcccagaattttgggaggccaaagtgggaggatcacttgagcccaggagttcgataccagcctgggcaacatagagagacctggtctctatcaaaaataaaaatattagccaggcacagtggcatgtgcctgtactcctagctacttgggaggtagaggtgggaggattgcttgaattcagaagtttgagactgctgagctctgatcggatctgagtgagctctgatcgctccactgtactccatccagcctgggcaacagagtgagactccatctcaaaaaaaaaaaaaaaaaaaagaaaccagtattcagaacttctcaaatccttgggggaaaaaacaacaaaaactaaatgccaccaccaccaacaataaataacaaaactctctactaacccttgtctaagactcctgcttgctggaaatgatgctgggggttgtgatcctggggtggagaatgtctctgtattgctgaagctgatggcttcctgtgttgggcattgagcacgactatgctatattgagtttgtattgaattttaccctagatcattgctcaaggtactctacccatctgtcttattcaataatacaatcattcattctttccataactgtttattgagtatctatcacataccaggcataatggggattccaaataatatggcagtagtcattgccctgaaagcattgtactcctagtaggacagttaggagggaagcgatgctgctgtactaagtattgtgggagataagggggagaagagactaagtctgaggagagaagggctactggggcagaactgggtggaggaatggctcatttggcagtggtctggaattgttgactagaccccctcagggacacattggtattaaggagccaactgacttagatttccatgtataaagtccttacatagatggtcaaagataatttagtctcttgtcaaagttgacttttgtcatcaggcaaaagcctttagctcttgctggtacccacatcttttcagcccagctttttgagatctgggcaatgagagagagtaggagggtccttgttaagtccttactgatttgtgtcatcctctaatagaagctttgggtctcttctgattgcagatactttaactcaacagtggcatccctccttgttaatatttctaaatgttatgcagttaactgttcagcctgtggaacagagttaccattctcactttccttaattttttaacttcctggagccagttttattccctgattaaaaaaacctctttagtccaaaaagacaccagtgaattttacttagaagtccttgctgaaatatactgtatgaggttctgctggaagggaggtctcgggcatgcagaggtcatctcaggcatgtctgggaaacccacctaagttgaagctggactggttaggttacagtcttctggacacattttggaggaggtgaggagaaagaggtgagttgatgagttcttcttgccattgggttaattagaattgctagtttggatcagcaggaggtttccggaatcctgaacataacttggatacccctgcagtgtgtgctccaatcttacggggcattgaaagcccaccatttcactgcaggcagaagccaccaggcagtgggttccccatgggaagggcttcctagattagacaatccccatgttaaaataaaacatgcctattaaaggtgacacatggccagataagacagccaagatgaaagaagtttgtgtaattgagtaattgcatctatcaaagttattagaggtttccttatagggcacaaatatgtttcttcttcttttttttttttttagacaaagccttgctgttctgctcaggctggtgtgcagtggcgatcacagctcactgcagccttgacctcctgagctcagtccatcctcccacctcagcctctggaatagctgggatcacaggcttacaccagtacatctggctaaattttaattattatttatattttttattgttttgagatagtctcactctgttgcccagactggagtgcagtggcatcgatctcagctcactgcaacctctgcctcccaggctcaagtgattcttgtgccgcagcttcccgagtagctgggattacaggcatgtgtcatcacacctcgctaatttttatattttcttactagagatggggttttgccgggctggtctcgagcttctggcctcaagtgatctgcctacctcagccacctaaagtgctggggttacaggcatgagccactgcccagcctttttctttataagtttttagtagaagtgggcatctcactatgttgtgtaggctggtctcaaactcctgggctcaagccattctccctcctcagcctcccaaagctctggagttacaggtgtgagccactatgcctggtgcatgttaattattatcatttaatgattaatgatgttaattattatcatttaatgattaataatgttaatatcatttaagtgattcctaatggatgaccattttgatttttctttttttttagtaaaaagaatctcaaaatatttgaataagttctttctgtcctctgcaagattactattttgtcctttcgtaactaataaataatttgtacctagataattttggattatgtaaatgtcccatcaaaccttcactgactggttttagctcccattgaaaatgttttctaacctcatcattctttatctgagagtttttccttcttaccccatttatgtctcagtaaggattcgtggattcttttgttattcagtgggttagaattcattgctgtcatgatttatttggatgcttccattatcacagacttgtctagtgggaccccgtcaagctgggtcctctgttctttgggcccatcctcttgattccttgaatgtttccttatcgtatggtatctcatgggccatctttttctgccccagcctttgaatcagctatttcttcaggaagctctggttccttttagataataatggttttggaaaccaagatctgggcaccagcatgctctcagctactggtgtgtcattgcttctggggcctgtctgtggatagagctagggactgtgtgtgtgtgtgtgtgtgtgtgtgtgtgtgcacatgttaacttttctctctctagctctatatattcatatctgtctgtctatatatagctgtatgtattttaaaggtaagtttaagcaaaacccatggaggtaggagtctacttaaacacggatgtgtaattctggatatatgtctcttttctcttgttaacaggtggctcaatcccttgtttaaaattggccataaacggagattagaggaagatgatatgtattcagtgctgccagaagaccgctcacagcaccttggagaggagttgcaagggtaagtcggaggcagtaaagtgggcattaaggaagcgtgggtgtctgtgtgtggggagtgggttttgccttcctgggtcctgtctggagcctccgtttacccttaaggtgaatatgtgtcaccttcctcaggctgcccctaggctcagcctaccatggtggcctgggggaaactcctgtttcctgtgcctccgtagaggtcaggggagccagcaccaaaggcccgagatgcctgaggtctgtccctctaggtggaagtgttgtggttggaggaggttgtctggcttatctgtgctactgatggggcttcaatccagtaaagcttggcagtaacttgtttccccagacttcccctcaaggcctgtttttctgatgctccagattctgtaccacacataaccttcaggagccctgggagcaattagtagcatttatgaaatcgtcacaaaatgccctgtcttaaatgcatacctgtcactctgccatctcccctgttttatattgtggcagggttcactcttatttacgaagctttttcctcattgtaggttctgggataaagaagttttaagagctgagaatgacgcacagaagccttctttaacaagagcaatcataaagtgttactggaaatcttatttagttttgggaatttttacgttaattgaggtaaaagcttttacataccatgaattgtttttcaggacacatagagtaaatgtgctcgccattgactggtgctgtaatggatgggggaacagaagggagaagtggccagatggggtttgaaggtattttaaggtctaaggattaaacatgtctaggaagtattaggtagttagttcagtgagcgtatttatccaggtgaatacttaagtgactgaagttcaaggtcattattgtttttcttgtaaccaattaaaatgcagtgtcatggaagaagagtattttattctatggtaggacaatgttggtgctcggtaaatgttttaaatgctaagagtcactcctggtcaaaagaggatcctacagccttgaggagtgcgtgccctgtggtttagaggaagtgattttggatcggagcccagaataatgtaagacattttacaggtgctcaacaaataattgttcaccaagccaaatctgataattgctcttctggagaggtattgtcacctctcccctctcggggaaacagagctgagggccttgcacctgggctggcggtggtgccccagaggctggagctggctgaagcacccaagagctaccccctcccagtgggcccaggtgctgggagccaaaatcccctctgggaagaaggtccgaggactgtgcacccaaggggattcatcacacccatccggtgtgtcttccttgttgtcggagtggattgctggttggaaggtagagtcttggtgcctggccctgcagagaatgtataaatggacattccatgaaaaatcaaagacagccagaagggcaataacctctgttaccccgaagggcctctcttgagatctgcagaaagacagtgttctgcctaggcacactgccaggtagcttgtccgttctggtctttggcctgctagaggagatgcagagggtcctgctgggtgacttgtgtcctctgtgctaccttagggatgtcagtggtccattaaagttagaggggtggatgttgctgttgttacaaaagggtggctttaaatgcaggatggggagttgtcacggtgcattttgttgggaatgaggtgggtggggggagggggttggtttgtatgtgggggggtttgctcctgttgaacatgctttttgttgtggagggcacggtgggcagtgggaggcaggtaggtgagctctgccctacaccagaggaatctgtcagacaacaggggactggacggtcctgggagatgaatggtctcattggtgacaaaggtgttttggccagggtgccagatggtgaatgccacctttgagagggtacccgccctgcctgcatgctactgtggctttgtggcagatggggtggacatgcagaataaccggtggaactgacttgagggtggaagagggctaggagcccctcaggttctcccagcccctcttcaacctgtgctggggtgtcccagcgatagtgtttccacatggccccgatcagtttcagttggaaagaaatagaatgacaagtcggtgtcaatgtggccagtgtgtgcaggatttcctggcccagtttggctgtgcaacctcagagaagttgtctggtagccatggagcctctgtaagtgtctaaggctcatgccaggtgtctggttaggtgtagtgggaatcaatggcctcacataggtttcgaggcatgcctccctcagctacttccatttctctagtttccctttgtcaccagctgcttatgaaattgaaaacaggatgatttagaaggaactgagcttgtcatgctcagggctgtccatgctgtcatgggctgccagccacttggggtggggtctctaacccacagatggtgactggactacagtgagatttgggtaagcttttgggagaagcaggcacagaagtagaggctgtagaagcgtgaatttctcctgagacttgaggacaggccccactctggtgcaaggagcatggtaatctttactgctggtgggcatgtgggaaggggcccggatcgaggggagctttaatatgggtacagttggtggagagctggtcttttagcggggtggttattgggcagtcatggcagaaaagtagggagtggaggacctggcaaatatgggggctcatgctcagtactgcttagcagcagcagtgctagtagaagcagcagcaggattagtagtggttggtactcagtagtagtagtagcagcagcagtgatagtagcaatagttgtaataatactgacagtgagtacttgaaaaatactatgtaccaggaactgctatgatttctttctttctttctttctttctttctttctttctttctttctttctttctttctttctttctttctttctttcatgttattttattttattttgttttttgagatagggtcttactctgttgccaggctggagtgcagtggtgctatcttggctcactgcagctttggcctactgggctcaagcagtcctcccaagtagctaggaccacaggtgcacgccaccatgcctggttaatttttgtatttttgtttcactatgttgcccaggttgatcttgaactcctgggctcaaatgatcctcccaccttggcctctcaaagtgctgggattataggcaggaatcaccatgctcagtcagaaggcattcttttaaccctacttttgggaagaggacactgggtgccatgtagttatataatgtgcccagggccacacaaagtgtaaatgacagagcccagattcagtctcaggagcgctgacttagggacctaaccatctccagactgtcgtaaaggtgtcttgagaactctgtcttcagagtatccagcacatgcttcttgaacttggcctagggataagtcagatgctaagagctccctggagcagtggggcatggctgtgggaaatcagattggggattataaattaccctaggttcctaggtgtcctggtgccggaaagtcaggtgacatgctagagagtggctggggtgctgggcaggtcagagcaccaaggtacattcaggttgaccacgaactctttttttttttttatgttttcgtctgaggtggggtctcactctgtcactcaggctggagtgcagtggtgtgatctcagctcactgcaacctccatctccctgggctcaagcaatcctcccacctcagcctcctgagtagctgtgactataggcatgcaccatgcctggcttattttttgtatttttagtagagatgaggttttaccatgttgtccgggccggtctagaactcctgagctcaagccatcggcccacctcgccctcccaaattaatgggattacaggtgtgagccactgtgcctggctgaccaagaaccctttagaaacctgtctcccactgagtaccatcctccacatgtgtgaggcgtgcagccctgctgacccaagttcatcaacatccacgctgttaagacaccattcccagttgtctcctcctcggatggacgagggggaagcttgtggtcttgcatggtcacgacattgactgatggtctgggcagatgtcaagttccctgtttttacttatcaaaggctctgggtttcttgcatagcaatgatatctctgcagtttcagaagcctttggcctgaatcgtgaagtgggtgtgcagtttgcttggcaaggatgaagaccccagatgagtcactagtatggggacagctcttctgtcctggtatctgaaccctcccactagcaaggtgggccccaggtattagggcggcaggctaaggtgttaagatggacccacacagtgctggcggcaggcacctctcatataaagtggagcctgggcttttcacaagagagcacttgttggtcctgtgtttacaccaatatcttggtggtttatggtataaaattagacagtagtcagttattctttagaggatcatggtgactagtggatgatgctcattttaaccttgtgtctttaacataataactggtagaacttttagttccgatgcagtgaagttcagggagctaaagctcttcccagttcaactcaaagtaatccttggatttttttttttcttttccttctagcagtgaaaacagcctgaattctagtataaatactattgttttcccagccttgcctattgacacttggctgttttggagaagttggagagaaataatttcttaagatgaaggtagtgagtgtaacatctcaaaagcatttcaggtgttgttttgggttttcaatcattaaagctatttattgaccaggcatggtggcttatgcctataatcccagcattttgggatgccaagggatgattatttgagcccaggagttcccagctttagtgagctatgattgcaccactgcactccagcatgggtgacagagcaagaccttgtctctaaaaaagaaaattaggccaggcgcagtggctcacgcctgtaatcccagcactttgggaggccaaggcgggcggatcacaaggtcaggagttcgagaccagcctgaccaacatggtgaaaccccatctctattaaaaatataaaaattagctgggcatggtggtgggcgcctgtaatcccagctactcaggaggctgaggcaggagaattgcttgaacctgggaggtggaggttgcagtgagctgagatcacgccactgcacttcagcctgggtgacagagcaagactctgtctcaaaaaaaaaaaattatggagttagaacaaatgttagtttcacagttgatttaatgaagatgcttttcattttttggtcttgtgtctgtgctgcttgtggatcttcgtattttggatagtggaagctctaaacttaacctagcatttagtaaaaagcttctgtgatgactttcaggccttttttaacccacttatgccggaggttgccaattttttttgtgtgtgaaagatcagaccttggcgatgaggttgaacagtagaatataaactcccacaagcttagtgttccaataatggaatgctaggcacagatgggttaattcctctggttacagaacaactgtgcagtggatccataactccctagccatatactcttaactaagctgaaggcaagcagggccttccctgggtactaatgatggcaccagcaggaagagagatggtgacaccagtttgcggggagtctttgaggttggaatttcaaagtaatgcaagtgagattaggaacgattgtcagagttgaggaatgattataatgcccagagaaacaagtactagtctaatggtgaacatggtgctcttccaggcaaatgctaattagaacagaacagcccgcgaatttccagcacatctgtcccctatgtgcacctccatggagactgtgatggggactggagactgagcaagtatccacccacttagagcctgcagcgggggcaggaagaaggaggagcttgggaatcctctgtgtgggccaaaccaggacacaggcagcttctccatttgtatctatgctgcttgttggtctttgtattttagatagttgaagattatctaaatgtttctttgagaaatgagatgtgtatttttttttttttttcctgagatggagtctcagtctgtcaccaggctggagtgcagtggcacgatctcggctcactgcaacctctgcctcccaggttcaagtgattctgctgcctctgcctcccgagtagctgggactacaggtgtgcgccaccacacccagctaatttttttgtatttttagtagagatggggtttcaccatgttggccaggatggtctcgatctcttgaccttgtgattcacccaccttggcctcccagagtgctgggattacaggcatgagccatcgtgcctggccaatgaggtggtttttaataacttcaattctacatttcttgttcagctgcctgacatgagggccaaggccaagcctcatgtggtattttctttctttggttgttttgttttttgagccagagtctcactctgtcacccaggttagagtgcagtggtgtgatcttggctcactgcaacctctgtctccttggttcaagccattcttctgcctcagcctcccgaatagctgggattgcaagcttataccaccacatgtagctaatttttgtatttttagtagagacagggttttaccatgttggccagcctggtctcgaactcctgacctcaagtgattcgtctgcctcggcctcccaaaatgctgggatctttcttaggtttttaaagatcatttcaaaaatataaaatataatagaatactaagcctctctctacccctaagccagcttcagtaactatcaactcatgaccactcttgatttttatgaagccctgctcactgccccctctgaagatgtgtgtgtgtgtgtgtgtgtgtgtgtgtgtgttttgagatggagttttgctcttgcccaggctggagtgcagtggcatgatcttggttcactgcaacctctgcctcctgggttcaagtgattctcctgcctcagcctcctgagtagctgggattataggcatctgccaccatgcccgggtaattttgtatttttagtagagatggggtttcaccatgttggccaggctggtctcgaactcctgacctcaagtggtccacctgcctcagcctctcaaagtgctgagattacatcgcgcccagccgcgtgtgtactttctaattgaagaaaccgtgttgtttgccctgcacggattcccagggtctagattgggctcattgcatatccctcctcccctcttgtgaccctctacatccttgcatgctgtatcatttaacatgtccatctggtaccagaagttagtagttagatctagaagcttgatgtgattcaggttttattttcccccctcctccctttggcaagagtactttgtaggtgagggtgtgtaccacctgccacttcgagatacctcgcttaggtctggttatgtgtgtgtggtatttggagccattcatgatcattgcttaagatgcattaatttgttaggagtttgcaaagtggtgatattccagttcctcatttattagctgaaatatttgcataaagagaaactttgccattatcaactctttgatactctgagttacagtacacctataggaaaggcaggagaaatgattaattttgttatttttttttaaaccgattttcaaaataatgagtgattctccagcattttcctgtggagttaatggattttttgttattgcttgttctgtatattttgatgagtatgattgtgagctcatggatttaaacagttctgatgtgctgttcattacagttatcatccctgtgccacgctttggctgtctttggctagtgggagtctatcgaagttgggccctgagtcttttgaatgtatactattagtctttgcaacttcctcattttctggtatgacagatgttttaggctccctgaacagtttttgccccagctgtggaatcaaccatttttcctagcagctttaactccttttatgtttatatttaaagataaacatatcatgaatttatgtgggtatttccaaatcagattcaggacaccagtgttttgacttaatctctttactcttacatctgtatctcttttctcccttcatctgttcttttttctccctagcctaatcccagctcttgatatcaacatacttattcatttattttatcttacagtatcaacactattacccataatatgatttctaaaaataatttaaattttttttttttgctgtttacattgtccttagggtagataataatgtgcagggactatcttttcaaactattttttttacagtcaaataaactagttaaactattttgtttaaagttaaaaaaacaaattatgattcatccttttgtttggtaggtacagtctttactgaacatttaattttccctgctgtgcagaatggaagatcttagtttcatcactgaaatctcagcatccttttttcctaagggattttcttggaagcctaacatttggcagcagttctgattaaaagccctttgtggtcttaaaagttcttcagggtcaggcacagtggctcacgcctgtaatcccagcactttgggaggccaaggcaggcagatcacgaggtcaggagttcgagaccagcctggacaatatggtgaaatcctgtctctactaaaaaaatacaaaaattagttggtcgtggtggcatgtgcctgtagtcccagctactcaggaggccaaggcaggagaattgcttgaatctgggaggtggaggttgcggtgagctgagattgcaccactgcactccagcctgcgcaacaagagtgaaactccatctcaaaaaagctcttcacagcgggtctccagcccctccagactcagacacagagagtgcaggagaggagaatagtgatgtgtacaggcattggtttctacactccagaatcttccggggatggggaactcaggccctaccctgatcaattggccctaaatgtgggggatgggtcctgagcatcagtgagcgtgtaagtctcctgggtgattctaacatgcagtcaggactgcactgattcagagaggacttcaggtatatctggagtcttaatggttattatttccccagattcaccttttttcttccttatctctggatctttctcaaccctagttttgtcccctgttcccccatttctttttttttttttttttttttctgagatggagtcttgtgctgttctccaggctggagtgcagtggcgcgatcttggctcactgcagccttacctcctgggttcaagggattcttgtgcctcagcctccccagtagctgggattacaggtgcgagccaccatacccagctaatttttgtgtttttagtagagatggggtttcaccatgttggccaggctggtcttgacctcctgacctcaagtgatctgcccacctcggcctcccaaagtgctgggattacaggtgggagccaccgcgcctggctgtatttccccatttctaaaacaaactgcttactcatttttccacagctcactcttttctgcttgtatttttcactcaaacatcttctttggtagcttgtttctatttcctgtgttttctttccttcccatgcaatctggtatggtgcagttgggcaaggaatatctgaagtgcgtgggggagcaggagcatggaggccgcgtgcccgctgggcctagacatgtaatgtgtcactccaagaaagcaagggatggggctcgaatgtcaggaggctgagtaccaaatactccattgagaagtatctgccttcaagtactctgggactccagtagaacctgaagtatggaacattcaagtatcctactggactctcaaaaacctccatggtttcacagtcgaggagaattcttgtgaaggagtaaggactattcttagcttgtttgtggaaagactcttcaccaggtcatagattggttggtctctaaggtggagaatttatgtgagttacttttgaccttggtactgatatttagaaagtttaaatttggttagttgtaattttgataatgagtattttcccagttgtttcgtttcttattagttgaaggttaagatggagaggtccgtggaaaagcatggaccaaaaaccagcattactcaccgatgagcccatttgcttgactggattattaaatgctgtctctcggcagggaaatctggacaattaggtagtcgtgacctacctgccttttgcattctctttcgctgggtttattgcatctgttatttcctctgggggtcatccctcttgccgtttgaatcatactcacctacggctgaaatggagaagcgtgtaacaggtaacagtgactcccagggactgtgagaagtttcaggaacatttagaaaggcaaagagcactgagcatctggctgatagcccaggtgtgtctgctgcggccctggttgcccttggcactcctgagccagggctgcccatgtgtacagtttggccgtcttgcttcttgatgtaaacgtccagattttcatctcagtaaactctaaacagtccgtgttatgacccattgtactgggggctcttccataaactcttagtgccttttgaatgattggccatgctggaaatgtaatggtgagcctctgcattcttgatatctgatcatcttattcataattcttcaactaaatggtattttctgatttctgtatcataggggaaaacttccatgacctcatggaaggcagtgcagttggtgaagtgtgtgagagagagtgtgtgtgtgtgtgtgcgcgcacgcgcgcgttcacatgccgagacaggcgtgttgggatttaatatcatgacccatctgagggatgggaatgtcttctgtaaatatcctgatcccgtgctagttgtttgggatgaaagtgtgtgttaattttgtttttgttttttactgattgttcttctctcacttcagatggacagaaaacagctatcaatggcaaacctgtcaggtgtttattatgtctttgttaagaaggagagattgcttaaaaggaaaagttgtttttcaaggttaaggtcttgaaagattttcaaacattttgcattttgtcttttgagaagtcaggaggaaatgatgtcgagggcctacatgtttacttttggtgacctggatttgcaatgagtgtttggttttctttgttgggggaaaagggtcccttacaacgggttcgagagggaggaagtaggttgccgggtgaagtgctcatttggcagggagggtaaaggaaagctcctttgcttacctcaaaccgtggctcaagctgcgttctgctgtttctttgcctttagtcttggaggttaaaattgcattccctacatcttgttcagaaggtaagcccgcatgcttcccagctcattggtgtgggattttaattttgccttggggaaaagatgattattaatattgcttcaaaaccaggaccttcaaaatatggctgataaagagagccactgatgacattccctttgagctcaatttctgctgtgtttaatttttgactccacactacctgagccaaagtggcagttcttctgggcacatccgggcttgtagggggcagaaacatactgaagcaatgtcctgtgggtccaagagcctggaatcctcccaagtctggttcttttccccactccaactgaagctggacttggtggtgttagatctaccgactcttggagtttggattgggaaaaattggagagtttgattttctgatctgggtttgtgccaatatctccattcacaaaggctcttaactgtgaagaaggtggcaagagtgctggcctcccatagacgagcctgtgggctgggatgtcaagggtacagaggaagtggggtgagagctggggtgtctgtttgtaagcaaattccttactcctcttgggccatttttttccttattcaccttaggccaagacttaatttggtagtttgccaagtgtgctttaaagccctgtttgtaatacagagcacccacagtgtaccaagcacaatgtactaaaactttattgactttgaaattagaattttgatttcaggttaaaactcctatcggcttgtcttaaagaagaaaacagttctgcttttcttttagatgagtgatgaatgttgcactttgaaaatataaaacttgtgttaagaaaaaacgagcctaggtgccgtggctcacatctgtaatcctagcactttgggaggctgaggtgggaggatcacttgaggctaggagttcgggaccagcctgggcaacatagtgagaccctgtcttgaccaaaaaaaaaaaatttagctctacatgatggtgtgcacttgtagtcccagctacttgggaggctgaggtgtgaggattgcttgagttagggagttcgaggctgctgtgagctgggattgtgccactatactccagcatgggtgacagagcaagcaatatctgaaaaaagagaaagtaaaaagaaaaaatggtgtggtctgtatgtctaattaaaggcttttctttttcttcttttaggaaagtgccaaagtaatccagcccatatttttgggaaaaattattaattattttgaaaattatgatcccatggattctgtggctttgaacacagcgtacgcctatgccacggtgctgactttttgcacgctcattttggctatactgcatcacttatatttttatcacgttcagtgtgctgggatgaggttacgagtagccatgtgccatatgatttatcggaaggtaagtgacattcagcattaaacatgtacctcacctgaagcatcagaagcattctgaggaagttttatgtaaattaaatactgcataaatagccactgcactccagcctgggtgacagagcaagaccctgtctctaaaaaaagaaaaacgaagaaaacttctgtaaatagaatcatttacaccttactagagaagcttgctatttgcatcaggccaatgttttttttctttatgcaaaattttccagtgtataatgaaagttttctactgctgtcagggcatggctgcctttgataacaggctgttgcagaatactaaatttataatgaaatctaattaaaaatatcaaattggttttcagtgtttctttgcctcaatctcatagttgtatttatggaaatttttgttgttgttcattaaaaccttcacttacatcacagttgtattcagaagtgaacttcagtgaaattggatctatgaaattaaatctaggagaaaagaatatatttgagaaagggaattcttatattttttaaatgaaccatttagtcatattccatataattttcttaactgaagaaaaatgtaaatggaatccacgtcggatacaggctttctttatattctaaatctagttgtggttgtttttaatggtatttaagaaaatagttggatgtttgggataacactttgaattgttgattgtttttcacaattttggagagaacttatagtgtttctattttatgttggttttcattcaaagtaagtttttacattaaacagttgtcccttggtattcgtgggggattggttacaggacctcttgaggatacaaaaaaattggaggatgcttaagtccttgatataaagtggcatagtatttgtatataacttattcacaccctcccatatatggcattttatttatttatttattttaaataatttcatcttttattttagattcaggggtagaggtgcaagttttttccatgggtgtattgtgtgatgctgaggtttgggttatggatgatcccatcccccaggccatgagtgtggtacctgataggtagtttttcagcccttgccgcattccctctctcccaactctagtagtcttcagtgtctttgttctcatctttatgtccatctgtacccaatgattacctcccacttataagtgagaacatctggtatttggttttctgttcctgcgttaattcgcttaggataatggtctccagctgcatccacgtggctgcaaaggacatgattttttttttttttttatgggtgcactcccatgtactttaaatcatcttggtttacttataatacctaatacaatgtaaatatacattatataatgtacaatatacaatgtacattgtgtacagttatataatgtacattgtaaagtgtacattatttaattgcacattgtaaattgtacattatataattgtacattgtataatgtaaatatacattgtattaggtactataaacaaataactgtttagggaatagtgacaagaaaaaaatctgtgtgtgttcagtacagacacaatcacctattttgtttcccccaaatattttcaaccccaggttggttgagtccagggatgccaaacccatgcacaggaaaggctgactgtattttctttcccattagggcagtaataatgataagacctgatttgatattttcttattttatttgtgcttttgtattgagatatgccataaataataccatagtttgctgtggtcttaactgttatagaaggagtgggatttctggttgctttgctgagaagttgccatagagatgctagtgtcaagagctaaagaacttgtcattaaatcagtcctggatatctctttgtcctgggccgtttttttaagccatttaaatttttttttttttttgagatgaagtcttgctctgtcgcccaggctggagtgtagtggtgcaacctctgctcactgcaacctccacctcccgggttcaagcgattcttctgcctcagcctgccgagtagctgggattatggacatgggccaccacacccagctaatttttgtatttttagtagagacgtggtgtcaccatgttggccaggctggtcttgaactcctgaccttgtgatctgcccgtctcggcctcccaaagtgctgggattacaggtgggagccaccgcacccagcccatttaaatttaaagtattcttctttgacctcgttgtcacttatccagagtgtccgtaaggtgtcctccccaagtcttcctttgacatgggggaatcaatcttataattctgtgaatcctggaggcctcgtgtcttagtgtctatggtacagtataacaggtatgcccggattcctcatgtgtgacatgaaaatgataacaagggcttgtacacannnnnnnnnnnnnnnnnnnnccaccaccatcaccatcatcatcagcagcagcatcatcatcatctgtgttattctcctgtactctcttctaccatttaggagaagaatactcaggtttttctataaactagctagatttttgtctttcaagatcatacttctaataaattcataaaaattttcactaacactccacttggcaaactttaaaaacaccctacatgaagtccggtttgaggtagtggttcagtaaaacacagctctttgtacaagtgagatactgttcacctgtttttcttcctcttttccactaacgctttggaaaatagcctttgggaaatctgatctaactcggcagacttgcttgcctgcatgtaaacatctcccaaaggtattaatttgtcagcttgattatcttagaagtattgtctctttatgaagtcaaaaattgcttgggttaaaccataagacttaacctgaaatcccagaaacgtgggaaagacgaatatcctcatgtcctgccttgtatgtggaaacatgcccaggtgaagaaataagacacttcctcctcacacgtgggctgcttccttggggcagaggctggctctgcagcaggactctgaaaggtccctctgcgacactggcagtttccactgaggcccccatatcctgattcccggtctggcagaaatcaggttggctgttgcaaatggaatgactgccgagcccgtcgtcgacatttggtattgaatgatcttgcaggatgtctgaaaatgactcgtcatttatttactttttcacagctttggtaaaattactttaggcttttcatcattaatttttcttcttattgtaataaaatatgcataacataaaatttaccattttaactctttttaagtgtacagtagtagttcgtttgcattaagtacattcacatcattgtgcctcccaaccccaccatccatcgacagaatttgttcatcttcccaggtggaaactctgtacccattaggcactggtgtccactctcccctctccacagttgtcagccttctgctttccagctctatgaatttgatgactctaggtatttcatagaagtagaatcatacagtatttgttattttctgtctggctcacttcatgtagcataaggtcttcagggattatctgtgttgtattgtatgccagattttaattcctttgaaagagtgaataatattccactatttggatatgcctcattttgtttatccattcatctgccaccggacatttgggttatttctgccttttagctattgtgaacaatgctgctatgaacacgaatgtacaattatctctttgagtccttgcatttagttttcatttatttttatttttgagatggagtcttgctctgtcacccagtcaggagtgcagtggcatgatctcagctcactacaacctctgcctcctgggttcaagtgattctcctgcctcagcctcctgagtagctgggactacaggcacctgccaccacgccaggctaatttttgtatttttaatagagacagggtttcaccatgttggccagactgatctcaaactactgacctcgcgatctgctcaccttggcctcccaaagtgctgggattacaggcgtgagccactgtacccggccgagtccttgcttttaatacttttgagtatatatttatttagagatggagttgctgggttatgtggtaattctgtttaattttttgaggaaccatcatactgtttttcacagtggccacaccattttacattcccacttattctttaataatttgtctgtttaacttgagaactaaatgagatgtttttatgaatcatgactagctttaatttggattgatggctccaagggtggtctgttgaaatggttcatggtggtttgttcaggttcctcggaactctgtgttatttcttacaacttttaccaaataaaaagactgtgcagcacaggctgtattttaagtgaggtcaacagattggcattaagaatatgggctcctcatggcaatagtgtgctgaacattgtacttgctcatgttagaatgtcgtcagtcacaagtcatattcccagcatgggttcgtataacctctgcagtggggacagtgccttatctcctgtttttactttttagctatctgggacacagaagcaggggatgtgtccatcttcaagtctcaaggggttacttctatagcttagagcacatgagttggggagttggctccatgttggaggaagagggtccctttagtcaaactgagcctggattaaggatagctgaagatcttcagccccagccaccagtgagactggatctcccatttgcccttgcctaccttgacttagggccaggatagatctgagcctgaatgctaaacatctgaatgctagacctacgatggaatggaggacagtttcattaatcaggatgggcttgtcatcccagcttttgtattatcaaatacattaggcatagagacttttccttaagatctgtggcctaattagctcaagatttcttgactttgtatctaatttgaagaaccgtggtggttcctgcagtgggttggcttctgagttgtggattttgatgttgggttggcttgtcctgaatgccaggtaaagctatagcagtacctgagcctgcttgctggtgctcctctctgctgtttgcagacttttttgcagaattgagaaagtttggggaaactttttattctggataaaactgctcgtcttcactttctttagagttactctgaaggatagtttgaggtaaagtatctgtctgtccttcatcttccaccttctaaggtgtgttgagtccctgcagactttctagttttcctttatcatttattacagatctgccctagaagaatatatggaatatatgtatgtagtgtatctcagaggggtgctctctatagatttctgtgttgagaaatatttgtagttaccctaagtgtattgtttaaccatttatgtgatactgtgtggttctctttttagaattctgtaacttggggggaaatgcatattccctgtatgcagggaatatggatactccaggaatacatgtatatattctcttggatgctccatccagagttcatattatcaggtactcttcatctttctgggggaagaattcctgtttcttttaatcttttcatttgagaaccctctcctcttgaccatttcctttttttttctttaaagagacagggtctccctatgttgcccaggctggtctcgaactcctgggctcaagggatcctcctgccttggcctcccaaagtaccaggattacaggtgtgagccaccactcctggcttttttttttttttcaagacagagtcttgctctgtcgcccaggctagagcacagtggcatgatcttagttcactgcaacctccgcctcccgggttcaagtgattcccatgcctcagcttcccaagtagctgggattacaggcatggtggtgcatttttgtatttttagtagagacggcatttcaccatgttggccaggctggtcgcgaactccaaacctcaggtaatgcgcctacattgacctctcaaagtgctgggattacaggtgtgagccactgcgcctggccttgatcttttccttctcttttcttggcattgctgcagggcaggtatatttttaggtccagtggtcagagcagcagacagcctcctctaccacagactgagtaggaagtggaaggtgccctcccataaagcacagagaggctgggcttgtgcacccttcccaagtcatgtctgccgccctatgcaataagtagaacctgaagtaaaaaaaataaatgcaccgtcatgcgctgatggtgagaagattgcagccacctgtagctctccggctggatcccagtcttcccaccccgtctccnnnnnnnnnnnnnnnnnnnnnnnnnnnnnnnnnnnnnnnnnnnnnnnnnnnnnnnnnnnnnnnnnnnnnnnnnnnnnnnnnnnnnnnnnnnnnnnnnnnnnaaattttgtcagcaactgagccatacagtgttgtggtcttagttttaaaacagaacttttgtttttatttaaagctatttttatttcactgtagactgtatattgctttatatttagactgaatagtatgaaattacagatattcagggccggggtgcagtggctcacacctgtaatcccaacactatgggaggccaaggtgggtggatcacttgaggccaggtagttcgagaccagcctgaccaacatggtgaaaccccatctctactaaaaatacaaaaattagcctggcatggtggtgcacgcctgtgatcccatctacttgggaggctgaggcacaagaattgcttgaacccaggaggtggaggttgcagtgagctgagatccgtgccaccgcactccagcgtgggtgacagaacaagactcttctttaaaaaaaagaaattacatatattcaactcctttgggcctttttacaaaactagcaatttcatatggctcaaactaatcttttgtctattagtctgtagatcggtttcctttctgaagattcgtagagagcctcttgacaatgttgtcaaagtgaaactgtgtggtgtgtgtggaagttatctccctggacacatgtgatactttggttggacttcctcttctaatgttattttctaagtttctgacaaaattagaatgacccagtagtgcttcttacattgtccataatacgttaaaatttttgtttcaaaaacttttctcccccacagtttttggttttacttctgatgtgaacttgaattgtacctgggcattttgtgagacattaatctcatcaagggacaatttgtcagtcttctagtttgctagggaatagcttaagaggagccaagttaactttccatagcttggagtttgagctaagaaagcaagttaaggagggaggacttgttttgtttggatttttccaagaggaaatttctgctgctggagatttaggagtgtcagatgcgtcccatcatctgataattgtatttgcttcactggggtgtgggtgcaaactggaagaaaatgctttagctcagtggttcctcaaactgctctctgttgtattcatgaggggaaatctttaaaataccactggtgtctggactcttcccctaaacattctgatttaattgctttagggaaattttaaaagctcttatgtgatactaataggcctcaaatatgtgttcagcttaattttatgctttataactaagaccttccagttcacagagatagcatatgggttgcgggtttaatccccctcattggtgaataactccttcggacttgtaggtataaacctcaagcatggtagctgttcatcagcccgagtgtcctaccatctggtctgggaatctcatatgcaggagagcccgggtgttgagtcaggtgtccaggcactttgtagaagactccatgaagtcctctagtggcagattggcaagggtagagattgagtgtggactctgagagcaatcatggactcagagcagtcagacctgagttcacatctcagtgctgtcattttctaagctgtaaaatcttaagagaagcacattcgcttcccagggccagtttcctgataacaacttgttgaagactactctttccccattgaattaagttggagaaaatgtagattagatggccatttatgtgtgaatctttttctggatcctctattctgttttgttgatctatattttctttgttttactttagtagtcagatggatagaatctattctttcttcatagcaaattatcttaattactatagctttataaatcaaatagtgaaagttacccaacctgtttttcttttatgattgttttgactattctaagtctcttgcattttcatattgactttagaatcagcttttcaagttttacaggaaactgttgggttatgcatcttgaattctaagacatggtcttagaattccagatgaagtaattccagatgaagtaattgccctgttggagaagtaattctccaacagggcaattctatccacctgactattaatgttaagagtgggcatcttaacattatttagatttccagtctaagaaaatagtgtatttacctattcctcagttatctacatctttataaatttctttttctttttttttttttttttaagtggagatggagtctcagtatgttgcccaggatgatcttcctgagctcaattgattctcctgtttcagcctgccaaagtgttgggattacaggcatgagccactcacgccaagcactagatctttaactctccttgtaattattaggatagaggtcttaaagatcatttgttatatttttatattttatatttttatatttttatatttgttagcatttaaaaaagaatgccataattcaaagtagcatttgtgctgttataaatggtattttatttatttattttatttattttttgagacagactctcgctctgttgcccaagctggagtgcaatggcacgatcttggctcactgcaacctccgcctcctgggctcaagcaattaccctgcctcagcctcctgagtagctgggattacagatgcatgccactgcacccgactaatttttgtatttttagtagagacgggattttaccatgttggccaggcaggtctcgaactcctgacctcaggtgatccacccaccttggcctcccaaagtgctgggattacaggagtgagccactgtgcccggccataaatcgtattttaaattttcacttaccgtttgttgttagtatatagaaatacaattgatttttgtatttttgctttgtttcctgaaaccttgctaaagtgcgttaagttgcagtaatttttggctgattccttaggatagctatttagataatcatgcctttggataaaaacaaatatactctgtgtgtgtgtgtgtgtgtgtgtgtgtgtgtgtgtgtgtgtgtgtgagagagagacagacagacagacagacagtgggggagagggagagaagaagggagagaagttaaaatctccggttatgagagttagtctctttttctccttagtcatgaactttttgcatcctgacttactggattcacttgtatttaaagtttcttactggattcatttgtgcttaaggtttatttgtatttaatatcccctcatcttcaccgccatacaatatttatgctttaattattcagttgtctttccacaatttaaaagaagaaaaaaatagtttttaaattacccactgaattactatttctggtgctcttcattccttccctttagctccaggtttccatttgatataattttttttcagcatgtaaaacatctattagcatttctttattttctttttttttttgagacagagtctcactctgtcacccagactggagtgcagtggcacaatctcggctcactgcaacctccgcctcccgggttcaagtgattctcctgtctcagcctcccgagtagctgggattataggcatgtgacaccacacctggctaaattttgtatttttggtagagatggggttttgctatgttacccaggctggtcttgaactcctgacctcaagtgatctgcctgccttggcctcccaaagtgctgggattacaggcgtgagccaccacgcctggccaacatttcttatagtagaagtctgctggccatgaattctctcattttgttctttaatctgaacaaatttttttttttcttttgaagcacatggttgctggatgttgaattctgggtgatagctggtggtgtctgcccctctcccttcaaaggtgttccattgtcaactggccttcattctttctaataagttgttagccatcatttgtatctttattaccttgtttgtaatgtttctctttttttttttttgggttgatttttttttctctttgatactgattttttagaggattgataatgatcctaggtataatttacttggtatttatacttctcggagtttgctgagcttcttggatctttgatttgattctttttattattgtaaagtttaggaaatatttaaccattatatcttaagttttttttgacttattctcacactcttgtttttcttggactcctattacatatatattaaactatttgagattgtcttataggacagtcagtctttttcacttttattcaatcttctctgttgcttttaaactgctgataagaccagccagtgatttttcttttctcctttatttctcatttcagtattgcagctctagagtgtttattgggctctttttaaaaatactttacactggccaggcacggtggcatgtaatcccaacactttgggaggccaaggcgggcagatcacatgaagtcaggagtttgagactagcctggccaacatggtgaaaccctatctctactaaaaatacaaaatttagctgggtgtggtggcggacgcctgtaatcccagttactcaggaggctgaggcaggagaatcgcttgaacccgggaggcagaggttgcagtgagctgagatcacaccactgtactccagcctgggtgagagtgagactctttctcaaaaaacaaacaaacaaacaaaaaactttacacttttttgctgaaaatctctatctctttactcatatttttcctcagtttctttgaacatactaacccattgagtacatttatacttgtttctgtaaatcttaaaatccaatgtgtgtgcctacttggatttgcttttattatttatatatttgaggggtttggtttttattatgaagactgctttctttattgccctgagttaaattttctttcttgcatgtctaagattttttattgtggacattttggatgatacattgtatgtctgacttctgataattctaaaaagtattgaattttactccaataccatattaactggctgaactcataggcctgttttttatgctttgttagggcagaactttggaaattttcaggtgttttccaagcttctctaacttgatgggactcaagattcaaaacatgtgtcatttgcaggccctgttaggtagtgcttgttttttcttgggcaagtttagagttaactcttttttagtgctcaacctgggtagcacttgacatttagggctaaataatttctttttggggatggagaggctgctccgtgcattgtaagatgttgaacagcatctgtggcctctgcccactagataccgaaagcgtccctctagttgtaacaaccagtagtgcctccagtcgttgccacatctctcctgggaggcaaaattgccctgtttgagaattatttctctggatagtgctcttgaattctaagacatgatctctctggtgtttcaaccgtatgccaggtgtgttaatgatatatgaatgaggtttccgcactctggtctggtgagaatttcagtacctcacctcagcttgaccttcagtatctctattcagctcactcctcctcagcaccagctctctgttaaggcttgggcggccttgacctgtgcccgcgcatcagccaaggacttgtagcacccccaccccacagccttctggggcccttcccttctgatacctgcttactgtccagggccatgcagatgccagtggctttaactaacccaagctctggcctccacccctttgctcagcagggctgctgtgatgtgtttggacttcagctcactgccacagtcggaaagtggtgtcctagctcagagccaaggcaatgcttggtgtctggagacatctgccttctagtgttgtacagttctgaggcagaggagtgggccgttatggtatgagccacttagccgtggccagagcccagtctctctgctagttgaatagcccagatgtttatgagctgtggagctgggagctccaagtgtacagtatagggtgtggttgtgtgagctgtaggacatgcctgtttaacttccttactgaatagatggagggtgagggcatatgcaagactgaggggctccagcatctgccatatgtcacctgtgtgcttaacaaaaaccccaatcctggggccatctcagacctgacctgctgtttcagaatttctagagaaagggcctggaaatctgtatatttaatttgtgcctcagggaagtttctgtactagaggatggcgaagggaacaacaggtgtggagagggaggctggacgtggcttccttgaaagggaaagggccgcatgaggctctgcattcctttccccaggacttatattgaaatcatggccaatgatttatttattttttaaaaatattaattcagtttttaaattttagttttttttctgttttttccttttttctatcttctaagacatcctgttatagcaaatttttacattttttcattgccctgccctgaaaatgtttttatttctcgttttttttttaacatatttctctaggtttagaatttgtattttgtgcttatttactgtcaggccttcaaacataattgatttgtttttaatctttttctactaaaaattaaaaaaaattgtggtaaaatatacataacggtcaggcatggtggcttacacctgtaatcccaatactttgggaggctcagatggctggatcgcttgagccttggagttcaagaccagcctgggcaacatagtgaaaccctgtttctacaaaaaatacaaaaatcagccaggcatgatggtgtgtaccagtagtctcagctacttgggaggctgaggtgggaggattacctgagctcaggaagttgaggcttcagtgagccatgattgtgccactgtacgccatcctgggcactggagtgagaccctgtctcaaaaaaatatctgtcacataaaatttgtaatttttgcaaggcatggtggctcttgcctgtcatcctctggtgtcctccattttactttctgtctgtaataatctgattactgaagggacctcatccaagtgggatcataccatatttatccttttgtgagtggcttatctcacttcgcatcatgtcctcaggtaaatttaattttggggtttatgtcatacattttctcagcatttagtgaaaaacttctgcctcaccctgatcctcaactgtggtgctgaacctttatttagctgtagtggaagaggaaagaatttctgagattctacccttttctggcttcttgctctgagcaactgcctgtgtcctgatgtgttttgaagtcctcatcttctcctttctactccctctgggacccattagctgaaggaacagggtcattttctcttttggatctctcctgggggtaatagctgtgggcacagggctgttatttgatatgcttatcatagagtcgagaaagtgggaaggaggtaccttggtaaagagtgtctgtccctcctctctctgtgcatttttctcctaattcctttatcctcatcagtgaaagagatgaaggcattactgcatttggtatgtttggttgtaaaaatgtatgttagtgaataagtcattagtaagacattttctgacatctgtcatttttttttcctgctgcacaaatctcttcattttcttaaagcttcaaagataatcttgaaatgggaatgaatgatggaatgaattttgcagtattacagtactgtgtactgttactttcggattactgaatatctggcctactcaaggtcaatactttgataaatacacaacattaggaaaaaaggaaaatcacgtatgtaaaatattttcattttgactgattcttagtaaaattttggtgagtctgtagagtgaagattgcttcctccaagtattcttagtctgaaagacggcacatgaaacatgtcatatttgagaagatacattataaacacatttcttatttgtttcttataatattcttttagaagcagaaagcaggctgggcacgttggttcacacctataatcccagtactttgcaaggccaaggcaggtggatcacttgaggtcaggatttcgagaccagcctgatcaacatggtgaaaccccgtctctactaaaactaaaaaaaaaaaaaaaaattagccaggcatgatggcgcatgcctgtaatcccagctacttgggaggctaaggtaggtgaatctcttgaatctgggaggtggaggttgcagtgagccaagatcatgccattgcactccagcctgggcaacaagagtgaaactgtctcggggggaaaaaaaaagcagaaagaagaaaaacatgataaaaaagatttttaaaaaatgatgatggatgccaaacacacctctaatcctagaactttgagaagccaaggcgggagcattgcttgagcctaggagttcaagaccagcttggacaacatagggagattctgtctctgccttggccctccctgttctaccctccaaaaaagccaagtgtggtggcacatgcctatagtctcttacttgggaggctgagacaggaggattgcttggaccccagaggtggaagctgcagtgagctgcgatcatgccacttaactccagcaaaaagagcaagaccctgtcacacacacacaacaaaaagatgacagaagtttggtttttttcttcctcttcaatgggggtatactgcatttatattctccttaagatgatcttctctgacctaaccctagaccatgtatttgtccccatgtatgtcctcactgtcccttctttacccactccctggcttgtcaccctctccatattttcctttttcttcctgttgccctgccagtatgtcttgctcatctctgttcccctctcagtcgataaaccagttcagttggggcttgtttttcaggcaaagaaactggtgatagcagggtctggggctgaggggtctttcagccatggtggggggatgtggcccccctttgaacagattactctcaaactgtgttacatgttctttccatgggtattggtagaattgactaattagattgtactaatttccttcaatgtatattgactgccccaccactcattgaaacgctaatggttttttttccctttcttttcttttccttccttcctttctttctcactctctctttttttctttctttctttctttctttctttctttctttctttctttctttctttctttctttctttctctttctttctctctctctctctttctctctctctcatctgtctgtctcttttcttttcttttctttttttttcttttctttcttggttttgctctgttgcccagactggattccagtgggatgattactgcttactgcagccttgagctcctgggctcaagcgatctttccacctcagcctcctgagtagctgggactacaggcatgtgccaccatgcctggttaatttttaaatttttttgtagacaggatctcactacgttgcccagtctagtcttgaactcctgggctcatgtgatcttgccgccttggtcttctaaagtgctgggattacaggcatgagccaccctacctggcctacggagaactttctgtataggttttcaggcttgtattccagccatgaaaaatcaggtgaaacacaaacaaaagcctcagaaggcagtgaaactgtcagattataaagaacatacaggttgttgattttggatggacattttcatctccttaaatttcatttcttttacagaattagagaaggaatgtgactttggtagtcacccatcatgtttacgaggaaggaggatattagccagtccttggatcatcccctcagaaacagagattattggttttagattgtgcagtcattaaagtagatatgttgttactaagcaactctggccaacagtattggaaaaatacaggcaattttctgcttcaagtgattaaacatactcatcctagttgcctgttgcagaaatacccagtttaattggaagtttcattacctcacaaactcaactctggggtagggtcatgaaccaggaagtaagcaaaacataaaataaataagatagataatacttactttatatgcttattcagaacgtttttactctgactttacttacagcactcaaaagccacatcctagtctaaaacactagtaggtaatggtgtgacattctgatgagaataaagagatacctgatagcctgacagccaggggcaagatggatcaggaagtacccgaatccgaaaagtgtggccatttggggactctgtgagaggagcatccctgtccaccccgggtcattgacactgggtaagagccatattgttgtgaggaatttgcatcgtgaaggtgatgaactgcggtttgcatcttttgttttatttatttatttttttaatttttgagaaggagtctcactgtcaccctggctggagtggcgcaatcttggctcactgcaacccctgcctctcgggttcaagcgattctcctgcctcagcctccccagtagctgggattgcaggggtgtgcgccaccatgcccagctaatttttgtatttttagtagagacggggtttcaccatgttggccaggctggtctcgaactcctgatctaaggtgatccgccctccctggcctcccaaagtgctaggattacaggcatgagccaccgtgcccagccgcatcttctgttttaaaaggactattagagaggggggaaagacatctgttaaaatgaagattggattaatgcatttaatccaaaaagggatattcatctcaccagtctggaaaactcagttccatgaaaaggtcattctctccttccacctccctttgatggtgatatttatgtggccacactgattaaaataatcaagaaagaagaaacagtttatatttttcaaatgaagctagatattacatgatttatttttaagaaattgaatacaattaatgttttgttctagatagtacagttttcttgtaatctcaaatgtatttccttgcctgccttcagtagtaagcagctatcaaatggtgccctgctctgatggtgtttacttccaccattcacagtattgttcttaatggcatgcggattctagagtaaccaataattagatactcagatgttttccagtttttagtaattagatagttagatgtcttctagtttttgtatattacaaatagcattttaatggacatgattaaagctaaacatttggacagatccttcatttcctagggcgtacaaatttcaaggcttttgctatgctagattgatttcctccccaagagttgttaattacttacattttccccggtgaaatgagagagctccctacaagtccagatttgatgttatattttaataatcactgtcaatctcaccaattttcataggtgaaaaataatgcattgttgttttaatttacatggctttgtgtaatagtggatttcagcatttgcatttccttggccatttgtgctgggttttttttttttttttttttttttgtgaatttcctgcacacattctttgctccttttaaaaaataattggtaggcatttataattcatatcgatatgtaggggccgttgatttattaaagatattttgggtctgggatgtgtactacaggttttgatttcagtttgttttagttgccttttatttgttctcatggtagaactattttgttttcacagggaaaacaaatttaatctaatggtgtccttttataacctgtcaggttaatgaagcatagaatcaaaatatttgcagaacgatgatacattaatttacagattttttctgtacattggatgtgaactcttttaaactataacatggacactttattggaaccaaactttagttttctacattaatgagaaacactggtaactttgcttcattgaaaaaataattgcttgttctctgtcagatgtaagtagtttgagtttatttttatcttctcatctacaaaataggaataattcttacttcatagttgttttcttgttcagttgtctggcttacagtaggtgcttactaaatggtagcttgatttatgatcataatgacataaatgaatatgacttggtctatatattctggtagctgctgagggtaacacagatatatgattacactaattgtacttctgaggatgtgagcagtgttttgttgttgttgtttgtttgtttctttggtgttgattttaggtagaactttgattatcaattttatgccttctttttaaatgcaaagtccttaaagccaaaagtttactctaagacttgctttagctataactcgcaaattattatcatttactttaaaatatttcagatttcccttatgatgtcatctttgacacatgcttatttagaaatattgttaatattcagatattttgagttgttagagatgtcttattgttgatctgtaatttaattctgctgtcaccagaatacattctgtgtaacatttttatgttcagatattgattgaaatttactgacggcccaacataaggactattttaccttaaaagttagaagtatgcaacagtaaaattctattaccttccccatcttgtgtgctattgtcgtatattttacttctgtctccaaaatgcaccattaccatttttgctctaagcagctagttgtttttcaaagtaatttgtcttctttttatttattttttatttttttttagacaaggcctcactttgtcaccccggctggagtggagtggtgtgatcttggctcactgcaacctccgcctcgtgggttcaagcgattctcccacgtcagcccccgagtagctgggtctacaagtgtgtggcaccatgcctggagaattgttatattttttgtggagcccaggctggtcgcgaactcctgagctcaagcaatttgactgcctcagcctcccaaaatgttgggataacaggcatgagctatcatgcccagcctgtccttatatttactcacattggtcattttggtttctctttattctttctgtagatctgagtttccatttgataccatctccttatagcttgaaaagtattctttacgctgttttttacagttcaggttcattgctgataaagtctctcagcctttttctgaaaatgtcctaatttcaccctcatattttaaaggacattttgtgttggtgatagaattcagagttgacaggtgtttttttttttttttttttgaattggagtctcacctatcacccaggctggagtggagtggcgcgatctcggctcactgcaacctctgcctcccaggttcaagtgattttcctgcctgagcctccggagtggctggaattacaggtgcccaccactgtgcccggctaatttttgtatttttagtagaggcggggtctcaccatgttggccaggctggtctcgaagtcctgggctcgagtgatctgcccgcctcaaccacccaaagtgctgggaatacaggcatgagccaccgcacctggccagttatttttgtctgtctttcagcactgtaaatattgttctgttgtcttcttgttttcattgtttctggtgtgtcagcttctgcttgtttttgttgtttctctgtgtttaatgtgtgtctaggtatagatctctttgtttttgtccttcattgaacttgctaagattcttcattatgtaaattaatatttgctaccaactttggtaaaattccagtcattatttgttcaaatattttttcttcccctatttcttcttcttttaggactccaattacatgaatattttattgcttaatattcttccataaggaccttcattcagtctttgttctttttcttaactctttttttctgtttgttcttcagatttcagttgtaaactatagaaggaagggttagcgactctgggaataaatcaatggaaagtatctgctattaatgatatctaatttatttttcatttcaggtattaccttttcagtttgagaagttctatttggttctttttgatattacctatctcgctcctaaactcacatctacttgttataaccatatttttctttaactccttgacatattataataggtgcttcatagttgttgtttactaattccaaaatctggatcatttcagggtctatttctgttgccatttccctcctttgattacaggtcacattttattgtttccttgtgtatctagtaattgttttactatgttgaacattatgatcgatatactatagggagtctggattaaagagcattgagttttgttcatgcaggtagttaaattcctggcagattggcccctttagcattgaatccttctgtctgtctgtcaatcagttaatcatagggcaggtagctccattctgaacttattccaagtgcacagctgttaatctagggtgagatctttattactaagacatagccttcctggtgtctcaggtgaatgcctgaggccccagtggagatttccttcctctcctcgggcggcatctcctactgcatgacctccagaatcttcggtcagcactcagccccatagctgctgctttcctaggcctcatggagtctggccctgcttatgaagccgttggcaaagtaccctgggtaaatccctactgaaacttctggggcaaaccctctgctactcaggctcacaaattccagatgcttctacaacttggaacaaccatctcttcctccaccgctcagtgaaactgttttgcttgggcagaaaatgtcctcaggcataaagccaggtcagtcccgggccaccacctacatttcccgtctcttgaggctcacagcctgtgttacctgtggtccagtgcctgaaaacagctgtgtcatatgttttgcccaacgttacagttttccaggggagggcaagtcctctctcatggttggaagcagaagcctggtagtttgcttgtcagctgtgtcttcctctttttttttttttaagatggaatcttgctcagtcgccgaagctggagtgtaatggcacgatcttggctcactgcagcctctgcctcctgggttcaagtgattctcctgcctcagcctcctgagtagctgggattacaggcacctgccatcatgcctggctaatttttgtatttttgtagagacagggattcaccatgttgaccaggctggtctcgaactcccgacctcaggtgatctgcctgcctcagcctcccaaagtgctgggattacaggtgtgagccaccgcacctggcatgtcttcctcattaataatattcatggcccttcatgattttttttatcctatctggagtatgactgatttaatttcagcaggcccttaatttctgtgttgactgtagagttatcgttcacttgggttaacttctattacaacccgagtatctgcccagccttttattccacctctacacctggtcacagtaatacacgacttacaagtagccctcctggtgcacccagaagaactttgtctttttcacaaattggcatctgtgctgtcttacctaaatcctcattgttggcctcagacacaatctgtggatgatagttcaagttgggcacaattgacttcagatttcttgaaaagggtcagcttaggcttagagtttggtgttgacattttgcttttatttttttaaaattaggtatcaaatttacatgctttaaaaatgtggtattttctgcatgtgggattaacattttgtatgtaagactggctttataaatatttacagatagtttgtagtcaataaggcacattacgttctgtttctttcctacaggggcgggctggtctctctccttccctttcttctccctcactcctacattttcttctttctttgtattttacgattgattcacttatatttgcataatagcattttttaatttttttttttttgagacagtctcactctgtcacccagactggagtacagtggtgcaatcttggctgattgcaacccctgcctcccggttcaagtgattttctgcctcagcctcccgagtagctgggattacaggtgcacaccaccacaccaagctaatttttgtatttttagtagagacagggtttcaccatgttggccaggctgatctcgaactcctgacctcaagtgatctgccttcagccccactaagtgctgggattacaggtgtgagccaccgcgcccggccattttttaacttttcaaaatgttttcacttctatctggccctttttttcccattcacatagccctcgttgacagtcttgttgccttttgcctggactgttattccagcggcaactcattctcctccttccagtagtctcctggccaattgcttctactgtttaaccttccttaagttgagtttctccctctaacttgaaaaaccacacgtactgttccatattgccttccataagcttcacctgcttcagccctgcttccatgagcttcacctgcttcagccccatttccataagcttcacctgtttcagccccgcttccatgagcttcacctgcttcagccaggtttggggtgttctttattcagcagcccccacatcctccttctccgtacttctgtcctagctaggcctcccctgcagtgcccttcccttccctccataaagtccctccttcatcgtccagggtctctcccacccagtgtccctcagttcgaactgtccccagttctctgtgcaggtcacagttgaatcacaggtgtctggacatacctagccctgtctcccaaggcaggaaaacatgactgtgtcactgtatctgctggggctcctggtgtcctccagatagttgatactccatatttgtcatttcccattgaacacattgaaaccctgtgatccaggcagggtgaagagactaaggccccatgtgtttaataatgttgcacagagaattagtgattggtacggatttatagtccacgtcctctcattttgttcctctgacagcctctctgttcttccctaatttggctcaaaattactttggttggctcttaagtagaaacttatgtccttttgtacttgggggcgtgtccaaattcattaaatgaggtgggagatttttcttcttcctacctctcgctttgctgtcctgacacagctgccaccactaaaggtgctggtggggcagagagagggggcagtgggggggtggggatgcttgtgcttagatctggtcttgacatcacacgagacttcctcaggtctgctgtgtcctaagcctgacttagtatcactgcatgaatacaattctctacttacctcttttatttcaggcacttcgtcttagtaacatggccatggggaagacaaccacaggccagatagtcaatctgctgtccaatgatgtgaacaagtttgatcaggtaagctgcagctcagggatcctttttcattgcattaaacacccctctttccccttttattctttctggaggcaggggctcactctgttcacactggattgcagtggcaggatcatagctcgctgaaggcttgaactcctgggctcaagtgatgtgcgatcctcctgtctcagcctcctgattagctgtgactacaggtgtgcatcaccgtgaacagctaatttctttttttttgaattttcatgtcagatgggctattgtggaaacatcataacaaaattcaagggtggcacatctcacacaagtgcgtgaacacccgattatcatgctcatgaactacaaaaggattgctggctaatttctttttttattatttgtagagaagggatcacgccttgttgcgcaggctggtctcaagattctggcctcaagcgattctcgctaccttggcctcccaaagtgctgggattacaggtgtgaacaccatacccgcccagtatccattgtttaatacttaccttgtagcggtatcatttatccagggcattctagctgctggccatattcattttgcactaggaccacttcttttttccaattattcattcatcagaatgaactaaagcctccgctcagtgtcagggacaatgaataagacttggtttctgttctgaagaagctcactgcctgtctgggagacaaacacacaagtaaattactggagtatgtggtgggcactgtagtacaggttttcttggggtactggggagccccagggcatatgggagctgaattctgtggcagagagttctggaaaatgctcagctcatcagtgaagatagtcacgatcaagacattcttctaatgccgctggtcggattctcttgcgagtctcccagacccactctttgtttccccagaatggcttcacctgtggtgggtgcttggctttctgctttagcaggtgtaaacccactgtggccatttctgtttaggatcttgcctgttcttttccagtggatcgtttctgtactgtgttcttactggttttgcttttctggagtcctaagaacgctctgtctttttctttaaaggtgacagtgttcttacacttcctgtgggcaggaccactgcaggcgattgcagtgactgccctactctggatggagataggaatatcgtgccttgctgggatggcagttctaatcattctcctgcccttgcaaagctgttttgggaagttgttctcatcactgaggtaagagaaatactgctgtgaaaaatgtcatatgtatttggtaacatccacagtcttcccaatgcttttgttcagaaacaaactaaatgccttttattatctcttccttgcatatgttgcagctcttcaggctcagccaagggggcctctgtccttatgctgaaggcaaatcttcaagggagaaaggtgaaggcattcactggctcctcccagccagcttttcaggcgctgtggcctcaataagtagagtgtccttaagcagaaatcacatatgtagaagttagttaaacatataatgaataatgataaattgaaatgtttcataggctccattctagctgcatacatctttaccgtgcttgtgttagagctgttttcacgtgtatatatgtgtgttatttttaattcagtatttccattaaattgtaagctccccaaaggcaaggtgaattttaatgatgtagttataaaatcacacagtcctagtagcatatgtgttaggaatatggttgttagctggtcgtggtggctgaagcctgtaatcccaacactttgggaggccaaggcaggtggatcacttgaggccaggagtttgagacctgcctggccaacatgacaaaactccgtctctactaaatttaaaaaattagctgggcatggtggtacacgcctgtaatcccagctacttgggaggctcaggcacgagaatcacttgaatccaggaggcagaggttgcagtgagccgatattatgccactgcactccagcctgggtgacagagtgagactctgtctcaaaaaaaaaaaaaaaaaaaaaaaaaaaaagaaatacagcttttgatcaagagattaatgatgataaaataaattagacttgaagcaggttccaacgaattggaaatggttcattgtcaaggttgtcagctggatcgagatgagccactgttggaagtgcattgagttctttgttttatgcttttgcttatggtgtattttctacttggaccttcccctctttgccatctggagaaatagtccttgtcctttgaggccccgttcaaatgctcctggtcctctgaagcttttttttttttttttgctctcctctttcccggtggagttaacaaacagccctttcttttctgctccccagcacttcattcccattttagcactctctgaccactgtgttatcgtcaggctcgggtgcctttctgcctttcctgcccacctgtgagctcctcgaggggacagatgacatctgactcattttcatgtcttcctcagcagatattacaaattctccaaaatacttgttgagttggtatagattgttgacttcctaatcgaagtctttttctatttgtattttgagtaggacctgtctgtgttgtcggaagcaaaagcgctgtagggaaccatgtgatgcaggtccctgcctgtgcctgccgctgataagggcaggctgtgatcgctcaggctcatctcccgtgtctggttccccttaggagtaaaactgcaactttcacggatgccaggatcaggaccatgaatgaagttataactggtataaggataataaaaatgtacgcctgggaaaagtcattttcaaatcttattaccaatttgagaaagtaagtttttgtatacattgtaccatatttttgtatttttctatttgctattcttgttgatggttttagaagttttactatgttttcacattatgggaagttcagtacaatccatcccagtccccacgcttggcagttgggttaagtagaatggtagagaacgttattttcacttggtcttccatttaccatgttcttaaacagaaagcatgtatgcttcttactaatacaaaagtgaaattccaaatgtttctgaatatcccaaatcccaacaatgagtctaagatgttagtatttgagaataatggtgtttaaaataaaactataatttatattaatgtagccaaatggacaagttatagagactgggcatatctatattggaccaaactatatgaatcagtatttttcattccaaacaggcatggaaatactgttagttgtgctttgttttattagaaattttggagggggctgggcgcagtggctcatgcctgtaatccaagaactttgggaggctgaggcgggtggatcacctgaggtcaggagtttgagaccagcctggccaacatggtgaaaccctgtctctactaaaaatacaaacatttgctgggcgtggtggcacatgcctgtaatcctagctacttgagaggctgaggcaggagaatcgcttgaaccaggaggcggaggttgcagtgagctgagatcgcaccattgcctgggcgacaagagtgaaactctgtctcaaaaaacaaaatatgtattttttttttggcttttggattaaatatttgattagttgttgcattccagcacatgatacttcttatgatttcttgggtagttcctggccacctctcacctttgcacttttttgttgttgttgcccaggatggtctcaaactcctgggttcaaacaattcatccacctcagctcccaaagtgctgagattgcaggcgtgagccactttatctggttgacatcactgcttttttaaaaacctgtactctctttcaggaaggagatttccaagattctgagaagttcctgcctcagagggatgaatttggcttcatttttcagtgcaagcaaaatcatcgtgtttgtgaccttcaccacctacgtgctcctcggcagtgtgatcacagccagccgcgtgttcgtggcagtgacgctgtatggggctgtgcggctgacggttaccctcttcttcccctcagccattgagagggtgtcagaggcaatcgtcagcatccgaagaatccaggttggtgtcagatgccattttaaagttgtaggtgcatttgaagtagaatgatgtctccttttatttagcatcactatgttccagtgtaatgacatttaactctctcataaccaaaacgtgccgccattccagaatgttgtgtgtacttccctatcttagatagagcgcggtaaagacaatgcaagcattgtgattcatttgttggcagcaacataaacagcagtggcacagggcttttgatgtacaggtggtaactgcaggggtgattaaaatgtctaagctgtctaaaagcaggaaaagcaaatagatttcatctcttatgttaacaccaatgagaaagtagtgagtatgagttgagtatgattcttctgtgggctggaaggaaagagcttgctgggggtctctgcttcttggtcaggaagaatggcctcaacttcacttagctatccctgtttgaaaataagttctttcctctgtagatgttttccttgttaatttctgtgcatgcctttaggacctctgccatttctttcctgtccgcttttcacttttttcttactgttgatgaacctatctctgccagacttctttatttccaattggttgatttctactgccttgctccatttgtacgactgtaacaaggaccattctctgcttcccagatggacctctgtgtcctcccatcgtggaggaaacagaaggacaaaatgggcctggttagttccctccagccttctgtaaggacactaatccccttcaggagggctctgccgtagcgacctgatcacctcttagaggccccacctcttaacactgatgctggggtgaacttccaacctgtgaatttagaacaggcatgcccattcaaaccatagcatccactttacacaccatcaccttttcctaagtcgctgtcactcaattgccaggggcaaataatttatatcaccaaggtaaggtcctggcacataatgtatgctcaagtatttgtgtgtttatgaataagttgaaaattaaaataaattggctttgtgagagggcttggcaagaacttgactgtctaagcttttcaaaaatctgctttgttttattcctggttcttaatagagatggatgcccaaggacagactcgagtgaacttagctgacactggctgtgattatttttttatttttatttttttggtaggggagagaatggggtgggtgttgtcataaaagctaagattcttttttatgatgaagtttgttttttaaagatgagatcttgctgtgttacccaggctggagcatagtggctattcataggcagactcccactactgattagcaagtttgtatttcataaaaaatattacctataaaacagaccatacagggtcatttcttatccccattctttctgacaacagcttcaggtaacactgtgaagggatggtccatgcaggtcagtaacacttttttcatgtagcttttgcatcttgaaagaaagaacttaggagtatactttgaccagagtatctttctgagtgtgcaggacacctttttcagacggaagggccacatgtgtattgtgctgctgtaattctctgactgctgttgctgcccctcaccgtgattgcaggtgttggtgtgtgtaccgtggaccagggctcttggaagcctgtacatgttatttcatgttatcctcacaattgaaggagataagcattagtgtccccactttacagagaatgaaactggctcctgtaataggttaaggagtttgcctatcttagaactaggaatctgttcagaaccatgatttcttaaccatggtatgttgcctgttgtattaatctgtttttatattgctataaagaacttcctgagactgggcaatttatattggaaagaggtttaattgactcacagttcagcatagttggggagacctcaggaaactcacagtcatggcggaaggggaagcaggcactttcttcacagggtggcaggaaggagaagtgcaagcagggaaaatgccagacgcgtataaaaccatcagatctcatgagaactcactatcactagaacagcacaggggaaactgcccccatgatccgattacctccacctggtcccacccttgacacgtgaggattatggcgattacagttcaagctgagattcgggtggggacacagagccaaactgtatcacctatgttgctgccttagtatcctctggtgtgggatatttccttcagtattcttttactcatctagttgtattccaaaaaccttgaaaggttctctgtttcttgtggagtcctatttttgaaccctaggtgtagggcttacctgtgtgtgtttcccagcacatgactcgtctctgttcccactttggggtcttttgctctgtgtggctggggtgtcctcccttctgtccttgatttaagcaaatgctactaagccctccggccaggtctcaggagcctggtggtacttttgttcctgccgagcaaggccagtacggtgcagctcagcattgatggacacataatgggcaccaaatgctggatggacagaagcagcaaccttagcaaaagtctggggcccaatacagacccaaggtggcccagcctgcactagaagctagaggaaggccgagcgaggaagcagactcgagttgaatattcccagaacaccaggccttgttcaaggggggtgtgagggtccttaactctggggagctggatttttttcagagtggactggatcggagtctctgcctcgttatgtgtgtccctctgtgcatctcaaaccctcttggacttggtggacctgctcttgtaagagaggggccatgtctgacattaaatatagaccctcctggccaggcgcggtggcttacagctataatcgcagcactttgggaggccgaggtgagcggatcacttgaggtcaggagttagagaccagcttggccaacatggtgaaatcccgtctctactaaaaatataaaaattagtcaggcatggtggtacatgcctgtaatcccagctcctgagctacacgcctgtaatcccagctcctcaggaggctcaggcttgcttgaacccaaaaagtggaggttgcagtgagccgagattacgccactgcactgtagtctgggtgacagagtgaggctctgtctccaaaaaaaaaaaaaaaaagagcctcctgactggcttccaggctgtgaaacaaatggactttccttgggccatgtggagaaatagaaacagtcttacttggttaataaaattagtctgtcttcctggccattatgagataaatgaagattaagatcaagaccatggggctttatatgaacaggtaatagctggtgagtacccactaggtaacaaggaggggcccaagtgccttatgaatactcactccttttacttgtgtaactcccctatcattcccacattacagataaagaaactgaagcctgaggagggtgaatagcacctccacgttttaacagttaataaaaggctgatccggggctttagcccaggccgtcaatctgtctcagaagtgcggccaggcgcgatggctcacgtctgtaatcccagcacttttggaggcctaggtggacggatcacttgaggtcaggagttctagaccagcctggccagcatggtgaaaccccgcctctgcaaaaaataaaacaacaacaacaaaatcagctgggcatggtggcacgcacctgtaatcccagctactctggaggccaaggcacgagaattgcttgaacccgggaggtggaggttgcagtgagctgagattgcaccactgcactccagcctgggtgacagaggagactccatctcaaaaaaaaaaaaaaaaaaaaaaagtgcacattcttatccccacatgcacagcataacctgaatgcagatctcacttccatgcggcagccataaaaaataattgggcaaagagcagccccaacaggtggtatggcggggtgggacgcagaccttgggttctcaccaactctctgggccttggttttattgtctttaaataaggggattggacttagtgtctggaggtcatttcctattttgtctcacttatttagaaaaccgtctgtattagtcagagttctccagagaagcagaactgatagggcccacgtgtatgtacatgcagagagagattggtagattgattgataaaattgtctcacgcaacttggaggtgacgtaagtctgcaatctgcagggcagctggcaggccagagaccctgggaagagctgatgatgcagcttgagtctgaggaggacagtcttgaggcagaattcccttttctttgtaggtcttttttctcttaaatgccttcaactgattggatgagccccgctgacattatgtaggattttaaagtctacagatttaaatgctaatctcaactgaaaaacactttcccattgatacccagacatgtttgaccacatatctggggactgtggcctagccaagctgacacataaaattcaccatcacagtcttttttttcttttgagatgagtctcactctgtcggctaggctggagtgcagtggcacgatctcagctcactgcaacctctacttcccgggttcaagcaattctcctgcctcagcctcctgagtagttgggattacaggcgtgagccaccatgtccagctaatttttgtatttttagtagaggcaaggtttcaccacgttggccaggcaggtctcgaattcctgacctcaagtgatccacccgccttggcatcccaaagtgctgggattacaggtataagccaccgcacccggcccatcacacactctttaatcctcatctcttcttttgggctctccatacgtgactttgtcctcattttccccttattattgaagccatttgtttatagatttctttcccttcctaaactctaaacttacaaaaggcagacacagtgcctcattcatctttatattacgtatagattgcaggtgctcagaagatgtgtaagtgaagtcaacctccagcttcattacatctatgagatttggaaaatgcctaacaactgagcattattttagtgggaagtgatgactgtcgttctctgctgaattatgtcacacatcagagagtgtggcatgaaagggatcctgcagacgattttcagggaattgtggtccaatatgcagctagggaagaaatccttaggattttttatttttttcccaccaaaatgcaactcacctgtgtctaaggcttgaaattcctgttcctgtagatagatgtatgcatgtagtaaaataaaatgaccggctgggaattttacattttccagtggctaactttggcaaggtgctctgtgtccagataaaggatgcatctttgacttgggcaggaaaccttaatttcccctcatgtacatagtttctggtgggagggtgggcctagagttcagcagtagtgattttcagtaaaggagaaacaaatggccaggcatgactggtaagaaagcgttggcgctcgtatggtaaactccttcatggtggtgttgaagtcattgttggaggttttgttttgttttgtttatttgtttgttttttcttcctttagaactttgtgttttttcaacctggatggttcctgtaacccatttaaaattttgtccccaagttcatcagaattacctgatgcactgattaaaactaaattattacaccttggagattctgcttcatcaggcattggctgggtcccaatatcttttgttttgttttgttttgttttgagacggcgtctcgctctgtcaccaagctggagtgcagtggcgtgatctcagctcactgcaacctctgcctcccaggttcaagtgattctcctgcctcagcctttggagtagctgggactacaggcatgcaccaccacacccggctaacttttgtatttttagtagagactgggtttcaccacgttggccaggatagtctcagtctcttgacctcgtgatccacccgcgtcggcctcccaaagtgttgggattacagcgtgagccattgcgctcagcccaatcaatatctttagaaagtgtcctcgtgtccctgaaaatatgctgtctttgggaaaccttgccctagttgtgtgataaaaaaacgcatgaggtcaaaatatgtgtagcaaatagaaacgacgtcaggataacttaagactaaaatcatttgagaggaagcacgcagacacctgttttggcctatgctaggctttcgggggttaagcttggaatttattcattcacttagtcattgactctaccatgtaattgagcacctagcttaagctggcactgtgataaatgcttagatacaatggtaagccaatgcacagaagtccttcctgctgggaacttcctcctgggaatcatcaagtgggggttaataaataaccacgtaattaaaatcagtgctcatgtgtcattgtctttggaaggcaatatctgagatgccatgaggtgctttggtagagatgcccatgccattgtggaggtgtagtgcttcctgcgaaggctcaagaaatagcctgcagcattgtgtgcgtggtagtggagagagatggggaagggtttgggaagggaggtggcttggggcagccaggaggctgatgccctgcatttccctgggggtaattatgtgagaaagctcttaatgttcaagaaaatccacatattttcaattcaccctggctgcagcctggggaatgcattgggggcccagagtagaggcagggagatacgtcaggaggctgatgcagcaagcagtcccggaagatgatgatgggatttggactcagaccaagtagacagccttggatagatttgaaagccattgagagcatgtcctgatttgggtgtggggcaagaggagggattagtcagaaggagggatcagggctactttcgtccttatggctgcaaaatcacctgggttcactgaaatatggaatactagaagaccagatttggggatgaatttggctttgaagactgggatgctttagaactgtgcagatgtttgctacaacacccactgatggggtctgcctggttccgcctcctttcctatttctctaaaaatggaggttgtaaatgatgagtgtaatgaattgatccaatgttcactttcttccttgcctctcgtggatgtgttaatgaacaatgagaaggtgaaaaatggcatcaggagaggaggaatagttctgcccaatatactgatcggaactaagtgagtcttgaccatagatagaccagagcttggcagacacatagagtttagaaaacattgtgttgttaaatttttaaaaaatatttttatatttctattttaatttttttattatactttttctgggacacatgtgcagaacatgaaggtttgttacataggtatacatgtgccatggtggtttgctgcacccatcaacccatcatctaggttttaagccccacatgcattcagtatttgtcctaatgctctccttccccttgcccctcaccctctgacaggccctggtgtgtgatgttccccttcctgtgtccatgtgttctcattgttcaactctcacttatgagtgagaacatgcagggtttggttttctgttcctgtgttagtttgctgagaatgatggtttccagcttcatccatgtccctgtaaaggacatgaactcatccttttttatggctgcatagtattccacagtgtatatatgacacattttctttatccagtctgtcattgatgggcatttgggttggttccaagtctttgctgttgtaaatagtgctgcagtaaacatacgtgtgcatgtgtctttatagtcgaatgatttataatcctttgggtatatacccagtaatgggattgctgggtccaatggtatttctggttctagttccttgaggaattgccacgttgtctttcacagtggttgaactaatttacactcccaccaacaatgtaaaagtgttcctatttctccacatcctctccagcatctgttgtttcctgactttttaatgatcaccattctaactggtgtgagatggtatctcattgtggttttgatttgcatttctttaatgaccagtgataatgagctttttttcatatgtttgttggctgcatacatgtcttcttttgagaagtgtctgttcatatccttcgctcactttttgatggggttgttttttttcttgtaaatttgtttaagttccttgtagattctggatgttagccctctgtcacatggatagattgcaaaaattttcttccattctgtaggttgcctgttcactctgatgagagtttcttttgctgtggagaagctctttagtttaattagatcccatttgtcaattttggcttttgttgccattgtttttggtgttttagtcgtgaagtctttgccatgcctatgtcctgaatggtattacctaggctttcttctagggtttttatggtttgaggttttatatttaagtctttaatctattgtctttcttactcatacttttcaatttccttttttccatgtacagaaaatgaaggttttattgcgaagtttttaggtctaagaagttccgtctgtttttcttttattaaggaaaggattgatggtcttggcattaagcaagtccaataggattttaagagatcttatcttaacagcaaagcactgaaagtcttcaatgacttccacatccagtaaaatgtgtctctgaggttttattgttcacaaagctgcttcagtttttgccaaccgtccactctgaagtcaatctctttgacttcagttctgccgtctgatacttccccaagtgaactttctggggatgcacctcattgctgtattggcaatgtcatttcagctttttcaccctcctgagtgactagagaaagtccagctagcccctccagcatctttacaagccgttcatgtgttgagtggagtctcatttaaccactaaactattatcatgtctgtctccactcagatctgttgtttattgaccagtgctcaataggtttactgtgtgcatagttttttattttgaaggtggggaacttctgttctgacctgcacatacagaatactgaatttgatgtcttggtcatacacttcagctaaaatcagaattttattctgtctagacaaggttaagaagatgtatatataaccttttgcttgttgctgtgctaactgacatagctgattgtttgaataatttaagccgatcatacagtctgtttatgactgtagcatgtatctgtgaagagctgaccccgtgtgcagtgcagtgttcatgcaggtgagtgtgtttgtaagtgcaggatgggggacacatctctgccctgtacataactcagtttcggtcccagctgcagccaccctgagctggttcccagcaggattagtctttgaggtgggccctcaaagacagggtgggattaatactcagggaatcaaggcaaaggctactttgggagtgtgactgtcagtgctgctgggtcatggaagagtttgaagcatggtggttattatcagaggtgttttcagaagatccttagggagtggtgtttgggaacggtttggttgtgatgggggatgctggagaagggaccagtgaaaacattgtatcagtatcacaaatgattgccggtcagtaaacttgtgaaattgggtctggtcttttttctttctttccttccttccctccctcccttcttccttccttccttccttccttccttccttccttccttccttccttccttcctcctttcctcctttcctcctttccttttattttttttgacagggtcttgcactattgcccaggctggagtgcaatgagggaggagccctcatggcctaaatacctctcaataccatcacattggccattaagtttcaccacctggattttggaggggaagttgtccaggcagcttccaaggcctggagactgtataggaagtttcctggacgttgtcactttctgttgggctgaacttaaagtcatgtggctacatctaactgtgttgggggctggagagagtggtccttgttcaaggctgctgtgcgttggctaaaaatgcacagaaaattagagcaggttttgaggagagctgacagtttttgccacatctacaaaattttggatggggtgggggtgatctaggttgtttattctgtttctaagccactgtagcttctctcactgaattatgcctaccatttgaggagcaaaagggagttttcccatatatcattatgttaggtttgttatggttaacaggactttgttttattcagttaaattgcattgtgtagttgctaactagtgtggaaaatagcaataagcgagagattggtccgttctgctgtctaggaggggacattgactaaggaaaaaagataagtgtaggtgtagcatggtggcttatgcctgtaaacccagcattttgggaggccgaggtgggtagattgcttgaggccagcagttcgagaccagcctggctaacatggtgaaaccctgtctccagtgtaaatacaaaaattagccaggcatggtggcagacacctgtaatcccagctacttgggaggctgaggctggagaatcacttgaaccggagaggcggaggctgcagcgaaccgagatcgtgccatgctttccagcctgggtgacagagtgagactctgtctcaaaataataataataacaataataataggtgattgtgaaaagaagcttataaaatatgttttaagagatagaaaccttttttcttattttggtaaagaacactgacttaagtgatagtgaattaagttgtatgtcaatttgacgtgcacgagggaggagaaggccagttgaatctaagtgactggccagagccagggctgccttcagaggctctgccctgtgtttcctgcctacccttctgggctcacttgcttcctgaaggctgggaatggccttgactttcatgttgccagcatctagcgcggggcttggcacatgatgaggattcatgaaatattcatcagatcatttccaaccaactcccgtgttcaccattagtaacacaaaagtacaacagtagaactatgcaggctgtcaatgcactcagtctcagagcagtattttcggtttatttaggaacaagtatacttgttgaaaaaaattacacagatagttcctaaaattacaaagatagttcatggccatgaactctttacatgtttatttattaaataaatatcatatgctgatgtgaaccgatactttaaatagggttggtaaaatgatctgtaggctgtataaagttttatgttacaaattccatggaagcagtgacttttgtttgtgcttttgtttctgtaatttaaacaatctgtgtttttcccattttctttagacctttttgctacttgatgagatatcacagcgcaaccgtcagctgccgtcagatggtaaaaagatggtgcatgtgcaggattttactgctttttgggataaggtaacatatccttaatgcaagatcatgactgctgaagataatgagtgacattgatttaatagagaattttgaggtgttacacatggtataaaatatggcttgcttatttactgaaactatgttacaaagattctcaaaattaggagtaagttttgcaattaatagaaagtaggtatgaaatcagacttaggtatttgacaagttgtattttatctcattttcaaaaaaccaaggaaagtgttacctcgttctaaactaaatgtcactaagtttggacattggcaacgctggattttataggattggacagactaggggtgcagcatggaatgggttaactgctgagtacattgtagattattacggagactttggggtatcagtgcacattttcagcttagcgttttcaggtcatcttattacatattgagaaagcccatgacttggatttttgccacggggttggggtggggctcccctattccaagcatctggatgttgccagctgctttggtggcagcccaaggccgaggggaggctgcaggccggcgtagcaagctccatggattcctgactgaagggtttcaccgtgtggtaagcggacaggtagttctggcaaggccacaaggatttttcaacacttggtttactcataacatttaggcaaatgggaccaacagcaggggccacccacaagaagtactgaggctcggtgcatctcctgttatccacaactccagtgccctcctcatgcttccaaggaagcagtgggctccctgcccagtgctcatagacgccactactatggcaccagcttttcatgaagagaaaggctgtattgtgagtggaatggcaaggagacaggaggcaacgctcaaatttgtcttccctagctgggggatggggcaggttttataggcagagggtaatgaggcatggtccgattgggtcttgcatgatgccagagctggacctgatcggatcctggatcatgccatgaggcgttcgcctctgaactcgttcctccttccttggtcctagcacttgggttctgcccatggttgcctgcttggttcatctgggaatgctcagattacgtaacttgcaacctgggatccatggtgactgaaaaactgtttactatgttattacacaaagttgaaccagattgggctggttctgcggttacgctcacctgagtccggggtcctctgcaaatgcacttgtctcagtctgtgttagtctggaaaacagaacacacagcatgggagagggaattttgtgcagggaattcgtttcataggtgatgaaagaaagagcacaaagggaaagcaggggtggaggaggccaccccgagatcagccacggcaggaagctgcaccccggggctggagatgatgtctgccaggagcagagcccagtggcccagctgccagcaagatttgggagcagagggcgagggtctcttctgagggtactggaacagctcaggctgcttaaaacaggtgggcagtgctggtggtgaccagctcctcccctctccgggtgctctttgtggctgaccttgcgttgtagcgtagtttgctggagccaagagccaataggcggttgagcagcactcctgcccagccccactgcctccgtcctcccctgtgggacaaatgtcaaaactctctagactccagactcttcctttctctacatgcccttggctctaagtattgcactccctgtttcatgtttgcctaattctgatgtaatttctgccatctctaccaacaaaacaataatgtgttcccagatatttagaacatcatcgcatcttgtgcacatggaaactcacacaaggtgacagtttctctttatctgctggcattcccaccctcatacactttatttatttatttatttgttttggagacagagtcttgctcttttgcctaggctggagtgcagtgctgtgatttcggctcactgtaacctctgtctcccagggtcaagtgattctcctgcctcaacctcgtgagtagctaggattacaggcacgccccaccatgcctggctaatttttgtatttttagtagagacagggtttctcccatgttggccaggctggtcttgaatttctggcctcaagtgatctgcccgccttggcctcccaaagtgctgggattgcaggcatgagccaccgtgcccagctctaatacacttcaagcattgacagacagctctgtgaacatcccactagaaaaaagcactctaggtgaatgctgttgagctagaggaaggcactgaggtagctaccacacactgtgtaggtcccatttgcaaatttcttttgtaccaaaccctgcgatattgtaaaatggtctgttttgttgtttttcggttcctagataacattgacagctgcattgtaaacagaacactccatcctgttttctggccttgtcttggggtgattttgcctcacactggcagggattattagggaggtcctgcggctgagagggtgctggggtgggaggaggggcacagacacgggcttctggagagaagctgcagaggaaagaagggtgtgctgggctgggatttcggagaaagacagagaccccagcagcagtcctgctggatagaccagcaggtattggagggaaggtcttctcaccagcctaggtctcatttataaaacaggggcttgggctgaagctgtaaagtctgtggccccgtgagagcctgtgactctccatggggaagggatttgcttctgctttcttcactgctctggccccagggcccacagagtggaggctcagtctgcctgccttagtgtgtcttggagcctggggaggtcccagagggaatgggcctagccttctgagctgtcgagtgctgcccccttctggctgcagcccaccagtgctgggtcccaggcctcccggcggggcagaaacctgctctaagaaccagggccttgatgggaagctgggttttgcatgtggctcactcttttgcagccaaaactgaataaaaagaagtaaaatcagaagtagttgttaggaaagagacacactgcaaaggaggggaaagggacaggttgaccggttgtgttttttcatccttttgtaatcacagaaataagtaggtttcagttgtcttaagagacagatgttacttaatcaggaatacagagtagacccgttacattttagaggaggaacaccttatatagtaaggcgaagtcaagcaagactttgtgaatttgtgacaagtttgcacttaaaatcgtgtaaatatgtcacattttgtttaacgttatttttccaagtgtttaggtaatgtattacttttttaaaaaagaaatagttgttaggcatgtatgaaggagtaaagaaacctattctgggtggttgttatataattcctatgaaatctggggctaatttctttgtgcttaaaagggatcatgatcgttttggtctgcggccatcctatgatgtggtatgggacacataaggggtcagttttcatacacacatattttagcatttgaccatttatagaaatatttgtgattattcggatatgtgaccattaagtcgtttccaggtaaatttttcattttgaaggttatcttgatctcttattcccccaccgtgctttctgtcttttgggcattttactaattgcacatgcccgcttgagatgtggagaggggttgatgagtaactgtgggctgcgccagctcagtgtctttaggttttgggttggttgactccatgcgtgcttccctcttccatcatcccaggggtgttccacccttcagggacgccagattcattttgaagaatccttttctagagttgaggaggctgcattgcctttgattcattcttgatcatttttctatgatatggatgagcatttaccaaagtgtgtcgtgcagaagaatagccacttccgaaaggatttgggacttgaataaatttgctaaatgcctacccaccagacatgcatggtcaggtctctccaatctatccacgagaaattcagacgaagattataaatgtgctgcttaaacccctttaggattcctcccaaattgtagctgtttttactttacttaacagtatcaatttttgtctactagtgttgatgtctgggtttggacaaaagttcttagagttggcagtttttacggttgaggttctatactctgaatttaaaaccattcctctctttatttgtaccaactgacttttgcttttttaaaagatagataattcaaagtactgattgtccttgtatgagaagaggaaacctcctcattttggtttatcatgctctggtaaactatccctatcatgctctggtaaactatcccttctccctgatacacacttaatcctctcaattgaaaatatttagaagctctttgtaaaagtaatgaatttgatttggtctcctaaataataaactgcaaaataacatttttttgagacaaggtcttactgtgtcacccgggttagagtgcagtggtgcaatcttggctcactgcaacctcagcctccggtgctcaagggatcctcctgcctcatcctcctgagtagctgggactatggcacacaccatgcctggctgatttttttttctttaagagatggtttctcactatgttgccccagcttgtcttgaactcctaggctcaagtgatcctcccacctccatctcccaaaatgttgggattacaggcatgaaccagtccgtaccctgcctaaaacaacttttttttttttaacattagcagtgattgataattttgttaacatttagtatatgtaaaaacatgcatatactcctgaatctttttatcatagaatttatagattgtttaggaacattatttctgataccctaatgagtacttcatcccttcctccctttgtgctggattgaatgctgtggtgggtacctcagtgtttatagtagaactactatgctgtccctattttcccaggatgggtaacacaagctgcaggtgtaacactgagactttcactttgacctatgaacatacacttaatttcattattcttcagtttttggttattgttaaattagagctcttggttacagggttgaccaccatttgtagaagttcatttgccaagagtgactttatagtataaagtgccttctggctggctgggcataactgaggttcatgctttatcaagtgaaaatggaaagattagtggagatttcaagtcatccattagccaaggactgggcatgccatgtactcatgctgccaccttgtggaggttaatgaaatagaatattaaaaccaagggacagaatgaaaatttacaaatggttgaaaagctcccatactgaatattatattaagaatattgccgggcgcggtggctcacgcctgtaatcccagcactttgggaggccgaggcgggcggatcacgaggtcaggagatcgagaccacggtgaaaccccgtctctactaaaaatacaaaaaattagccgggcgcagtggcaggcgcctgtagtcccagctactcgggaggctgaggcaggagaatggcgtgaacccggaaggcggagcttgcagtgagcggagatcgcgccacagcactcccgcctgggcgacagaacgagactccgtctcaaaaaaaaaaaaaaaaaaaaaaaaaaagaatattgttttaaatgagaacacatggacacagggaggggaacattacacatacggggcttgtcggtgggtggggggcaaggggagggagagcattaggacaaatacataatgcatgcagggcttaaaacctagatgacaggttgacaggtgcagcaaaccaccatggcacatgtatacctatgtaacaaacctgcacgttctgcgcatgtatcctagaacttaaagtaaaaaatatatatatattgttttagtaagttagcatgagttttcatttcaagaagcttgtcttgtcatttttactatctaaattttgtggaagtctggagctgtgttcacatgaaaatctggtaaaagggaatgggccttccttaagtactgaagactccaaactgtgtaaaaccccaccaaaaaaatatgattgtatgaaaaggactctaggatacaatatcttaaaataggaaggagaaagatttgggttatgttcatgtatcaatgactgttgtattgttttcttctctttttgaagtgatttgtgtgactttattgaaatgggcacattttataaactttaatttgtaggcatcagagaccccaactctacaaggcctttcctttactgtcagacctggcgaattgttagctgtggtcggccccgtgggagcagggaaggtgagttagaatggcttttggcagcttgttgcaaccccacttatcatattaacttcgtgggtttgagcccaaggctacgtgtaacacaattttgaactgggtacacttggcacggcatttctcagtgcatggaacattcgttttgcaagaagggtcacatgaccaaataaatgtggacaatgcatatcatgtttcccttggttcttcaagttgagcaattgggaactcctagaagttggacatctccatgaaagaaattatttatgtgaccactatgcaggatggattgactaagaaagtgggaacttctttttgtcagaggggaccctagatgctacaagacatctggaggttatgaaggcttgtctgaaaagctttaaacatgttttgatatgacttctccaagtcacatgaacacacatttaataaacctgtagccaggtgtatagtcctgtgttaggagtaaaagatacacctgtaatcaagacccagacgccactgccctccagaagtttctggtatctggggtgagacagatatacaaacaggtgatttcagttcagtgtcgtaagtgctctgatagtggggggcacagacacgtcatgtctgtgcattgtagaagatgtgaaggaaacgtgcgtacagacttagtctcatatattctaaagcaacgcaataaatctagttgtaggtgtataacaaatagggtggtttaacaattgaagtttgctcttcagagacacgattcttgggtatttaaaaataaaagtccttcctagtgcacaggatttattatttatttttatttattcattcatttattcacgtatgtatgtatatttagtttttgagacatggtctcgctctgtcacccaggctggagtgcagtggcgtgatctagagtcactgcaacctccatttccctaggttcaagtgattctcatgcctcagcctcccaagtagctgggattacaggcgtgccaccatgcccggctaatgtttgtagttttagtagagatggggtttcaccatgttggccaggctggtctcgaactcctggcctcaagtcatccacccgcctcggcctcccaaagtgctgggattacaggcgtgagccactgcacctggccaggatatgttatttacatacagcatttctaggattagttctttgtcaaaaaagatacccgcatgcaggaacaatgcattcagtattggatatatgaactatatatgtcatgcttggctactctgttgctgtaaacattcttagttgatctttgttccgtgtaccatttcatttaggggcatgaaactcatttagggaaactcattagggcagagtagattgttacactctattttgttaatattccttataaactactagtttatgtggaccattatgttatttccaatttttaatcacaacttcctgtgctcttttaaatgaatgaatggtgtttttcaagctcccagggctgggcaaggctgcattgcagtggcttattcttgtctcgagtgttgactgaacatgtgcttttttacaatctgtttcagtcatcactgttaagtgccgtgctcggggaattggccccaagtcacgggctggtcagcgtgcatggaagaattgcctatgtgtctcagcagccctgggtgttctcgggaactctgaggagtaatattttatttgggaagaaatacgaaaaggaacgatatgaaaaagtcataaaggcttgtgctctgaaaaaggtgagtgatgacttttggatttcatgtactcgaatgtccagtaatactagtgttcacttgaacaacaaggtttattaacttttttttaatttttaaagacctttgaatgttatttaatactttaaggcggtcctcccagtaaataaacacacacacgctctgtccttttaagtctgatgcgaaaatgatgtttacagggtgaatttcgggggtttggttggttttgtgaagttttatttacttttaacttttctttttttcaaaatggacaattataaaaatttgcaaaagtggagagaagggtgtcttgaacctgcctgtacccattgctcaagttcaagtgcgatcaacttgtagccaattcaactccgtctctcccctggccctctgctagctccacccccaacccagattcttctgatgcataccctcggcctcaattgtattttatctgtaattgtattttatctgtaataccttattacttatctctagaagataagaacacttttgaaaaaaaattacatctcactcaagaaaaaaaatcaccagaatttcttgctatcatcaaccggctaggcagagattacagtgctttagtatctcattacccattggtttgcgtcagactccggaagatgtctgcaccgtgcacttggctgatgtttcctgcttgggtccctctcaaaccacaggtttccttctccactccctttaaaaaagaaaatttgtttcagtagattttggggtacgggtggtttttggttacatggataaatttacagtgcaatttattatttaaaggaaactgttttaaaatttatttttcattgtgtatcatttcaccaagagagtgattgttttcagaaaagatgaagtgtttgattgtacactgaggttttcataaacctggtggatagttgatgaaaactgagcatacttaatagagggctataagttctagaagatagaaaaaatggtaaatactgataaatactatgttaccttctttgggccataaaaatcagtgaataatggcattaaagggctctccccaggccctgtgcagtgtggcctggacatcctactgttcttttatgctgtctggaaaaggccgccacagactgtcacaggtgtgatgcagaaggcttccagccaggtttgtgaggaatgagtaattttgcttgaacaatggctggaatatcagagtctgtcaatcaggtgagtagtatttgctggcgatttggatagagaaatcattgcttgtttaatgggctgtttcttcatcctggactattgttaatgagagatgatgcattttcggaaatgacattaagttagcagtaatgagctagatttttattgaatagtatacactatataggaaaagatgcgctaaggcaagctcctagttattcagatcctaccaggtcttatttttttttctctgtctcacacgctcacacatatgcacacacaaagctgtgtaaagttttaatcttttgccatgatttcccagtgcctttgctattgctatcctcattttgtttatttttctgatattgctagcctcgcttttttaaagtaaaattttcattttattcaaagtttgtacagaattgctaacatttccctaaaataattactatacttcagcttgtcctgctctggtgtccccccactgtcccctgcttccctgaagatccattttagagaaattttgcagaaatatagggtcaaagtaggagaatatacaaggtgatttcagtgtgttgcagtgagtggagtgtatcatgttttagggagttgagaaacagatggcaaattttgctagttttcccccactggtagttacagttgataaccaagaaactgctgatggaccaggccccggagataggaaagatggtacgccatttttcaatggaagggtggcacttggcaacctgggccttgtctttcagctcttttcttccatcatttctctatgacaggttagaagtgaggtccttgggaccaacacagggctttcttgggaaggctttgttgctctttacctactaatctgtcagtttggagataacctactagtaaactctagaatttaagaatgatttgttcaagactgtggtttcaagagttgaatgttgcttctggctggtaaagtggagggttggagagataaaatgactcacttgaacatttgcagttcaagttcaaagccatacctgcctagctccagattccattttcccctctgccaggcacctctcagttgggggtgtttataaggtagaaaactattttaacaattaggtgattgataaaaaggtagaatgtgggacaaaatgtttttcaagccttccctttttacctgttcagcttctgatacccacatgagactccaggtcccaggtcacccagctctgccttgctccttcccacatcagaaagtctctgggggaaagtgggggttaggacagtggctgccattcagcctcttccgtagccacctttgaggactggcccagtaactcggatagtgtcccaggcacctgcgggcttctgcgtggcaggcagactccagtggcaatggggtcccctcagggctgggctgcatggcgacttcttggttccttcctggatgtgtgtaagcatggactgctggccccctgtgcatggttccatcctcggtaggacggtgggcctccggtggtggagaagtcgaacagagcaggagtctggcccagctttgtcatttgctcgctgtcactttgggttttttttgagatggagtctcgctctgtcacccaggctggagtctaatggtgtaatctcgcctcattgcaacctccgcctcccaggctccagtgattctcctgcctcagcctcctgagtaactggggtcacaggtgtgcgccaccatgcctggctaatttttttgtacttttagtagagatggggttttgctgtgttgaccagctggtcttgaactcttgacctcaagtgatccacctgcttttgcttcccaaaatgctgggattatttgcatgagccactgcgcacgaccagctcggtgtccactttggacttgtcacattacttgccttgggcttttgatgtctctgctgagaaataaggacatgggatgagatggtttccaagaaattttgctaccattctcaaatgccatttatgactgtttagcaggggactggaagaaaccagggatcctcttaatgagttatgagatcatttgccgactccttttcaaatccacgtgtcaatggtgggtgttagatggccatagagaatagcaatactggaattattctggcttgtaggtacagagattgcatgtgtaatcaaaacctgctggacagaaatggtcctgagcgtctctgggtgtttggcctctgtttcatttcttattaaatgggggagatacagcaggattataaagactgcaggcaatgtctgtaaaatgcaaacatgccaggtttttggtaaatagtagctgttgcccttttctctaaatcagttaataagataaataaaagattttgccttatatagttcctcattcccctcctggccaccctcccccgcaaaaaaaaaaaaaaaagtcctagaggaaaaaataggaactaacaagatttctcagatatgttgatagcaactagatatattgtactagatacagttgaagtaaatttataagttcatcgagctaaaaatatatttgagataaaataataagataggaagtagtaattcacatttagcagtattgctttaggctaattatttattcaaagagatatcgtagcaaatgacaggacatacctcaggaaacaacatactaatgttagatactttagtgggtagtagttaaaatccgaggccttggggtcagacagctctgggattgagtctcagttcctcttcagtaggtgtgtgattttagctaatcgtctgaaccttagaaagcctcagttttgtcatctgtaaaatagagataataaactattcacctcataggctattgtgaggataagatttgatcatgaacttaaagcatctgattactaggcacataacaggccttcttaattataagagccaccaattttgggtaaaatcacatgaaatgtgacatgcttgaaagaatgtatctgagtatataacttccattatttgaattgatatttatatagggtttctatacatagtacagtaaataagagaataataaaaatattgttaccctaatagatgcaatgtattaatattatgtcaccctttgcatagtttcttttaatccttgagcacttttaagcagtgtgtatccaaaggcatggaattgataaattggagtttaatgtttttctatatagctcacttgactctacaaacccctttggtgtacccactatcttataatttcttctcatatttgccacattcctgccaacttggacattttctttttagattgccttgacaatcataaaataactgttgttatgcctttttgttgttgttgttaatctctcagttgggagaaccatatcactccttagtgacataataggaaataaatgctgagggcccggcgtggtggctcaaacctgtaatcccagtactttgggtagctgaggtgggaggattgcttgaggccaggagtatgagaccagcctaggcaacatagcaagaccctgtctttttttttaaagctgagtacaaaagggatacaatgaggtgaatctaactagggtgactaaatgaactgatagtgctgtatatggatagagagacttcgagttctgagttgtttcagtattgcctttaagtaacttctagcaagcacttggggaagcatgatatgaaagggcaacaggctgtgaactgagatgagcttggttcagactccagccttcctttattaactgagagtcctcagtccagttacgtgctctcacttcatctcagtctcctcatctgtgaagtgtggtcactacttacttggcaggttgtcatgaaggttagagataacaccaggcatcaggaacagtggttggtgcatagctcttacatccaggagctgacctgtggagcaagaagctgagtacacacataaacattaagaggcagaatatggcaggtccttcctaagaaatataaacaaagccttaggaacctagaagagagagtgatgttttctgattgggggactgcaggttagtttcatagaagagtttgagctgggccctgaaagaagaataggatgttgataagctatgacaggaagggccattccaaatggaagcaaggtgtggcccaaagctggagagccctgctctctgactctggggcctcttcttgtgctggggcctcaggcctggcccctgtgaccatccccatagtgtcctcagtggtctttctgcctttagtgtcaccatggttgatgtgcacatggtaggattctggttagatggcgtcaaacccacatagccacgtcatggtttttctctagtttctgtgtctgcatttcagtaaaggtggtggtagattaaataattggttaattttactgagtggtacctaacgtgcatgagataccttcctcccattgggagcacttctgctttctgctcaactgtttccctttagccaaactagaaaatcatggctaggaaattagcctgactcagattgtacttcagatcctttgaaatattttccctgtctgaggcgtgtccataaatagtttgccaagtcaacaacactcaaggtcgttgtagtactcaaagtgctactaccaggcatggggagagagctccttccctattccctgtctgcatgaaatgagacagatatttttagtgtcttttctagaaaatggctaagattgctctgctacaacttgatgctattttgagaatgaaaacaaaacaatgtaaaatcaaggcacagaaacttaacacattatataaagaccatcagcaatggaatgaggccaagtaaacaatgtgtgtttgtgtttgtgtggaaggctgggaccctgtcttaaaatggtgcattgtctttttatgaaaactgaaaggaagagatagtgttaactggtgcattgtctttttttttttgagatggagtttcactcttgttgcccaggctggagtgcaatggtgcgatctcgctcactgcaacctttgcctcccaggttcaagcgattctcctgccttagcctctcaagtagctgggattacaggcatgcacccccatgcctggctaattttgtatgtttagtagagacggagtttcaccatgttggccaggctggtcttgaactcctgacctcaggtgatccacccgtgtcggcctcccaaattgctgggattacaggcgtgagccaccgtgcctggccgcgttgtctttttatgaaaactgaaaggaagagatagtgtaacttctgagctcaacaaagagataacgtgaaataatgaattttcataatggggcacttgctacctttcatttgatgccatctggttcagattggagtattaggggactcctgtgtgtcttagtgggctgccagggagtgggttccaatggaaatactgtttttttccatttggtgatgtactttatttagtgggattcatgctatgaatggggtcctgctgttggtttgatcagaaaatatgtcatagtcatcaatagcaaatgataatgaactcagatccttttttcacttagagagttcatacccttactttagattgttccggcattctatgagtttattaattcttgtttctccaggatattttgtaaaagagataaaatgagaacttagggaggtcagaggatttgcttgtcatggagatctcaatgtgccatttgctttgtctccccggctttgtcagagtagagacaaagaaatgacaccttgatctgtaagagggctatctctgtagtgtcctaggttgatgcttatgcagctcagtcaatacccagcgatgttctccacaccttttgtctatgctaggatctgtctagtgataattataggccatccaagtaaagatttctaatgtaatgtcctgtaacttaaacctgatcattatcctgttattttcagggatgttcttgtcatgtttttttaaaaaagtattatgctttgtccacttatttcttaaataatttttaaatataactttggttggatcctcaaataaaaacttgttttccttcctagcttttgttttttggggtcttgcatggagccagagtctacttagtgcaaccagtctgtgcagtgtctcatgagcactctgctcctttccctttggcttttcctgactgggctgctctttctgctcttattctttgcagttttttttctgtcagtctattgtgatgccttaagcatcactgtgaagatggggcgggtgttatcccttctctgagaatggaaagctgaggcaaaagtcgcaaaatggcttgtgaagacacagttgttccttagtaagtcccgtggctttatgctgacagccctcacggttgggtctccagcacagacctccagactcacttatccagccgcaagtcaggatagccggtcagcatttcagtttggccataatcaaccttttgattttatctcttgaatctgcgtccctcatttcccccagctcagtaaatggtaaccctgttcttcccttgtcttacaccaaaaccaatgcagtcctcctctttttctatcacaacacaaacccatctcatcagcagatcctataggtgctacctttaaaatttgttcagcacatgaccactgatgttcacttccttgttccccactccggtcccggctactgttgtttcttgtctcaattattgccttgatcagatcatgtccttcctcctatttccctgggtgtgagcccttggcttctcttgcctctgtctctgccctcccctgccatcatcctgtgctcgcagttccgtgtgcatccatattgctcttctgtgaacaccttgggcacgtatcaccccatgggttttgtgcttgctcattcctctatggagcactcttcctgcactctgtgccagccagtccatcccctgacaggtctctgctcagaccccctcgatcagagcccttgttgacctccctatataaagtggactttccctctgtcactctgtctccctaagccagcttccttctccttcttagcacttatcacctcttacatttgtgtcaatcttttattgtcaggtcactcactgtggaaactctttcgctgctgaattcacaaggagttgctgctcaaaaaatttctgttaaaatggctcagtgcataaatgctatgaaaagctacagcattaaaatagataacgtgccctgactgtgtatttgataggttcaaacttacaatttagttactatgaaatatttccattgctgttgatcaaatacatgtaaatttctgaagaactaatgtgcaaagtttaggataactttggaagaacacaaagaacagaggaagaacatgttttaagtctctttttccccccttctttcctttgtccatacaggatttacagctgttggaggatggtgatctgactgtgataggagatcggggaaccacgctgagtggagggcagaaagcacgggtaaaccttgcaaggtaagttgcatttcagcagccactatgccggtgtcttttgataccttccagtggtggtgagcacataggacctgcttactgtgtattgcgtcctgtgtgaagcaccttcttgggttattctgttggcatttgaatgaacatcccagttgttgaaagttgtcatgttcctgggtgagagtctgatacctctttgtattttctagagcagtgtatcaagatgctgacatctatctcctggacgatcctctcagtgcagtagatgcggaagttagcagacacttgttcgaactgtgagtgtgtttgtgtcttaagtcatttctgcttttccagagccatttcgagttggctcaggaaagcctttatggctttcagctcatcctgctctggtgtccgctcccctccccacactgtcccctgcttccctgaagatccattttagagaaattttgcagaaatacaaggtcaaggtaggaaaatacacaaagtgatttcagtgtgttgcagtgagtggagtgtatcatgttttagggagttgagaaacagatggcaaattttgcaagttttcccctactagtaattacagttgataaccaagaaactgctgatggaccaggccccggagataggaaagatggtactccatttttcaatggaagggtggcacttggcaacctgggccttgtctttcagctcttttcctccatcatttctctatgacaggttagaagtgaggtccttgggaccaacatagggctttcttgggaaggctttgttgctctttacatactaatctgtcagtttggagataacctactagtaaaatctagaatttaagaatgatttgctccatagtagactgtggtttcaagaatctaatgttgcttcatggattcttaccagagtgaacacttaaaacccacagacatgtaggcctggcttgcctttgaaactagttgtctagaatctggcttccctcccaactcttacgtggtgtttctgggattttctttctttggctcttgcttagacactgagccatggaggtagaactactctggaatcttttctgtatattctataaactcatgtgtgccgactgacacttcctacatagtctagactggcctttttgaaagcattgtgaactggttttgccaaaacagcactcacatctgccccacagtcagcttcctgtttttcgccttgttaaagtcagtgagcctttcccactcattgtaacccttctgcgcacactgaggtagatgctcctgcagatgctactgcatgaaacatcttcgcttgcagaggagggcagtcagccacagagaagataagcacccatgctgggctgagtgagagagagacaagttcagatttcattcttgcccataaggaatttgtctctgcatggatcaagactaagtgcatgggaaaagttcaacagaccccaaggcttaggggatttcaatataggacaatctattttattattattatttttttagataggatctcgctctgttgcccaggctggagtgcagtggtgcattctcagctcactgcagcctcgacctcctgggttcaagagattctcctgcctcagcctcccgggtagctgtgactacaggctagcaccaccatgcccagctcattcagtgtttttttgaagagagggggctttgccatgttgtctaggctggtctccctatgttgcccaggctggtctcgaactcctgggctcaagggatccaccccccccccccccccacccctgccctcggcttcctggagtgctgagattacaggtgtgagcccctacacctggcatacgacaatctttttttttaaatggaagaagtgggcagcagagattggaaaggtcactgagggccgggcttggctggaagtagcctgtggtcctgcaggctggtaagggtttgtggtggctgagagtaggattcaattcctttgaaagaaatagtagaagcagaggtgtgcagacgggaaggagtgaggcctgtgggaaggacagcaggcaggcacctgttcctgtggtgggggatagagaaggtaccgtgagagaaagctctggaagtcctgtgttggccagccagggctgccctcacaaaatgccacaggctggggggcttccacagcggcaggttgtttctgcagagttctggagactgcatgtgtgagatcaatgcatctgcaggtgcagctcctcccgagggctttcttggcctgctgatggctgccttctcacccttttctccttgtgtctctgtatccaaatctcctcttcctgaaaagacaccagtcagattagagtagggcccaccctcatggcctcattttagtgtaattacttctctaaaggttctgtgttggccgggcactgtggcccatgcctgtaatcccagcactttgggaagccgaggcaggcagatcacctgaggagttcgagaccagcctggccaacgttgtgaaaccccatctctactaaaaatacaaaaatcagtggtggatggtggcgggtgcctgtaatcccagctactctggaggctgaggcaggagaattgcttgaacccaggaggtggaggttgcagtgagccgagatagcgccattgcactccagcctggatgacgagtgagattctgtctcaaaaataataataataaaaaaaaaattttaaaaaaggttctctgttcaatttctaaggtgctagggtgagggctggaacataggaactttgaggggagcatggttcagtccataacaagtcctggatagcaaagtggatagcgagtcggctgtgtgagagtaactcatctctgggctctggattccaggggtttggacatgaagtcatccactgagcatggggctctacgtgggttcctgaacgtttacccaccagagtgcgtatgcaaaatgtgcctggtatgggatgatgaagtggatgtgtatgatggtgatggttgcacaatggtgtgtatgtacttagcgcgaccaagctatacaattaaaaatggtgtaaatggtaaatgttatgtcttgtctatttttccacaaccaaaaaaaacgtggatggcagcattgaatctttctgaatgcagagtgcaggataagctggcacttggcattgccgcagcagtctgatcagagcctcgtttcctgctccctcctcattgtgccttgatgaattttccatttcgccgagaagggcctctgtggcttgcttgagtcttgcgcgaggccccaccagttctttatcactcaaacaacaattcccggtgggacgctgtttagagtcgccgcggggaaggaggaaggtattttcattgctgagtatcagtgtgcgtatcgcacaagctcccccagattttcatttgaacacaggaggtatttataaagtcctcttgcacctttaaggattaatgactttggatatatgcttgttagaagcaagcttgttaaaattgttgtttgctaatcagaatcacattctttggggaaacttagggcagggagcacgaatgcaatttaggaaatcactcagcagcaactggagaatgttctcaacgagttagaaaattggattgaacaatatgctatgaaagatggcggttgtgttgaagcttagaaatgtgaagtgttttgtattaaaagtgaatgaattacgcttctatttgccattaacagttttacttcaatcatgaatatatatcgagagttgttaagagttgtgttttacaactatatgttgcaaacactaagtggattttatcacatacaaaaagtgagggtcacttagattaaaggatgctaatccaatttgttgcctgctatagatgtggttgtgttctagaaagcctcaaattctcagacccctgcctctttgagtctcctaatcagatctcccacactgttgcctacctatttgtcttagtccattcaggctgctgattcaaaatagcataaactaggtactccatataaacaatagaaaattgtttctacagttctggaggacaagattcaagatcaaggcgccagcagttttggtgcctggagagggctcacgctctggttcatagacagctgtcttgtcactgtggaaggggtacggcagcttccctgggctggccccttctactaataccatttgtgttggcagattctcatgaaataggcctcacctcctaataccattacattggtgattagggttcagtaggaatttggggagggccacaaacattcaggcacagcactagttcaccttccctctttcaggtcctctaggactcccctacttttaagctacagttctaagtcctcgaatggcaaattgccctttgcagtctgccccattcacctttccaacccttgccatgcaagaccagtcctccagccatgcacacttctttggggtgcctggaaggaggtgtgaatttctcacgtctgcctgtctgtaagggtatttttcctgccgttggacaaccagggatagtttgcctgggcaaaagagaaaaatgaaagacacagatcctacctcctgcctttctcttctgctcctcggagggcatggcgctttctctgtcttcccacagccctcaatgagctgctcttgatccacctatgtgttcttccctccagcccccgcactagactgtgaatgcatgaaggtgcctttgcacagcgcatttgtgccccgggaccattgcacctgctgtatctgccaggaatgcttcccccagatagtctcatggctcatacatcacctccttgcagagaggactttcctggccactccctctaaagtacaacctttgcctggctgtctcttcatggtttactttactatccaatagtgtgttttctgtgtttgtgtagtgagtgtccctacacgactcagggtgttgtctgtttgcttgaccagtggatgtatcctcatcacttagagtagtccctggtacttcgtcagtgctcagcaaatgtatcttaactgaatgaatgaaggtagtgactgtatctgtccctctctccctccctccatcccttccttccttttttgacagagttttgccctgtcacccaggctgaagtgcaatggcatgatcacggcccactgcaacttctacctcctgggctcaagtgatcctcccgagtagctgggactacaagtgcacaccaccactcctggctaagtttcgtgtttttttgtagagatgggatctctccatgttgcccagactggcctttaactcctgggttcaaaagatcctcctgccttaacctcccaaagtgctgggattataggtgtgagccactgcaccaactgactatatctttctcacttgtgtcacctccaacattgtatgtgtcagctcttaatgttgtcttttttttttttttttcctttttgaggcagagtctcgctctgttgcccaggctggagtgcagtggcatgatcttggatcactgcaggcctcctgggttccagcaattcttgtgcctcagccagccgagtagctgggattacaggcatgggtgaccacatccagctaatttttgtatttttagtggagatgggatttcaccgtgttgcttgaactcccgacctcaagtgatctgtctgcctcagccttccaaagtgctggaattataggcgtgagcccccgtggctggcctcttaatgtagtctttatgtaggattagagttaaatagctcattgctacatcaatcacttattatttgtttgttttatggcatgactggaagatttttactcttaataatttggaaagtattttttgagatttgcctaagaagcataatttagaaaaaatttcaagccatcaattacaatgttagtgtaattatttctattatctcatctacaatggaagatgttaggaagaaaacattttgaaacctttgagttggctgatactggacatagcacccatcagatttgatcattaacatctccctttagatatgtatataaaaggactaatggcagccaatcttgatataaagggaaacagtttcattaaaagctttagtactaaacctgaagaggggtataagtactaaacctgaagaggtatactagattgaacaacttagttttgaaataagccaaactaagatatgtgaaaggggaaaaaataatccttttggacgtaaaggatgaagtgatagtttacatatctgcagtctggagttgtggttctgatcacaggcactgtctctaaaatacttgcttatgacttctcagtcctgaatttctaaaagcagtggctgcatatgaggaagactggaggacagggctaacacttattgagcatgagttatgttcttggcccttgttacagattaatgcttttcttttctttttcttttttttttttctcctttttttctttttgagacagggtcttactctgtcaaccaggctggagtgcagtggtgtgatgacggctcactgtagcctcacctcctgggctcaagtgattctcccaccttagcctcccttctagctgggactacaggtgtgtgccaccacacccggctaatttttttttttgtagctcccaggagtctacgtttacaatgtaggagaactttgagtgggtaccgtagaaaacaaacaaacgtcagaaaacttgatggttgaatactgaggtgggtcttatctttgagccatatggtttggactgtttggattctgtttttccattttcttattcagactgtttaggactaatgagagaagttttgcttcctggatgagaccaagaatactgtggagagtcacatgtcactagcatttgttttcgtatctagtattatttttgaagaagagtctggaaaatgcactctggcaaaggttaccaagaatctaagcctttttgcggggggtggagggggggcgttgatatgtgcattataaattatcatctaagaaaccgtccaagaaaaatgccgcgtcgttacgtgacctcgatctttctttctcccctgcaatcctacacggcaataaaataattagtgttttagttaagtcaaatttttgaatgtctatgttaaactaagttttaggaaaaaaaattacacttattgcctccttcccagaaaacttttgaggatttcaccacagcaaggctcgtatttgctgctagtggttttgaggacctagccggctttattggcttatatttgtatttagtttgtatttaacctctagatctttgactactgtgttgtctttgactacggtttcaaaatgtatgtttttcaatgtggagcaccccattcatgcattttttcaccctgtgccttttacatttataggtgtatttgtcaaattttgcatgagaagatcacaattttagtgactcatcagttgcagtacctcaaagctgcaagtcagattctgatattgaaagatgtaagtagtttctagaggtctcccgaacttgcaagtacttgggtgtgttgaatccccttcttcttcctccatttcatgttcctttcttctcagagctgggattcatgtttttaagtattaactcaaaagacttgtagaaatgtcattattacatgctaaaccatattaccgtaaagtatgtaaaattgctacctcaaggttactacattgttaaagaaaatgatgctgttttaatttagaactttttgtttacctcttccatgacttaattcaaattgtattatttggaaattacagactctaagacctgtttgtatccctttaattgtcatgcatagtttggctaaagatcctcttctattaatagcagaaatggctgggcacagtgactcaggcctgtaatcccagcactttgggaggccgaggcaggcagatcacctgacgtcaggagttcaagaccagcctgtctaacacggtgaaaccccgtctctactaaaaatacaaaaaattagcccagcatgatggtgcacacttgtagtcccagctactcaggaggctgaggcaggggaatcacttgaacccgggaggcggaggttgtagtgagccgagatcatgccgttgcactccagcctgggctacagagtgagactctgtctcaaaaaaataaaaattaaaaaataataataatagcagcaacacagttggataactgagcaacccctagtcacagcacccactttcctggaatagccagcagttagtgtcactgcacaggaatttttgagtgcctgatatgtgtgagagctggtatagctataagtaagacaaagtccttgccatcgtcgggctgacattcttcctggagatagatgcaaggaaggaaatggaggggtggggttgcctcgctgggacttgaggtacagtgacgtgaaggtgctgaccatgcggtcacctggggagggcatctgaggcaggggactggcagtggggtcctaaagctggaagttacctggtgcatttacaggaacatcagggaggagcagagcaagccagggagagcctggagaaaggtgggctcagagcagttgtcagaggccctggaactaggacagaggctactggacagtccagagcagtggagtgacatggtttgatctgtgattttaagagatcctctttgttgttggctggaggagctacagcagaagtaatttgaagtcttagtggttcacaagacagaaataaggggttggtctagtgtgtcagtttcctagggctgccagaacaaagtgccacacattaggcagcttacaacaacagaaatgtattgtctcactgttctgaggctgcaagtccaaaatcaaggtgtccgcagggccgcgctctctgaaggcttcaggggagaatccttcctcgcctctcccactttctggggttttgctggcactcactgttgatccttggctggcagtgcagcccttcagtctctgcctctgttgtcacatggcattgtcgctgtgtctctctggctttcttcctataaggacatcagtcactggacctagggcccaccctactccagtatgacctcatcttgtcttgattgtatctgcaaaaatccagttttgaaaaaaaaggccacattcacaggtaacaggatttaggactcgaacatatctttttagggggtcatggtcaccattcaacctataagagctagcgtggccggggacatggaggttagtgagaacttctcagcccagcggtggtttcatgcagcactccttggcttgttgcctcttgcctcagtaccctggtccttaacccttctctgttccaggccctggtcaaattcctgattgtgggtctgaaacccgcttagtgtcttcaaatgttttaatgtttctcctcctgcaatttcttaataaaacgatggaaataacaaaaacgagtgttaattatattttataagatctgtgtgcaccgttctccaagggagataaatttcacattattgcaacaaacggggtatataatgatagcaaagctcttgcaagtcttgtgtgtaagcccctccttgctgcctaaagaacagtgaggaatctgtccactgaagtcccggcaagtgaattctcacccttaagaggattatcgaaggcagaactgctgcctcttcagaagtggttccgtgtgctggctcttccccactcccccaggaatagggagcctgggttcctcaaacttgaaaacaagtaatttcttatgcagagggctgagactagtgtggcaaaacctgaatgctggtacattagagtaaagtctgtgggtggtagaataatctttctccaaaacaaccatttggcgaggcgcggtggctcatgcctgtaatcccagcaatttgggaggtcagggtgtcggggggaatcacttgaggtcaggagtttgagaccaacctggccaacatggtgaaaacccatctctaccgaaaatacaaaaaaattggctgggcctggtggcgctgcctgtgatcccagctactcaggagcctgaggcaggagaatcacttgaacctgggaggcgaaggttgcagtgagccgagatcgcgccattgcactccagcctgggcaacagactgagaccctaccacacacacacaaaccatttttccactggtgggcacccaggatgaatgtgtgtccattcttgcttcttgctgtcgacccagccccttccctaacagcagacagagcacggttccccctcggaacccactctgcattgctcctcagtactcggcttctgaggaaaattgccatctcagtaccagtaggagtttccttgtgtgtcttacagatactatgtgaaaagtggtcattttatcaaactaggtgtgtcacttttacctcctgtgtggaagaagacacaatgtatcatgaagcatttttgaattctccagttatcaaactggtccaaagggcccaaggtgtcgttggattttcctcagtggacccaccttttgggggtggggaggattggggtagcagggagggtcctggccaccttcccccacctgacttgccttagccaggagctgctctcctttgatttgttttgtattctgggagtttgcctaatattttgtttgctgctgtttgaggaaatcagttgggtctcatttcatggggtacacaaatagtaaagatatttgtacattattttctatgactttgtaaggagagaaaactgtgcaaggttgtgtcccatggaatgtcgaattttcagttaggaactccctgagtctttggggcaattatttatttatttatttatttatttatttatttatttatttatgagatggagtttcgctcttgtcatccaggctggagtgcagtggcttgatctctgctcactgcaacctccgccttctgggttcaagtgattctcctgcctcagcctcccgagtagctaggattacagatgcccggctaatttttttgtatttttagtagaggtggggtttcatcatgttggccaggctagtctcgaactcctgacctcaggtgatccacctgccttggtcttccaaagtgctgggatttcaggtgtgagccactgcacctggcctgtggggcaattttagagtaaagaccgtgaaggtgcagttcatggggtctatgtccaagtctggttcccacacgcctttttccagcagggcccatggccagtggaggcttgtggagtgcttcctacctgtgcagatatgcctgttcctacctccctatcagtgttaggtttctttcctggaatatcctcctcaatttactcattccttcaattcttattgcataaggtttatcacagttttcatgttctgtaataagactaccaatacggtcaccaacatctgtgtgataataatcgccatttgtaacacactattaccattttaaaaatattcttcaggacctaacacagagtctggctgagaacagaacactcagttgtgtatcaagttgaattgtattagatttgtcaactaggattccggacctaagtataatcataacttaagatcagttactttttctggattagaattagattaggttaacattatcacctgcacatgtatctctctgaaattctttatttttattttagggtaaaatggtgcagaaggggacttacactgagttcctaaaatctggtatagattttggctcccttttaaagaaggataatgaggaaagtgaacaacctccagttccaggaactcccacactaaggaatcgtaccttctcagagtcttcggtttggtctcaacaatcttctagaccctccttgaaagatggtgctctggagagccaagatgtgagttcacctcctgttacaacatggcctggttttgttcactgttaatggccttatggatctttggtctactctgttcaaagcttcatcttttgtcccaaagtggattctgtggtttcagggctctattccatgatattggtagattaaaacggaaccaaggcaaaccaccctggttggagttatcctttgtatgtaggctggggaatgtcaaggaggtgagtagcgggtgtgtatgctggtgcaagtcctaagctgtgtgtgactcacactaatactacaattcttgaatttactgtagtgaaatcctacttagtctggtggcccccgacttctctttgcatctggaggcataatttgaagacccccttagagaaagtcctgctgtgggccacatgaaattagccacttttcctgtatgttggaatgttctgatgctgcaggtggctgatggaggtattttgccctgttgtcagatggtttatgttagttaggccagaagtagcatgtgcaaagacccaacagttcctgacacacagcagcccaacttccttctttacctttcaagaataggagctgcatcttactcaccttggtgttcccagtggccagcatagagctgctcaatacatcttcagagtatgtgaatctcatgccttctaagtcctccgggcagaaatgtaccagagctcacttaaaagcatagatattccttgccacacaaaccctgactatccaaatccaggagactgaaggattcttgcagatattcagattaggccctcacatgccaaattatcaggagtcaatttctgaaactcaggaaccaaatagattaggatcatatgctatcccttcctttccaaactctggttactgagactcactgcttgaccccagttactgtgttgagctcatgttttgaccccctgctcttttatgtttccatcttgagtgatgcagttgagagttccatatctttttgtatatgattttggaacaagtttctgtattgacacttgaatttgggtgtgctaggtaagtgctgaacatcctgatggcatccttccagcaagccacgccacaatgtccaaatgatatttccttatctctagtagaaccttgaaagtgggatggctgggtccaaggattagtgcatatagctgggtgtggtggctcatgcctgcaatcccagcgctttggaagtccgaggtgagaggatcacctgaggtcaggagttccagatcagcctggccaacatggtgaaaacctgtcttcactaaaaaatacaaaaaattagccaggcgtggtagcaggcatctgtaatccctgctactcaggaggctgaggcaggataattgcttgaacctaggaggcagaggttgcagtgagccaagatcgcgccactacactccagcctgggaaacatgagcaaaattctgagtcaaaaaaaaattaaataaataaaaaataagtggatgtatagtttggctagctatttccacacccttctccacaggagatggatcattttggacttctgcctgtttccccacagctttgtcaacagagtgcattgtcatctttgggaacagttttgtatactgttttgtctcttaccaccttttttcctctgcagacagagaatgtcccagttacactatcagaggagaaccgttctgaaggaaaagttggttttcaggcctataagaattacttcagagctggtgctcactggattgtcttcattttccttattctcctaaacactgcagctcaggtaaataatgacatttgttttgcgccctcaaaatgatatttacagtacctatgtttatgctattatgactgcatcttgcagttcacttggggtctgaattgaaatgtgctgtctttggggaacaaagtgagggctgcctactggtgttccatgtccgttacaaagacctgcgaaaaaagggtatctttcaatgattttaaaatggaatatgcattttcttgaacccttgatatctgggagtttgggcttggcacagacctgagctggaagaactatgcgagttctctgagccttttattctttctttctttctttctttctttttttttttttttttgagatggagttttgctctgttgcccaggttggagtgcagtggcgcgatcttggctcacttcaacctctgcctctggggtttaagcaattctcctgtctcagcctccggagtagctgggactacaggcacatgtgccaccatgcccagctaggctaatttttgtatttttagtagagatagggtttcactatgttggccaggctggtctcgaactcctggccttaagttgatccgcctgcctcagcctcccaaagtgctggggtttacaagcatgagccaccacgcccggctttgagggctttctttcggttgtccatgttagcgattgagagttttgagttggtaagtcatgcccaagtttgatttttgtctttgttgtttctcccctcctaggttgcctatgtgcttcaagattggtggctttcatactggtaagttatttctggtctgatgtatgaaatactccaaaatcagtaagaagactcgcttttccatagagttagagggaggtgtttgttgatccttctcttctaatcctcacttcgtttacccgaagaaaaattagagtgcttgctggtggagtgtaaactgcggtggtctccacccatgtctgatccgcggcatcatgttcacagacagtttcgggaactgaaagttgtgatttaaattgaatttttataaggtagatatacacaagactaagtgagctgagaatcattttccagcatgaagcgtttctcccaaattgtggttcatttttaaaaaaatgtatttatctaaatttcatatatagcttaatatttttttctccccatgttccatagggcaaacaaacaaagtatgctaaatgtcactgtaaatggaggaggaaatgtaaccgagaagctagatcttaactggtacttaggaatttattcaggtaaagtttaatcatttggtgtattgtatgagaggctgaggtgcttacaatgagcctgtgtgagtaactagggcttccaggagtcattcagtaatgtcttaacagatcaggagtctcagtcgaatttactctgtgaattaattagaataattattttaaaaatctactagaagagaggttgactgaagactcttaatttgctctgtactggattttgaaagttaaaccaggattgagcattcagaaaatcagccactggaaatatgtggctattgtctattctaataggttgctttagctaaatcttatatcattatacggatgggcagggggattagaaacggatctccaccctgtggttcggatggttccaattctgtctaaataaaccctggcttttattgaacttggatgaaatcctctggcagcaaggcccccaaaataaaagcattattccctcccaggtatgcaaagctcccttcagcactgctcatctcctgggcttcactaattacttaagagggaagctgagcagggaaaaatccagtgtctgggaattaggatgccttctatttcttaccttgagatcacaatgttatcgcgtccccaactgtgtgattaatttaacatttggcttgccagactaatattaacgccacactctgttttcacaagagtgcttagaatgtatgtagcattacatactgtttaaagaaaatcttcatctaaaattttaaatatttccacaggaaatgctcctacaagctttcctcagagatagagtgagttatctttgtaagaacctactcagtgaaatttggtgtttatttcatcgatcgcttgctaagaaatctaaatctgttaggtgtttaccttccaactgatggactatgtggaaactaaaggaagaaggaaatctattatgttctattatgttcgtgtaggatggcaggctaaggataatgcccgttgatggagttaggaatttgagctgctttcagaggttaaataacagtgacatgtcatctgaaagggaaatatttgttatagaagttacccccactgtatttagcattgtgaatgaagagatgttaggaaagctcttttaatttctatgtgaataatggatcctcattcatgtcttaataaaatgtatgatttattttattcatttaaaaatgtcttgtgtctatgtaaaacagtgggggattagttgcttatttagattaattatcttatgttaaaatataatttgtgttttcttgcaattcaattattcaagaggttttccacatgcaacttaatacggtatttttaaattctttaaagctacttgggcattttctacaaggaaaaggtaaatcatttctcctattccttgttaatatcacatgttggtatcaaaacataccaccttttttagattatgggacataatgtaagtaataagatttggaatatggagaagatcaactacacttcatgattatctatcctacttctgagtttttaatagaacttgcaattgaattagagcctagaatgaaattgtattatacacctgatttttcttttctgtgcagtttccattcagtgagagaaaaataaactattttaatccttctttgtcaatgtattttgtaaatacattatacttatgtagaatccagatgctttatggaataaattaagtaacatctttataaactacctggcttgctttagcaactattgaagaaaatgcagagatatgctgtgttctctaagtgatatttctttatttcaggtttaactgtagctaccgttctttttggcatagcaagatctctattggtattctacgtccttgttaactcttcacaaactttgcacaacaaaatgtttgagtcaattctgaaagctccggtattattctttgatagaaatccaataggtaagtctgacaccaagtttctcagtaagtatgtcttgttaacaacacatttaggatctgattacatttccatctttgaaaatggaagggatgctgggaagaaaatcactatgcatgttgattcattttccacaagaaacttcactgatatttttctcctaccagagaaaatctaaatatgcggggggaggggggggcatacaatcttttattccaatttatatgtgtgtggaaaaataaatgaatgttcactttgcagaatgctttaggaatccatttgctgtgaggcaagtgaagcatcctgcattccctgtaaacatgtttaaatgtagttgaatagttgctaaacattggctgtgtttacatagtgttaggttatgccatttttcagagggatctttgtaatcaggaatgctctgacgtgagacaggccgtgcatttctttctttcattgggaaacccgttcatttctggaaacacagggtttttgtacataccctgactgtgaggtttccctgaaagataatatgtggttaattaaaagccaagattgataaaatgtaaactccccttcaagaacagtttctaactctgtggttttgaagtagacttttggttctataatagagactttgttgaacctgccatatagatcttcagtagcttgtttcctaggtatacccaactatacccagtattttccaagtggttgatgcctctgcactatgcgcttcttatctgtcctgcttctgaggctagccttcctgacctgggttcctagggagaattagttgtgcctataagtccccaccctgctcagttgagtggacttgtggggaggcctgagtgacattgtgcaaatgataactgccctcatagaagcagggaggtggcctggagagaacacaggcacagctttggcctggccattgactagctttttgaccaaggccagagcacataggtgctattacacaggcaagtctccaagcagatgctgtagttcaaagtgtgaactcaagctaactacctgggttcaatcctggtgctggttactaattgttatagctgattatagttacattcatattcatgtcctagttacttaatttttctgtgtcacagttttcttatctgtaaaatagggatactattcatacccaccaaattgaaatcttatgagaattaagcatgttaatacattcctagcacatgaaactgggtgtagcaacatggtcagtgcctaacgaatgttagtgacaatgaagccatgtatctgtgaactgaatcaccttcactgtggggtggaaattactcctaccctctctgttttacatgatttttgtgaagattaaagaagactgttctggaaagcatcttgtgtagatttatttaacaaatacttttcagtccaagcactgtgcaacgtgcaaggatttgtaaactgcagagaccacacaaatatcggtctgatttcagctgttattagaaagtcattggaggacctctgcgctattacagctgtaacgttgcgccactttgccagttaatttgaaactacagtcataacatttggagcattaagtgggactgcctttctgttatcacaggcctcggaatgctcatgactaccattaaccagcctctccatgtttgagacctgtgggcttctcctcatgctgatttatttattattcagggatttgggacccagtctaaatcttggaggtgactaatcttacagcagcacctgagtgtttatcttgcttcctcctcctatatctattagcatgactttattccttcaacaaaatagaagcccaaataagtaccccaagagaggtctactttgtccaaaatgtttagaggtcatgaattatttactttttttagtggtagatgttgaaaaaatgtaaaaattaaaagttttttaatggtagaattaaaattttcatttagataaaatttttgcactttttacaatggtgaaggatacacaaaatctgtgaattacgcctcagaattcacattactgattgtatgcacttcaatagttatatatatatatatatatatatatatatatatatatatataattaaaatttatttagaaataaggtctcattctgttgactagactggagtgcagtgatgtgatcacagctcactgtagccttgacctcctgggctcaagcgatcctcctgcctcagccttccaagtagttgggaccacaggcctgtgtcaccatggccagctaatttttaaaatttattttattctattttgaagagatgggatctcactatgttacccgggctggtctcgaactcctgtgctcaagggatcttcctgcctcagtctcctcaagtgctgggattacaggcatgagccactggacccagccggctttataatataaataaaaattcccctctatgatagtgaggcaggcatgctcgatttttcagtactcttaaacatacatgttaaatatgtataagtatctggcatgatgttgtgccccctgaattgcagagtgttctttgagtggggtagaaagactgggaagcatgtctgaatacttagttattaaaagcaagctcttagaagagccccgggggagtttcctatgagctcagcatcctgatattctcccaggttttagaaaacttaggaaacggggaggacctctgctggcatgtagtttccagtaagctcaccttgggatggtgactggcacagaaactccaggtgattcacaccgggggtctggctagacgtccctcatatccccatctccagtgcccttgtgctggaatattctcagtgactctggtctgcagcatagaaatgtcttctccattattttatgtccactcccaccccagtgtgccatccccctcatcatgcttctgcccagatcctcatctgtgtggttaatgaatgggcgacccttgctggtgactcagagaaccagaccttctggaagggtccccctgactgccccactgtggtcccaagttcacttatttggatttagggagaaggggaaggtaaacctggaaggtctgtgtttcttctcagcagcgaagtttctgtttcttttttttttttttttttgagacggagtcttgctctgtcacccaggctggagtgcagtggcgtgatcttggctcactgcaagctctgcctcctgggttcatgccattctcttgcctcagcctccagagtagctgggaccacaggcacccaccaccacgcccggctaattttttgtacttttttagtagagacgggtttcaccgtgttggccaggatggtctcgatctcctgacctcgtgatctgcccgcttccacctcccaaagtggtggggattacaggcgtgagccaccgcgcccggcctgaagtttctgtttctaggaaggccacgcttctccaacatgccagatattaagttcctctccatttcgaacccacctatggttgcatgaaattcatctttgtttatataatacaatacctttttatctactggcctttcgttaacctgataaatcttaagctagcaggataaaatgtgagccaaaccagtgtgctgccttagaatgacaagagccagttctctctctctttctcttttctttcttttcttccttcctttcttttctccttccttccttccttccttcctctttcttcctttcttcctgctctgttgcccagtcgagtgcagtggcatgatctcagctcactgcaaatgtccacctcttgggttcaagcaattctcatgtgtctatctcctgagtagttggtattacaggtgtctgccaccacatccggctaattttttttttttttgtatttttagtagagacagggttttacctcctattggtactgagatagcagttttcccaagaagccaagtactgacgagcaatgtggagctgggtctgaggggcaaccatgctctgtctgctgttgggagcgggctgggcccccagcaagaatggacacacattcatccaaggtgaccaccagtggacaaatggtgactgtttgtgtgtgtgtgtgtgtgtgtgtgtgtgtgtgtgtgtgtggtagagtctcactctgtcgcccaggctggagtgcagtggcgtgatctcagctcacagcaacctccggctcccaggttcaagtgattctcctgcctcagcctcccgagtagctgggattacagtgtccaccatcacacctggctaatttttgtatttttagtagagatggggtttcatgatgttggtcaagctgatctcgaactcttgacctcaggtgatccacccatcttggcctcctaaagtgctgggattacaggcgtgagctaccgcgccctgccaagagccggttttcctttctcgtctttttatcctcctctcacccattgctagtttttattctttcctcttttgatgtaggttggtgatgggatcacgtgtgtctgttaagaagccttacattttcagctgccctcggacacctccttcatattttgattatgacctgagttgaatagggcatttgcagatattttctggtactgttcgctgcatctacctcttcctagtcagtttttgtgtgtgtcttagccctgtttccgttctgttccaatcataataaatgggtaacacaaatcctaggtcaagagtaagtcttcagaaattaagagatgatttttattttaaatgtaaatcctgttttcctggcatgggcagaattaattttgcttttgatatccagcacaagagggcagcatgatctgcagtatttcagtgatataatgtaagagcacctcattgcaaaacctggtttttaatttaaagctttcttggaaattctatttttatagcttgggtctttgtatcttgatatgtgttaatatgaaatttaaaaagtaatattgtggcgtattatgtttgaaacatgaaagtctttgtggaagatatttttctgatgttgtcctggaatacctagcatttcaaacagggtttttttggatttcctaattacaccttcttgactagtaactggaataggcagacgctgacatcttgagtggttggatgcattttaattcctgaagcatacattatgatttgcttgtatgatgtttctgttttctttgtaagcatgagtttgcagagaaagatagttacacagttagtttctttagttttcttccacgccaacagagttagcagagacattttattcttatcaggtctctacaatttcactctttgttttggagaaaagatgagcggtttgttgtcctgttttctcatgcctaattatggtgacataacatttagctaagtacactgactctaatgggtgccagataaatgtttacttgctttcaatttgttaatttggctttaagaacccaagagctggtgttggtagaagtgtttgtttactctctcagggaagtaaaagttaatattgggttacagccagtgtgttttacacaactggtttttctccagtgtgtgcgtggggagtatgtgtgtgtatgtatatttatgttcatcgatgccttcaacagtgtaacaaaaaaaccagattcatatcattcttttttctttatagattaaggtaaatgagagctaaaacactagataaaagaaaaaagaaacatattgacttcttcccatgtttcttttttttaatccagtggaagatgcttgtggtcactgaggtatggaatgcgaatgctagtactagattttaagatagacatattctcctatgttccctaatcaaaaatcgagggttgccccagtgattaagattctcagcttttagccaggcgtggttgtagtcccagcagctcgggaggctgagtcaggaggattacttgagtctgggaggtcaagactgcagtgagctgtgattgcatcactgcactccaacctgtctccaaaaaaaaaaaaagaatgattccttcccagcttgactgaatgggaagttaggatgtgcatcctacaggaattgaggggaggagggtggtagtggtttgaactattgttctgtttctgaaacctggaaagggactctggaatccactacaagttgctaaataatttgtggagaactgaaagcaacctccatgatgagctttttatatgatcagaaagactgtcttgcgatactctataaaatctgatgtccatatcccacttccttgccagaaaaaaagagtcatcaataaagaagaaacataattgtagggatacctatttatctgtttattcagttcaaatgaccactggagttggtgctaaatgtgcatttttaacaagtataatatttcagcactgtcaaaattacctctacaataataggcttgttaaattatagctctataagctagggggtaagatggctctgcccagcacacattaatctatgcctgttcacacaagtgattctgctgagcaggtagcatgtttaaacaagaaatactggtcctaaaacctctgatttatggtaggtgttgttttgacacagcaccattcagacaatttacaaggcaaagcttcgtgctaaaatatttcctcagtgtcatcattcgtcaccagtataaatattcagtagtgatgctggaaaattggtaatatgcccattgatgccaaatcactcgctatgtttcctttcaagtgagatctgttgtggatatggttaaaagaaactatgatttttcttccttgagagcagatgagctgtaagaaattgagaataacaaccgtcctgacagctttcatgtactcaatcttgcctatattgcttttaattctggcttaagtcctgcgggctttccctcccacccccttgcctgatgcgtattgtaaagaacacatttatatgtacattagttagtttaagaggctttttgtgttcaaaggaagaagttagtcatcaccagaaaagctttgttgcaaaacaaaaacacacatttcccctttcattttttcttgttaataataacaaatgcaagtgactataaagggaataacacaaaagattgcatcaatcataatgattctcaatagccacataaatattgttttttcagctttgaatgaaacagctaagagtttgaagtaggtgtggtaattaaatcctgtcgggttatcacaaattaaaaataatgtttttttcacataacaatggttatatgtacttaaactcttatcaggggtgatacgaagtcatattttatgggagttgctcctttactgctaatagtatcataaaagcctttgttaggagtttaaatagttacgtagttacatatatttgattgctattgttattttgtcagtaatctgtatgtaagcgattactgtagcacttgtctacagctggtaaatattgcatcattttggcataatttttaatctactagaatgttctgattcatggtttttctccataataaatcatacatggagatactgacaacttagtaacagagaaagcactgtgtttgtccaataaaatgttaaaaagataaaaaactagggaagaatgtgctttgttcaaagtgataatcatgtaatatttcaggaaattataagatgacattttacttaactgtgttaaattgttttcctatagtgtatataatgtgatacctgcatgtatttgtatatgcctgtatctctctctctctgtctctctcgatatatgtaagttctccacttcagtctaatgtccgtggctatggttttaacgcccccccattaactgatttgatatgtgttgtctttatctttatcttcggctaacttggaactagctaacttggaactcagggctttgtagcatatcccaatatctgctgttaatgtgtgcttagtaatttggcattagcctatgggatgtgtgactgataatagtaattcaagtattgtcatttaaaactgtcccccactgttagatcaacattatagttctctgtgaccttattgtcagaaaagaatcaaagtatcttcatgacttagttcttagctgttggataaccatttcaagggaaaatagaacactgtttctggaataacctaatgatattccattagccacttgcagtggccgatttcaacatgaataaatattgataagtatattactgagagcctaatatgtataaagcatagtttttggacactaagtggaagttgttgggatttgctagcttgaaacgctgttctgttttactgtaaggccaactgcttcccctcaaagatttgactttgaagttctcatatgagaactctggttttcatttataattggagttttaatttgagagttttccatttataactggagtttaatttgagttttatatgagaactgattttcacttataattggagttttcttattccattattttattccttccccctttattataaacatgattatttatattgccatgaagacagtggaaaaaaaatcagaatatttacaacgctgaggttgtgacattttgttttccatgaagtttaaaacatttttgcttttatcaagtttttgatagtgtttatgaaaatgatagttacattctaatttaggtaattacgtatttaccacccttgtcttatgttagccttgtttcccccttgtcttccttgccttgttttccccttgtcttcttggagcttatctgttgtttccttgctaaatcccctgagcccaggattggatacactgtatctgattagtaaatatttgttggctggacagaacaagaaatagttccaagagtgcatttgcatctctttaagcaacacccataaagaacaatgggactttacagtgttgaaataaaattagagtgttttttgtcttacagctggtacttatattaaatttaactcttgcttccaattttctttttcaaaagtacagtttgtaatagattactttggtggactttgtttctgatacgtgatggcctgaagagaaaaaccgtacattggttctttggaagctgtgattcatggaactagaccaagttctcctgttgtttaccagtcaaagaaatgaaactgtcaaacacctaataacttttttgggggtttagttgtgtgttgaaggtgacttttaacactctgtgggttaagcgtctggtactgtatagttttgtttcataaacttcatgcccttaagaagtaaagagaggaattaatccatttaaaatcatcagtagacattgaaaatctgttcttgcacagggagttgaggtgttgagatgccccaattctgctaggatcatagtttgtggtaactaagtcggtcacattacttctcttagcctcagggttctaacaggtaaaaagtggctttttcattcatcaagcatttcttggtcttctactcatcgtcagttgtggtcccaaacattgaaacaaaagtacctgttttcaagggacttgcaaacttaaatagttgccgacagtggatgatgatgatgatgatttcttctccttcttctccttctcctccttcttctccttcttctccttctccttctcctcctccttcttctccttctcctcctccttcttctccttctcctcctcctcctccttccttcttcattcttcttccttcttccttctttcctctttgttcttcttcttctttttttttttttttcttgagacagagtcttggtctgttgcctaggctggagtgcagtggtgtgatctcagctcattgcaacctccgccctctgggctcaagcaattctcttgcctcagcctaccgagtagctgggactacaggcatatgccaccacacttggctgattttgtatttttagtagagacagagtttcaccatgttggccagactggtattgaactcctgacctcaagtgatctgccttcagcctcccaaagtgctgggacaggtgtgagccaccacactagaccaacaatggattacttctaaaaaccatcctgtgtcagaatctatgatctcatatcaaaaagatgcatattaaaattaatgcagctgccaaatggaagtctagatacttttctagatacaacacacatgagcatagctccatcagatatgtcttcttcataattcattggccttgattttataaaatttccaaaaatggttcttttggcacttcaaaaccaattgtgttcaaaagaaatcataccagtgggagtagcagaggtgttcaggaaacaaaataaatgattctttatttcagatcataatctctaagcttcaagtggactcacaacaatttctagctagactcttgactgggcctagatgcttttctgagccactgggggaggtctaagtgctacagctcagcttaggaaagtgtgttggagaaaggggagggacttccagtgttgccctttacaagtacctgtacacgctttgggcttttagaagtattgataggagaaagaacataagtaatgatattttccctgtaagtaatgttatcatgaaattcaactatgattcactgagtgttctcattcttggtcaccaggattaatgtttgagaaatttcttcctcgtttaaatagaagctctttcatatctcaaataaagactcgacaagcttcaaagtacattttgaggccctggcagtggggaagggggagggagggggaggaaaaaaacaggacatttttgagaggaagtttattaaaaacaagttctctgttctggaaacattttcctttcatgtcttgtttgcatttgcattttaatagattatatcacataggcaaatgttccagcacctcttgaacacctggaaagcctgtcttagacttgttctggtgtttagaaatctttaggcagacagtgttccaaatacagtcatgctcgccaggcatggtggctcatgtcatataatcccagctacttgggaggctcaggcaggaggatcgcttgaggccaggagtttgaaagcagctcggacaatagcaagaccccatctctaaaaaaaattagctgtgcacagtggtgtgtgcctatagtaccggctcctcgtgagactgaggtgggaggattgcttgagcccaaatgttagaagctgcagtgagctatgattactgtattgcccccccaagcctaggaatcagaatgagaccctgtctctaaaactgtgcagcaacatctgagaaaacagtatatctcccctggttgatcttcagcctgatagtagctaatcagacttctctctgaacttcaggtggaagtttatagaaatgttcttttgcttcagtgactggtctcattcctcactctgattgaagcacataatagaagagttcagagattttgggagttggaggaaaaaatagcatacccagttctttctgtgttccgcacaatgatattggaacagggaatatagttgaagcagatttacccttaaatatattttctccacatacaattccacacgccttgatcagcagcagtgctttgaggcatagttacaatcatggattattttttttcattacctttacatatttaaaagtagagaaggaaggaaatggttgcttttttaaaagtagtcattatttttaatttttttttcctcctgttggtgtcagaatggcctgggcgcataaaatttatttcctttgggggaactataaatgtattcttcttctctttttggagaataaaatggtagtgacatcttacaattatcccatgcgaatataaatcttctctatatactccctattacttagcatgaaaatgaaaagggagtcaagtatagtttaataagttctaccaatgaactgtattgtagacagaagtatttcttattggtgccaagttggaaaagttagtcttgacgtggtcctgtaaatgaaaggaaaatcaacacatacatttcaggatcatgagtgatcagtgtcactagaaaagtgttcttctttcactttaagattaaataaatagttgttgacataaatagccggggtaataaaagggaacacctgtgtaatccagccatcagcagttttatcgtacaatcagataagctgctgtttgttaaggaattgtcaagtctttagaccagatgaatagatttagctcatacgttagagaattttaaaaactgaacagaagaagctttaatttcccttgatgccaaatgttctaaccactctcatctcctttcacacacgagaagctgtaggagtttaaagctcaattgacctagccttcaggtatgtcttcttccattagttattgctgtaccaaagtagctaaatgttctagatgagattagggtttgaaattttatatggcaaaataagtacctcatcatttttggataaacatggggtattttttttctaatacagctcatcttttctctccctttaattctcatgtccactttcatttgatgtcaaatgagagagaactttggttgtcatttaagagcctcttgatcaaaacagttatcttaagaagcattgattgtgtgtgtgtgtgtgtgtgtgtgtgtgtgtgtgtgtgtgtgtgtgtgttgtgatgggtaggggagagggagagagagactttttagttagcttgtcccaccacaataagaattatatttttggattctcttaataatatgtgaaatttaaaatttgaaaattaatcagcaaataagatgtcctttgacttcacccaccagcaaatggaaggatttttctttattttctaataggggatttaaatcactatatgatttgggatccatggtacccttttggtaaaaagcatgactttagaatcagcctgcccaaatgtgaatctcagctcttccttgctgaattacttaaactctttctgcttcaacttatttgtagtatggcgatgatattaacagtacaatcctttttttgtgtgagtgacaattaagagaatcaatatatgaaaagcatttgatatggtacctaacagctaaaaattgatttttttgactaattgagatgatgaaattttagtagtcttaaaaaatgtacaaattccaaatttgctagttttgatgaaacaataggagtctgggaagggtgtctgtgttttcctggatgcaaagaaaaatagataaatgaccaagactaacaagccacaaaagaaaatcaatagagtattttttttgtttgtttgcatgttttctttttggttgtgttttcaatggggcttagcttcattccagagttaattttaaatttaatttggttttacaatgagagctcaattttgcatgtaagtaccaaacatctggtttactttttgtttgaaaacgatacagctgaagttgagtacagaagtctattgtgtaattaaggaaagagagtttgaaattttgtaaaataagttctatttaaatggaatattggaattattccagagaagtggatatacttcttaggagtaggagaaacttacattatttttaaaaaatgctataactagtccaaatgtataaattctatgtattcacctttttcaaaaagcatgaaaaatgacaaatttcacaagtgaaagttaaagttgacctaaggcagttttagattgttgagccttcaaattttattcatgggatgtttttagagacagtctgtggtttgatcactccagttaattctgggcaatctttctacatttctatcagatggacattctgatattttaaaacttcctcttgcgcaaaatatgtttaaagcaacctgggaagaaaatgagatttctggttagttcttgtaaactataaattatgtttttaagacatttaaaggaattataagccaaacatagataactcctgttactgcactattaccattaataaactaacaattaaaatgccgtaaagtactgactggatataatactagcattgtgatatataaaaaatagaatttggggtggagagacctaaatgaagataggacacctactaattttccacctgcttgccagatagttgtgtcttcaggcagagacacccaactagtccagagtcttaggattcaacctcagtaatgtcagaaaggccctcagctctgaactgcgatgattctctcattctgtgcaactcttttagaaataatttgataagagcttaagaaagtcaaaaataggttgtttgtaagacatcagaggatttttataatagttttgccccacccttgaatgttttagaggtctgttgtaggacagaggttttggtttctggcagttgcattctagttctctaccaaattgaggatcagccagaggtacaatacatttggaatcttgccctgtgtcttataattttatagcaacattataaatttatttgacaacttaagcttataaaacttctgtcacttccgttgtcttgtttcatctgcagtagcaacaaagcaacaagaaatctgttgcagtctctctgcctctgagcatccacacagtagatccaccctcttctttgccttcttgcccaatactcttgttattgtccctatcggtttttatgtggcaaccgcagggatgtgatgcctgtaattgaaaattaaatgattgccataaatcattaatcagactgcagattataacagcatttattaagcatcttggtaggccaggagtgtgctgggaattttgcataaggtaaccggttactgtcttgtgaattctgtctgggtattttcctgtgtttgtttcttccaacttttatttttggttcagacggtacatatgcaggtttgttacatgagtagattacatgtggtggagggtttggtatacagattattttgtcacccaggtaatgagcaaagtacctgataggtaattttttgatccttgccctcctcctaccataaagtaggtcccagaatctgttgttgttcccttctttttttttttttttttgagagagtcttgctctgtcactcaggctggagtgcagtggcgcaatcttggctcactgcaacttccgcctctggggtgtaagcaattatcctgcctcagtctcctgagtagttggaattacaagcgcatatcaccatgcccagctggttttgtatttttagtagatgtggggtttcaccatattggctaagctggtcttgaactcctgacctcaggtgatcctcctgccttggcctcccaaagtgctgggattacagccgtgagccactgtgcccggcctgttgtttccttctcagagtccacatgtactaaatgtttagctcctgtttgtaagtgaaaacatgtgatatttggttttctgtttcttgttaatttgcttgggataatggcttccagctccatccatgttgctgcaaagggcataagtttgttcttttctatggctgcgtagtattccatggtgtatatgtaccacattttctttatccaggccaccattgatgggcacctaagttgactccttgtgtttgctattgtgaatagtgctatgataaacatacaagtgcatgtgtctctttttttttttttttttggagatggggtctcctctgttgtccagtgcagtggcaagatctcagctcactgtaacctccacctcccggagtcaagtgattctcccattttagctttccaagtatctgggactacaggcatgtggtacctaatttttttttcttttttttttttttaggtagagatggggttttaccatgttacccagacaggctggttttgaactcctgggctcaagtgatctgcctgcctcagcctcccaaagtgttgtgattacaggcataagtcaccgtgtccagccatgtgtgtctttgtggtagaatgatttattttcctttgggtctatacccagtagtggattgctaggttggatggtagttttcttttaagttctttgagaagtctccagactgcttcccacaatggctgaatttccatttcctccaacagtatatatgtgttccttttctctgcaacctcaccagcatctgttattttttgactttttaataatagctcttctgactggtgtgagatgatatctcattgtggttttgatttgcatttctctgatgtttagtgatgttgagctttttttcatatgcttggtgactgtttttgtcctttgcccattttttttactggagttgtttgttttttgcttgtaaacttaagttccttatagattctgttctttttgcttaggattgctttggctctttggacgctattttttgattccatatgaatttcagtatagtttttctagttctgtgaaaaatggctttggtaggttgataggaagagcattgaatctgtaaattgctctgggcagtatggccattttgacaatattcctatccatgagcatggaatatatttccatttgtttgtgtagtctctgattttttttcagccatgttttctaattcttgatgtagagatcttttacgtctttggttacctgtgttcctaaatattttatgtttttgtggccgtggtattcttgatttggctctcagcttggatgttagtggtgtatagaaatgctactgattttatgcattgatttttgtatcccgtaactttgctgaagttgtttatcagatctgggagctgttgggcagagaatatggggttttccaggtatagaatcatgtcgtctacgaagagaggtagtttgacttgctttttcctatttggttgccttttctttctttttcttgcttgattgttctggctaggacttccagtattgaataggtgtagtgagagtaggcctccttgtcttactggttatcaaggagaatgcttccagcctttgtccctgggcattttctaaagttatgtcgcccattcctatatagtataatattttatgttatcatcatgcttcaccccctcagataagggttaagttacgtttaatatagtacttcctttccaatgaatgtggatatcttattaatcatatgtttaaaaatttgacaaatttgtgtgacctggaaaaatccatcacaaataacaggtgtcacagtgtgtatctaatggatgcgtttatctgtctgaatgtgtatgtgtgtgtgtaatgttgatataagaattccaatttgagttacatgtgtgaaactaagaaatattttaacctctgtcttcttcaccttctgaaatgtttactcagctgttacataaacttgcttttatcaattttcagaaggatttagcatttgaaaatgagttagtcccacaatgggagaaaaaagtttttactatgtagtaaatgttactgcttctgcaaactagatgatcacttttgcctgttatcatgggcatacgttttctagacttctagcagtacattggcatgactttctaaatcaagtttttataattttttaaccggtcatatgttaggagagtgctagctctgaaatttgtagtgtttggtgtcataggagatactgtggaatggtgctaccatagctattccttggcatttgtgtcctactgggagtggaaataattctgtctttggtatgaacattttttccttttttagctctccaaagtgataatggagaactttttatttatattttaataaaaaggagagaaagagggaaaggagacagagaataaactctcaaatccttccaaattagaagtcctgttaactatttcaagatgtctttggtcattctcataaattttagatttaattataaatgtatctagaacatttcatgtaggctattttggaaatgcagttgaacttttaataggactcatcattgttagactttgaatgacagaataacatggtcagaaggggcatctcaggaggttcctgttagaagaaccacagccaagtgcctttcaagcttgtggaaatcccatccagctgttctctaggcctgaaaaaatgtgggaaatcgaaagattggtgaattctcttggtggtctactcagaagaaaccatattagtaatgttgatggttcagtatcaaacctggcttgggctcagagcttgtgagcctagagtcacacatgtaccaatccaggtgagaccccagctgaaaaatttctttgccttgttttatttatatagctaggctttttagtacatggcccactttttagctacttgccctcctccacccataaatcatggtgatgagaaagacagagattcttctatcatccattttattccttgtttcttcttcttattattatatttttttggcagtaatttaagagatttgctttctttcttgtttgctgtagaagtcaaacagtatttggaaatttgcggaaaatagcgtttcataaatcttctaatttagtcttcacaaggcttgatattttatagtgagacactgatttttactcatacccttttcacaagtagtatgatgataagatctaatcctaattctagccatctatttgttctttgttctaaaacttaagtgtgtaccttagatatcactatttcttttttttctggtttactcatgatcttttgttaaatttaaaaatttttttttttatttccataggctattggggagcaggtggtatttggttacatgagtaagttctttagtggtgatttgtgagattttggtgcacccttcacccaagcaggatacactgcaccatatttgtagtcttttatccttcaccccctttccaacctttcccctcaagtccttaaagtccattgtgtcattcttatgcctttgcatccccatagcttagctcctacttatgagttgagaacatacgatgtttggttttccattcttgagttacttcacttataataatagtctccagtctcatccaggtcactgcaaatgccattaattcattcttttttatggctgagtagtattctgtcgtatctatattccacggtttctttatccacttgttgatgggcatttgggttggttccacatttttgcaattgcaaattgtgctgctataaacaggcacatgcaagtatctttttcgcgtaatgacttcctctgagtagatacccagtagtgggattgctggatcaaatggtagttctacttttagttatgtaaggaatctccacactgtcttccttagtggttgtactagtttacattcccaccagcagagatatcactatttctgttgcttcagggaaaaccagtttccagtttcctttatgtattgatggtcctctgaaaaagatagagctggacactgtggtgcacacctgtagtcccagccactcaggagactggttcaggatgatcccttgagcccaggagtttgaggccagcctggtcagcatcgtaagaccccgtctcttacgaaagagtcaatacacacaaataggtttactgaataacacagccattttctgttgagggagcaactggctccttggatgattggattagcttctctttttttggcccaaagtagaataactatggtatttttaccatttcccctcagtctcacttctaaggttcttttcaaaaatgggctaagatatgttaaggtttattaaaaacttcattgataccccccaccccccaccttgtgtaagctgcaacttagtcagagagattacatgtggagctttatatttatggtacattctttgttctctgcttttatactgcacctcagaggattcttaaattctttgacttttgaagcttttcgttttctttgctgagtttgaggacaaattttgggcaaaaacacccggatgataaataatgcatctagacaaaaagagaaacaaagtgaaactcagtgaaaagtaaatcgacctaaacagtctaagaacatttaacgttttgattacatctcatgacatttgatatcttgaccccttcagcctgtgctggctgttgcctttgcctccgacttgtaatgtcagaggattaaagctcttttactcctttctggtgaaaatatttgcaatttcagatttgtaactagtagatctgttcagctgtaaggaaacctttcagtgatgagcaacacgacttttcatctgagggatgcagagtctatgactgcccgagagattgggatcctgtagtggttttatttcattatgagcctccaccagtattatttaatgcaaccaggttttgaatgctggtgagaacacagttaaggtcatggtctgcaaggactttgatgtcgtgcagaagcctgattttcccataataggcatgaaaagcttgtgcaatatagctcttaggagatgaatatttgttcctgtaggttacaatagcagacataacctgtgagtgatggaaaatgtcgggcagaatatggatttggaggaaaaaggggaagaactagtatgaaaaaattagccatagaaatcgatagatactaggccaagaatataactgcaaacgtgtcagctgggttttcccaagaatgattgacagacactattgcagatcctgcaagtaaagaatttctgatgttttctttttttttcctttaaagttcaactaaatgatttccttatagatttgaaactcttttctccttatacagaaatttctcctctcttcttagttcccagatttttgtgctaagagaatgcataaaaggcaattattctgttgatatctttttaactatctgtaaagatatccatattgattcttagggccactaccctggtacagtttttggtggcttgaattaataggatggtttgctgtccattttatttgtgtctggagaaaactttaggttttaatgcacttgcaaattccttgggcaatctgtagcctgtttggctgtctttgttgcctttcctttagatgctatgccgagtccatgaagtgctcttctctctaaggaatacagagactggggatagtccccagagttgaggaaacgtagagccccgtaggtgtaccagttatggtgggtggtgggagtgccctgggctagcgctgaaacttcaggttttcagtggttgacatcatgagtgaggagacttttggaagaagcagaactgaaggtaagactgagtaagtggatctgtccaagagtaaggagagatgaggcctggagatggtcaaggcaacacacagaatctgactttggcagtggatcctagaccagatcagaaccagaactagagatcaggaggtcagcatggaatcagtgggaagccttccatctgcatggttgccagcttcgtgccaagggatgttctggcaattatggaagcacatattggtacaggtttgactaaccacccagacttttagcactggagtttgttgttgcttttttaaattttttcccccaggacagctgtcaatttggggagatatacaggtatgaattgcatgggaaagaaccattgaatatgactctgggatggttaaatatcttgaagctgcaaagaaggaacatagaacaaagaacaagatgaattctcatcttatgatttaaactgcatttaaacaatgtccgtagatcctgccttcctggaggtagaggccaagtagcaccatatacatatgcgtgctatttctgagcactcacggccccattgggcatgggctgtgtaggtgccaaggctggaggggctcctggggctgtgggtgttttgctcaccccctacacagcttgccctcatgcttctctgtaacagggtcaagtttctgggttacagctgccacaggaacaagctggcacattcttcttgttttgaatttgaccactgggtatttatttattttcccacctttgattgacatcaacgtttggtgacctccttcatccctcctttgggcggccaatcctgcccagccacaacactggtctcagttctcataatgatgttcccatcatgtctcttttgtaaacagagcaaatacagaaaatgccagtttctaaactttcacttaatttctacccatccactcagaaatacccactgagtcttatcttgagttaggcactgtgtttggagctaggccaagaggtcgtcaaaattgtggggaagatggatgcgcagtaagcagcagagggctgggcttgggattggctccgtggaaggagaggcccaggggccacgggagtacaggagacaagccaaccagatttgaggtggggcgagccttgaaggatctctcacggacctgtcatggggatgggtggttggggttacagcagccctggaggtaagggaaaggagctgcccagctggcgtggagtgattgcaggccaggtggtgtgagggcctgcccaggccaggttgggccatgcagggcagataaaggattttaaactttatccctagagcaggaaggctttgtcttcagtaaaatggatgcctgataacgtcacctttcggtgcttgccggagctccatttcatcagggaacctattaagagtaaaaatagggactcatttggatttttaaacttttttttttagaatcaggatctcacgatttttcccaggctggtcttgaactcctggcctcaggtgatcctactgcctgggcctcataaagtgctgagattccaggcatgagccatcgtgcctggcctgtttgtttgttttaaacatgaacttattttaatgtgtcacaaattttgtaactatctgacacttagttcacatttcaccatattgtttgtggccattttgattctttgattttcatttaattgcattgagtataatagcagcaaagtctatcttcttactgtttgttcctgttccaagcacctcccaaagaggagtaaaccaacatattttattatctctgtaatccagaaaattattgcataaggacatgtacacatttagtttggaactccagggcaaattagtatatttcctgggtttattttcttataaataatgaccaatatttcataaatattcatttaccactggtcatttaaaaagtggaattgcagtaaagttttaattggtaaagtgtaacgtgcttgtgtgtggaaaggcagcaacagacttggagacttgagcttctaaaagtttcattagtactctaagggctttatcttagggaaagaattggtcctttttctgtaaaaataaaaatgctgttcagtattggttccccccgccccaccgcccactttccccaaagaaaataaaactttgctgcttaatcagggttccagatgtctgtatgtatttatttattcagatatttatagtgttctctgtcaaacagtttgcctccctgggtgcattccagcaatgttaaaaacatacatggcaaagccacagagatcaaagacctgtgtcttgtgaaccctttgcaacatttgggccagtctctaaaatgatttatattaaaacaaccaaataagcactcttcctgtccacatcgtgctttaaggagtgttctggatggggcctgaagaacccgtgcaaattggagttcccccccatctttcgaatgagggacaccaccaggaaagcttcctgtggggctgcatttgacccgcaggtgcctctcccatttcctgtatttccacattttatttttgttttcattatttcttcctttaaaatatgggagttaacgattttacccccccttaaatattctaccatgtagaattttagactgtccattaaaaatatgggtttcattttctatattattttcaaaatatgcagtatctaccatctaaatgggaaacagcaagacttttttgtagtgacaaattaatgccactgtgactaatatctctgaaagggaagtgcctgtagcagctgaggcctgtgagctggagcaggacaaagcatagatgttgtgctctgagtaagaaagtctcaatacacgtggccttcctggtgagagctcttacttgagtgttttaaagaccagtgatctggcttagtccatcattggaaagtgttatgaaagcggccaatagacattttcctacttccactgcttgttgcagatcttctcttctggctgggagctggggtggatccggtaggggacagagcagataggtgtgtgaagtgacaaccttgaaaagaacctggccctatctacctttatgcctaccatctgtgatttgccagagttctctgcagagcaaaccatgtaaagtaaaatgttgcataaacctgctactctatccctggcccaactctgggtgtcaagaagtatgctgtgctttctgcacgaatgtgatgaatgtgggaacctttttgagatagcagcacatgctggcagtggcgagccgtgtgcgcctgggcaggctgggcgttcggcaggcatgttcccaggcacttcctagggacttgttgcatcatcaggtgtttgattctccaccccgtccttccccagcgtgtccaccacccttaggtgagagagtagaaaggagttccactcaaactaggagaattgatgtgtggctgtggaatttcctgtctttccgagttagcatgctatttgtagaggaaccttttggcttccatttgagactggatctcctttgtggaattcatccgtaactttaagagtataacttaggctcctgtcactactagttcatgctgggaataccctcagaaaggctactgtcagtccaaaccaaagttacccagatgcttctctttcttttttcaaagttgagatctggccgggtacggtggctcacgcctgtaatcttagcactttgggaggccaaggtgggtggatcacttgaggtcaggagtttgagaccagcctgggtaacatagtgagacactgtctcttcaaaaagtacaaaaattacccaggcgtggtggtgcatgcctgtagtcccagctacttgggaggctaagcccagaagacggaggttgcagtgagccgagattgcaccactatactcactttttgagacgggagtgaaaacccccgtctcaaaacactaaataaataaaataaaaataaatttgagatctttccccacaatgaaagccttgctgtcccttaaatattaataacattaattactgttctacttaattttatattaaattatatccaaaaaatcatgatttgctaacatttttaaaaactgtgttttaattttgctagatgtagtttaaaacctagattgaaatttaactagagattgaaactggaattctttcagtcctaatgactagctgtggtgtatttttaaaataatatttctatagtttatgagataagtaatagtttcatgttgctatttacaaacatatctcctacaattacatacagtaggtagtttttatgcctaatgatttaaattacataagtgaaaagtcaaactgagaatatttgtcaaaatattttctcttattaatatgggtgtttagaatgtgagcaacatctttaatataggaattatgggccaggtgcagtggcttatgcctataatcccagcacttctggaggcagagacaggtggatcgcttgagctcaggaattcaagaccagcttggtcaacatggcaagaccctgtctctacaaaaaaatacaaaaattagctgggcatgatggtatgtgcttgtagtcccagctacttgggaggctgaggtgggaggatcacttgagcccgagaggtcaaggctacagtgagctgtgattgcacagctatactccagcctggccaacagagcaagaccctctcaaaaaaaaaaaaaaaagaattatggacattattatattttacctgatcgtgaaatgtagagtgttcactgaaaactttagtttcacggaaaactttagttgagtttgcaaaattacaatttttatgcctctgtaactttttctgattttgatatcattattcacttttacgagtctaaattaaatatgagcaaaactagaaaccatttaaaatggtgggattctcaagctcgtgctggtgtctcttgcagatagctaaatggtagatgaaatagtgaatgaattgtgagtctctgatttggtctctcctacccaccatcaaggcttatccagagattttcaaatagcttttgcgtaagggagacaataattaagctaattattttccttactgccttatgaaaatataaattaaaacagatgtcacttgctgtcttccatggcatgaacctctgtggacaggagactctacactagactagtaatttagggtctgtttttccccccaagttcagacttaatcagatcagttgcagataccctgaaagtgaggccccaagctcctgggtgtcatcgctgcttggtgatcctctgggcatttggtactgccctcttgcactcctcttcccacctcccaggacccccacttcccctgagcatcatttccttctctatggctcttgtccttatttatttatttatttaaatttttttgagacagagtcttgctctgtcacccaggctggagtgcagtggtgtgatcttggctcactgcaacctccgcctcttgggttcaagtgattctcctgcctcagcctcccaagtagctgggattacaggtgtgtgccacctcctccggctagcttttgtatttttgtagagatagagttttgccctgttgtccaggctgatctcgaactcctgagctcaactgatctgcctacctcggcctctcttgttttcatttaaatggctcctgggatcacatttccttcactacatattcttagaacacttttctagaatagtctgcagcattttccttctttaaactcaagactcgcccttctccacttcccttgatcccgttatgtatttatctttacttttcattgctagaaacacatcccctggaagtatagagaatgtttgtacgtcactgtcttcttccatttagatcctctatcctctctttttaaaaaataacatatatattttttggcatttccccctcctccttttggccttcggttctcagtgtatacaagctcacagagggctaggatggttactgcctctgaatgaccattattcatgcatctgagcattggtaactgacctaggaacaatcagcttctgatgggctcctcttgaaattgtagcgcatggaaggctttagtgaatatcattgtgttgacttagccatgtcacccagtggggtggcatttcattcatattcatcatttacatcttaacctgaacgtgtttggcttgggcaggaaagtggggatcaagaatattgattgtgtaaaatatttttcagaaaggtcaattgctatggcgttttctaagggtcacccaatgctttgcagagtaaaatgcttacccacatcctcttcattctccttttcttctctgcataaggtggctcttgtgtcccttcagcacccttctctgccaccacaggcaggctcttcctttgccattcctcccctcagatgtcgctgttgttgttcttcgctttgctctccttatcctacaaggagagttctcctttgttggaggtgggaggggactctggtctccagaagtgctgttactgtctcatctctctcaccagttggtgacagaggggctaccacagcaggtacctcctctgtgacccaggcaaattgggtgctgagtgtccacgtcgagctgaatgctctgatggtgtctccaggaatggatgcatgtgatggatagactggatgctgagagaaggatggctggaaagtttttttaaaaaaatgtttttagggactgggtgtggtggctcatacctgtaatcccacctttttgggaggtcagggcaggcagatcaattgaggccaggagtttgagaccagcctggccaacatggtgaaaccccatctatactgaaaatacaaaaattagccaggtgtggtggtgcacgcctgtaatcccagctactcgggaggccgaggtgggagaattgcttgaacccaggaggcggaggttgcagtgagccgagactgtgcccctgcactccagcctgggtgacagagcaagattctgtctccaaaaaaaaaaaaaaaaaaaaaagttttaaaatcatagtaaaatgcacctaacgtaagatttgccatgttaatcattttaagtactctatatagtttggtgacgttaagtacatttgcattattgtgcagctgtcaccatcctccatctcctgaacttatccatcttcccaaactgaaacccaggacccattaaacactaactccccaccaccccttctctccaccccctggcattcacccttctactttctgtctctgagtttgactgttctacatgctggacataactggaatcaaacagtctttttccttttctgagaggcttattttatttcgtgtaatgtccttatggttcatctatgttgtagaatggcccagaatctccttccatcttaaagctgaataatattgcatggtgtgtatatacagtcagccagcctctgtatctgtgggtgctcagattcaaccaactgagaatggaaaatatttggaaaaacaatccaataaaaaattataataccacaacaaaaaaataatgtattacaaatacatagcacttacattgtatttaggcattataagtaatctagggatgatttaaaattaaatgggagggccaggcgcggtggcttacacttgtaatcccagcatttcgggaggctgaggtgggtggatcaacttgaggccaggagttcgagaccagcctgaccaacatggtgaaaccctgtctctactaaaaatacaaaaattagccgggcttggcagtgcatgcctataattccagctactcgagaggctgaggcaggagaatcacttgaacccaggaggcggaagttgcagtgagccgagatcacgccactacactccagtcttggcgacacagtgagactctgtctcaaaaagtaaacaaataaaaaataaaattatattggaggatgtctgtatgttatatgcaaatggacttgagcatttgcagatattggtattggtgggaggtcctggaaccaatcccacacagatagagagggacaaccaactgtaccatctttcgtttatccattcatttgttattgatgtcttgggttgcttctgcgctttgactattgtgcatagtgctgctgtgaacatgagtgtgcgcatatctcttttagacccccgtagtctcttctgttgtgtatatatgtagaggtggaattgctggatcatgcggtaattgtgtgtttcataatttggggacctgtcatattttttttttcattgcacctggaccatttttatgatcccccaactatatacaagaattctaattccttcacatccctgccaacacttggtattttctggttttatgatagtagccatgctcctgggtgtaaggtagtgacttcctttattttcttaaatcaatgaatcctacaaggcagctttgagttgttaattgtggggagtgccaggtcgcctgacatctttgggcaactctttttcttttctcttctttttttttgagacagtcttgctctgttgcccaggcaggagtgcagtggtgcgatctcggctcactgtagcctccgcctctggggttcaggcaattcttctgcctcagcctcccgaatagctgggattatagtcgtgcaccaccaagcccagctaattttttatatttttagtagagacggggtttcaccatgttggccaggctgctctcaaattcctgacgtcaggtgatctgcccacctcagcctccaaaagtgttaggattacaggcgtgagccactgcgcctggctgggcaactcttccctgaaaacaaggcgcccatgtgatggagcctgtgcgggtttttgttgtgcgtcccctcttgtcgcctttccttggcatgcttcccctttttttaatcctacacttgaaaattagatcaaacacaaactgtgtttagatttatttacagtttcttaactcctttcctgtttgccttttgacaggcttggcataagaagtctttttcaagtagtaaattaatttaggtggcacgcaccccacctgagttttgttacatgctggcagtttagataaatggatattataatctcagcacatttctgcccaacaccactgcacagatttgcaagagtctacaaaagtgataatattctgtcagtttggagcctagaaaaagaagaagaaggagaaaaaaaagcattttcttgttcgtatttctaggatgcctgtggggaagccggaaatgccatatagcagtttacatggctaaatacacatgaaaaaagataagggacccaaagatgtttctttgtaggcacacgggagaagagtcagttcaaattggtaattgtcagctgtgtttggagatacattctccatcgcaaccaaagatttttctttttcccccttaaactcaccatttccttgaagaatgcagtctatttttaatgactttattgatttgacgattgggttacaatgtactttatttactgcagaaatgtttcgttcctgtcagcacttaatgcgaataaatctactttttggcaccactttgatagactgtaaaactgcttatatttgcaggaaaatttgttttgccacggtatgtttatgtcagactcagtgtgactttttctcccctcaaaatcattttatatcatagtgtagctgacaaataaatacacacagtgcagtaatcattgtgtactgtcagagcagcagaaaacaaaatgtgggttttatgacagggatcaaaaaagagatttaatattcacaattaaagccacttatttaatgctttctgtttttgcttctgtattaaggctttccagtttttggttcatagtttgtatatctcttaaaaatagtaaatatacagtaaaccctacattcactgatattgtctgcatgtgaatttaatatttattatccaagaagacccaataaaagtcgatctttatttcctattgttcaaggtataagcaaagtcaaaatacatttgcaatacgataagttttctgttaagtttctttcttttcttttttttttttttttaagatggagttttgctcttgttgcccaggctggagtgcaatggtgtgatctcggctcactgcaacctccactccccaggttcaagcgattcttctgcctcagcctcccaagtagctgggattattggcgtgtgccactgcactcaaataagttttgtatttttagtggagagagggtttcaccacgttggccaggctggtctccaactcctgacctcaggtgatccacccgccttggcctcgcaaagtgctggaattacaggtgtgagccactgcgcctggcctgttttctgttaagattcttaagtttttcttgaaagcaatgtcatgtaatatatagctttgctctattataataaatttaatttgggaaggaagctgaatcatctttaaaaattttttttcatgaaacatttttcttctacaaatgttttctagtacgtattttttcttaaataagagaaatactatccattttagttatattatacatttttgttttacttatttttcataggatagcaggatataatattggcaaattgaatatcatcaaatagcctacaaccttagtcctgaatcagtactatgccacaagagaatttggaatatccacaacatgtccattatatttgcagtccatctgaaaaaataatacacaaagaccaacaaatggataacttcctgtacaaatgaacacatcagaaatatcattatgtttattgctttagctacctttatgctttaatatgattggcaattatccagtaaacttgtgccaggtaaaaataagcacccatctgggttattcaatttcaatgaacatgtaaaataatattttaataattacgcaatatttgtttttttaaatttacttttgaatgcatttaacaaactggctaggagtcctttaaagagaggtaaatgcaatcgtcaacagcatctgcaagctaaccccaaagaacccattttcagccaacttcgtgatctctcattcagattcaaatctacaatgaagtgccaaaatcatgcttttaaaaaatgacagcattagtgaaactttggaggtgcttatattgctagtgtaggcaaaaacgcacagcaatacagagctaggccgttttccttgattctttcaccataggaagaaatgaacttccagggaggtaatggagtccttctgagaaccatgattaaaagtctttgggaattatcagccaaacttaaaatggatctctaggttttcatggggagttgtgttaaaaagggactttttaatttaaaggaaccaagttgataaggtaggttcagggaaccaaaaatgttgaacagatttttgctggattgacaacttgtacggatggtgggtttttagggtggttaatcgtctgcgtctagggaaatggccacagcttgcctctccttcggggtgaaaggtaggttctgagtctgtgatttttccctgctcagagtgaataaatattgtaagtaggtgtggtcagctgtccagctctttactttttcagttgggaaggaaagagttgcacagctatgatgttcagagccaacaaggacttgcagacgccctgtgcataggagcagctgaacacattcagaatcatgtaattgagcaggctgctaagtaatggagaaaagaatatcatgcacagagatttgatgtctttttatgggagaacaaaagagtttcgattctttcacattgagtttagcctagccattgtgtggcacaggaggtttaatgaatcattgtttaactaggatcctgccaagtatttgaccattaaatagactccaatgtgtatagagttcttctctgacagactcttatttgactgtgattaattggcatcgaattgttatttaattacctccacagaaatctaagaacagtgtgtattctgattaagttatttgatgtaggaacaggcatggggctggagaggtcagctcagccctcaggactccctgctactaccaaggccaacttctgtggctgcccaaagctcacagaagatccctgaggatcaaaaattcagacagaatctggattttacctttttcttagaatataaaaaatgttttggcaactcatagcataaatttgtaaagctttttttttgcatgttgaaatcctttgaagttatttattggactgtgttaaacatgttcagtgacagttattgaggtttccttcagttcacaattgaaacatgttacgcattcccatacatggagaagaggtcagccagcaggatgcatggcacagtaggagtaaggcagaagaaagtcaatgattgcacagtctggtttgggagtcactatccttagagaatggcaccacaagggcatgagatcaccactgaggggatagagttctgagaggtggagcctctagatgcaaggggagaccacctgtgcttagcagatgggcagggtagcaggagtggaaagaggcagatattaaaagaaagaaaatcaggccaggcacggtggctcacacctgtaatcccagcactttgggaggccaaagcgggtggatcacttgaggccaggagttcgagaccagcctggccaacatggagaaacctcgtctctaaaaatacaaaaattagctgggcatggtggcacacacctgccagctacttgagaggctgaggcaggagaatcgcttgaacccaggaggcggaggttgcagtgagccaagatcgggctactgcactccagcctgggcaacagagagagactctgtctcaaaaaataaaataaaataaatttatatccctgaagccagcatacataaatatctcgaaaagacgatgatgaacagcatcagatgctgcaggaaaagtcaagagcaatgaggatgagggaaaagctggctgctgcgtttagaaatgactggtgaacgccatggtgtgaagaggagcaggaatgggactgcagagggttgtggggcgtttggataggtgaacattccccctaagatgaagatgatggtttgactaagaggtaatgtgtatcttaaactgtttataactgacagcttaggtagaattataagaatcatagtaatatttctagttcttaaaattttatctgaatttttaaagaagaaattcaatggttaaatttcccccctagctttttaatggtgtacttaaatatatatatatatttggtgtacttaaatatatataaatatatatatttggtgtacttaaatatatataaatatatatggtgtacttaaatatatataaatatatatatttggtgtacttaaatatatatatattttggaatatatatatatatatatatatatatatatatattccaaaaaaagttcatgcatttttattgaacacaacctagcacacagtttggtgtaacacctgttggcggttcccagatattaaaatgatgcgccggggatggaactgacgatcacatttgggtgttggttgatctgtttccagcacacctttggttgctttacatagggtgggtagtgggagggcccattgtcttcaagttcagtcacgttctcacactgaatgttttgctgtcctatttttgagtattacatatacttgtatgtggattagagatagagccgattttgcacactgactggtaatttccattcaaggtaatctcagtgattgaatttgatagttgcctttgtggaagtggaaattccttgtctaggtgaatgctgtataaatatgcgttgctgccaccatctctgtgggaacacattcttgtagaccgcttggtatgtctaggcccttgtttttacccctccaatagtcattcttttggagatattccatgagcatttagccgcaaacgacagtgacaggatactggagcagtaaaaactatgtcttagggattaaagtggtacattcccagaagaggtcaagagattggtgatttcttactctcttagaatcagaggttcttaatgagagctctgctgtcctgtggttcctggtttaggaatcccctgaaatcatatgcaaactgtacacatgtgcatttccaagcgaaaacactctgtggcattcattggccatgcagtgtttgagagcagtcgtcctagagattctacctgttgctgtccagggatctgtaccttctggatgctacgtgaggctgggccaggttcactcctccctggtgtattcttgagatccatgggtaaaggaaatggcctggtctgtcttcctaacttttttctttttagcaaatgtaaaataatcatcacttgctgtagcaaagcatgcatagctgctatagcaaaatggtttcccgaggcaatttatcaggtgttttcaatggcttcaaggataatcccctacaatacttcctggcaatgagtgattcggctttgccctgggtcacacagcatgttaaggtctgggatgaggtagaactggagcccctggactttcctaattaattctgccttttattaggctgcatgtcctcattcattcattcattcattcattcatttatttacttgttacaagttatggcctcctgtaacttgcgtaatttaatcctgaggtggagttattttaaatgttttactttaattatgattagccaagagagagttcctgaaacccttctaagcaggagtgatagccaaagtatttaccatccagtacagcaggcagtagcctatcagaagaggcctgggctgtcagcggctgctttggccatcgtcatttgtgtcagccctgcctggaaatttattggctaatttttattagtagacatttaatagaacttgcaaatgtgtccagtaaagtagcttgatgtcatggaggtgttgacatgagcacacctttctgaacctccaggagctgggtatgagtcacagcctggatgcctgacagccaggcatcctggaattaatttcttactgtctctgagcctccactgtatcttctgtaaaatgggaacagtatctgtgtcatagttttgaggtgctgtatgtggtttctggcactaatttagtgctctgtggggtggtcttcaaacacagtgttgagttcactcttctaggtttgtgtgcctcatttggtgccttaagaaaatggtctgggttaggatgtacctttatattattattatttttttattttattttattttttttttgagatcaagtctcactctgtcacccagcctggagtacagtggtgtgatttcggctcactgcagcttccgcctcccaggttcaggcaattctgcctcagcctcacgagtagccgggactacaggcacacaccaccatgtctggctttttttttttttttttttttcgtttttagtagagacagggtttcaccatgttggccaggtgggtctcgaattcctggcctcaggtgatccccccacctctgcctcccaaagtgctggaattacaggcatgagccactgtgcccagcctttttttttttttttttttttttaagaaagggggcatttcttgctcccttgcccagtctggagtgcattagcgtgatcatagctcactgcatcatcaaactcctgggctcaaacagtcctctccccttggtttctccaagtgctgggattgcaggcttgagccaccatgcctggcagcagtgggatgacatctccaatcatgagtgaatgaaccaagatgaccctcaggaaaaaatcttgtccagttgcctgctctcagtgaggaaggcaccgggatgagttagtgtgggctctgtctgtgcacacacaggcagaagccgagtcaatctcttggctatcttctgtggactactttctccagccaaagtcaaatgtgtaaaacgtccatctctccaaactgcacttgtgcccctcctaaatgcttcctctttacaaatatggctttgaagagccataagtacaaggaatttttagcagaggccctcaacacctgatccttttccactcccattccacacccaagtcctctcctatcagcacaccttaggtcatgctcttcccatcaactaggcaaatatttgtcatcccgtcaccctttcctgcctctcagtcctgatggatgtcattccttccacctgatcaaagtccacattcttcatcaatacattctcttccctctttccaaattctcaggccctgttcccatgagggctgaccccgcctcaccctggtaacccgcaccagctggtgatgcccccctgctgttgtgccttcctcattgccgcctgccttgggcatggtccgtgctttcttatttctgccacctgcgtgtgtgctcatgtcgggttgtgtcactctacatgctgtgctcacttacatgtatctattaacctgctaccagtgtgatcataagacactcagagagggctgggtgtggtggctcatgcctgtaatcccagcactttggaggctgaggtgggcaggtcacctgaggtcaggagtttgagaccagcccagccaacatggtgaaaccccgtctctactaaaaatacaaaaatttgctgggtgtggcggtgcacgtctgtattcccagctacttgagaggctgagcgggagaattgcttggatctgggaagtggaggttgcggtgagccgagatcgtgctagtgtgcttcagcctgggcaacagagtgagacttcgtcccccgcaaaaaaacaaaaaacactccagagcgacatcaaacaagcatcaattttaagtcatgaaacaagtaaaattttaattccaattagcaggttctgatgagtgattataggtgtcttacctgatgggtgagcagcaggaaaggaatgagtccaaagtaggagattattgttacccagaggaaggaaaacttgaagctggatgtggaaaacagatgatgaggttgccttttgccttgaagccatttgggtttttataagtcacttagtgtagacagtctcacctagcatcttccagttggggaaaaaaatgagaaggatctgattagaaaatggaagaacacatacatacttttgaaactcattttctccaatttgtcatgtcatgtaataaaacctggaaattactttttcaaaaatatgtcataattatatgaaaaggcaagaaacaactacactttgaaaacacaacacagtcctgggactacaggcatgtgcctccatgcccggctaagttttgtatttttggtagagtcggggttagcttccctagctgcggagggtttctgagaaaagcagcacagttatccgtagccggtccagtataaaggcactcgcattagtggcaggttcctgagagctacatttgtcagcaagagtttcatggaggagaaagggcgaaggctgagatcctggtaggtggaggcaagcagggactgaggaccttcatgacaggtggatggaagagagggaaggccccctgatgggaacagggacacacggccaggaggaatggaggggaggttaggaagagacctctcttctacctcttctttcctcactgtttctaaaaacttaatagctttgatttgacagatgaataaataaggatgtaaatgaggttattttaaatgaaaagtaaagacatgctggtaattatgtaaaataaagataagtcaaaaattacttacaagttttcatgctgtatgtttaggcatagatctaaggtagggtttgagaagttaggcgtgggttgttgtgggtcaatttcaaaggattctgtttagtttatttagatacgcgtaagatgttttgtaggataactgagtgtctgagtaagccctgggctgggagatcaggagtacagataagatttgggatgtataagcaaacaggaaatctttgaaatgaaagtgagcaaagttcgagaagagaatcagaaaaaggaaaaaatggtcaacagatttatccttagaaaaaaataagatgaagcaaaggatattgaaggaagttgccctgaagagtggggtttctcattcctcttctctctgccttatggaaatcccagaatggcttggcagagagttcccaccgcattagaaaacactgcatcaccttgagcaagattggcttttgtcttcacatctctaacatgaggagtttggtctacaaagtgctgtgaacatttctgttgcctgcagaaacctttcttcagaggcaatctctatgtgaaggtcccaatggatgtaaggccctatgtttgagaggggaagggcagagaagggaggagatgaggtgtctggggttgggtgtgcttggcctcctcttcatcctctgtctcattctttaagattcttcaaggcagtctcagaatcttcataagacaaggtttgaggctgggcgctgtgactcatgcctgtattcccagcactttgggaggcagaggtgagcagattgcttgagcctcaagagtttgagaccaacctgggcaacatggcaaaacctcatctctacaaaaaaatttaaaaattagccaggcatggtggtgcaccagaggtcccagctacttgggaggctgaggcaggaggatcagttgagcccagggaggtcaaggctccagtgagccttgacctgggcaacagagtgagaccttttctcaaaaaaaaaaaaacaaaaaaaaaccccataaagtttgaatgttatcagccctggggatccttcgcacccatttaagctctataatcctacaataataatacaaagaatgtctcacccatgtgagctactctagaatttagaagatcccttcataatcatgatctctttgatcctcatgatctttggccctgtgaagtagtccaggcaaatatcatcagctccattttataggtcaggaatttgagtgtcagtataggttgggtgagttgccctgtattgttgagtcctgttgctactgagcctccgaggaggataagtacctcatgtcttgtccctgcctcattttctctttcatgccttctgtgagcctctgccatgttgatggcctgttctgatgagatatactgaaatactggacttctagatctcctgtttggttctcattttggtctaagctgagtgatacaggatgtccaggctggcccatcccctcaaatggcttcctcccctcccagatcacagtgtcatagatgctgtcatccttttcagcccagcaactgtctccaggctccacccaacagcctgtactctggaccagtctgtgccccgccatgtggcaccacattgtacctggagtgcacaggtcaattctctcgacaccatttgatagactctgctctttgggacagactgcttgcatttacattctacttctcacatctcaagatagtggttcccccatcctacctttgccctttgcacactccacctaccatcaactatgggtacctgagggtccaccctctctctgtacttctggcttccaattctctgcaggaatatctaaggccaattctttttttttttttttttttttgacggagtctcgttctgtcgcccagcctggagtgcagtagcatccatcatcttggctcacggcaacctccgcctcccaagctcaagcaattctctgcctcagcttcccatgtacctgggattaaaggcgcccaccaccacgcccacctaagtattttgtagttttagtagagacagggtttcaccatcttggccaggccggtcttgaactcctgacctcgtgacccacctgcctcagcctcccaaagtgctgggattataggcatgagccaccgcgcctggctcaaaggccaattcttatcaaaagtattagttttcagaaccatcagtgaagctataagtgtggatacctataaagaagtttacaaaattgaagagttcactaaacacatctacttttaccttcaaggtcagatgtggcatgacctaatggggtctttcttgttgatacctaagaccatttttgtggtacagaatgggcttaccaggaaggaatgagtggcacatgctacatcatgggtgaacctcaaaatcttgagatacgggaaggaagccagacacaagagatcacatattgtgtgattccttttccatgaaagatactgaaaaagcaaagaggcagaaagtagttgcttgaggctggggtgggcatagggaggcactgtgagtgccatgagggatcttagtgggggcataaaaatgtcttgaaacttatttttggtaatgactgcatcactcagtaaagttactaaaattcattgaattggatacctgaaatggatgagttttatgagacgtaaaatatgtatcaatgcaaatatgcctcaatattttcatatttaagtgtacttttttgttacaaaaaagaatggggctcacagtagacatgggaacttacaagttttaaattgtagtacggttataagggaattgggaagtcttcgtcatgggagacgtatcagaattccggaggtgactttaacttcagattagattctagaatcagtttgtaaaatagagtcatttatgaatttgtattttgacaaaaagttcattaacaccttttataatattctatgttgtggaaaaaagttaggagcaacctgactctgtatgtgatattatgacttcaaaggagcttggtttctctctctctctctctcagaggaaaattttagtgtgctcataacttaatatagacccttttcagacatttcggttgtttcctgcttctgatttaccaaataatgccacattgaccatctttgatgcacttattaatgccttgagatacttcttataaaattgaattttggggtccgtggggatgcactcaatagttgtttattgtccagctcccaaaaatctacctgtgccatcatgcaggattggagtgatgtggatttacattaaatgtgagtccaaaatgtggtctggctcaaagaatttactgtgattgtgggcttagtcatgggatatatcctgaccctgagatatgcagataatacctagggtatttattttaatcctggctaccaggcattcagagaggctggctacctgactatgtgctgaggcaatggccaacatgggaccctgtgtgttatgagagataattgaggtacccaagggataggtgcctgtgagaagtctggaaaacttgtgattaactttcttcaagtagttgaagagctgccctgtcaagagaaattcgattcactttgtatggttgtaagggcagaatcagcagcaacgattggatgttcccggaaggcaagattcggtttaatgtaagcaagccttgtctaacagaacagtccgaaaatagattgggtctcctcaggaaacagtgactcctcttctctcgacatccctggagatgctccagcaggggccagatgtcatttggatgaagaggtgtggcatgtgcatggagggaatttatcataagtgtttgatttggagacctctgggaaaatgactgtgagactgtgaacttgacatcacagctctgattatgacagtttactgcgaagccagatgaaaatattctggccgggtgctatggctcacacctgtaatcccagcactttgggaggctgaggtgggtggatcacctgaggtcagaagcttgagaccagcctgaccaacgtggtgaaaccccgtctctactaaaaatacagaaattagctggtcatggtggcatgtgcctgtaatctcagctacgcgggaggctgaggcaggagaatcacttgaacccaggagacagaggttgcagtgagctgagatctcctccagcctgggcaacagagtgagactccatctcaaaaaaaaaaaaaattaaaacttttattctttttgcaaacaccagtctttgaattgtttcttagaacaaggaagtaactattgaaccttctaatcttatactttctacactgagatcattgttgataagagttttgatttcagctgatctttgacattcagttcagttattggcgtagctgtgtgaggaggtgggctttctcagttgtttttgttttccttgtattttatgctgttttccaaccatgggtctttcagattttaagatgctcccaaatggtcaagataaagggttggttttcacatactaatgatttatgtagcctttttatctttttttcttcttttcttttttgtagagatgaggtctcgctatgttgctcaggctggtcttgaactcttgagctcaagcaatgctcccacctctgccttcagaagtactgggattataggtgtgagccccatacctggcctatcttttttttttttttaatttgaatattgctttcaactttttaaaagctgaaccatacttgcaatgtttctgaatattgcctatgttaacttttccacttaagaaataattcatattttaataattatgtcttaaattttttaacttatattttccttttattggtattgatacactgagatgagaaaaaataacaagaaggacgacaaacaaaatccataagtatctgtcggaaaaatactcatttaattttaatgtttcttaagtatagctgataaaataatagcctgacctcttgccctgcatagcatggtctggcaaacagcagaagggcccccggaagctggttggaaattcaggctccagctcctccccagggccactgcatcaggacctgcatttgaaaagttgagcttcctccccggtggcatgctgcagaacctgtgggtcatagtcatcatcgcacctttttggttttggttttctagcagccatgaaaaagtacctggcgttgtgcctgggcttttttttttttttttaacaggcatgagcccgtttaatccctaggacaaccctctagaggaggtgttattagaggctcagaaaagttgtcactgggcctgccaaaggtgtcactgaatgatgctttctggagtctgtgtgtccgaagcctgagacaagaaaattgaggtgcagctccaacttgtacacactgtgcttcttggccagctggatgcctcaggagaactgcagaggctgcattagccccagcagcgggaggcagctccgtctacagcctctgaccattcatggtccacttgcagcctggtataaaggccccaggacgaagtcaatcctgacaaaccctaggaggccacacatctcatctgtaagcagggcttccggaagcgttgattagaaaagaagttcagaggcctagacacacacacttctcaggggtcacctgcatccacgtaggctatgtgtgtatagcttccatttttttgaaggaaatcatttgaaagaatagatatttattagaaaccaggtttgatctgtttgtgatgcctttatgacatactgttttcttggattctacttgacgggaaataaagtcgatgctaagcagtgatcttcagtcattaaataatatttctgttttcctgcataatttcctcttgtgttcttagataagactaagcctgtttttgtcatactgtttgcacatctgaaaatgacaacttgtttgccagtagtaaactcacagcctggaaaatgataggatcccaagtttccccaaaaatgtgaggtacagtcaagcaggctggggaaaaaaaaatacagaggttatcattatgtttatataaaaaatataccacttagcaaaagaaattctgataaagcaaaattagtgaaataattaggatcaatttctgtacgttcatctacctactttgcacttggatggaagtcctagattgggtcttaaaaggagggaacattctagaacccaccaacccttcctgatactgtcacaagatttttttcccttaattcttttaaaatcagggccacatttcaactccctgcccgctgccatttgatgatatttttgtttctctttaggtatcgtcctattttctttttctttaccactgacatcggcttatttcatatgaataatatattaaatacatatgcatttaaaatattgttttgatttgtttgcgaattgtttctcttaaagggtctatctggggaaatgagtaatttttcatatcctgttcttgcaggaagaattttaaatcgtttctccaaagacattggacacttggatgatttgctgccgctgacgtttttagatttcatccaggtaacgttgagagtaatgtcaggatctcaaatggaaaacggaagttcctattttttcaagcccttttcatggggtctgggggtgggactctcggcctggctgtgtgtaatgttaacttaataaagggccatgtttgtaaaagaaaggtgcggttataactcagaggctaagttggcatgagtaataccttgtgtgtgggagtggctatacagtcgcgtcagggttagtttgaagcagcttcgtgcttggtaagtggctctccgtctgcctctaggtatctggcgtggattttgctttactgtgaacacatttcataatacagaaacaatcacctctcacggaaagatagcctagattaactaaattatgcattgtattaccacaaagggcaaatacttaggcactttttttttttttttggatagaaccaggtgtggttacttacaaagaaaagattagtaataataaggtgaaaataatactttattaacaaggacaatagagagcagttattgcggatacaaagcctttaaaggcaaggatatctaagccaatttgagtacaggatcaaagtcaactcagaaaatgtcttttttgttttcacacgttgattgctctaagtcttaagctgtctttaaaaaaaaaaaaaccaacaatcctacagaaataccttctgtaaaacttttcttttgtttgtgaacttgaggctctaaaaaataatattgggtcatctctcatctccttattcagtactgttgctcatgtggtttggttttattttattttttcctattgtttaattttgtctacttgtcagtggttcaagctggggcactttttttttcccaagtgtttattttggaaatgcatctattaaaagctatacatattccaaaatctcagctgctgttgctaacactttatgaaatttgaacctctgtgactttttctaagtgccaacttagaatagttgtaatcattagctgaatttaaagccattaaatagaaatactacagttggggtctgcaattttggcttgatcctgtgatccccctacccctgcttttttctcaatgctcagatgctttagatctcctctggagccacagttataaaggaagcaaaattacttaatttggaaaattagctatgtaagaaaaatcagtcataggcttgaaatgcttataggaattcctgtttgtcacacagcaaggcagcaaatgagcatgtgactgcaaacagtatagcccatgggcgaaggcatccactgtttatggaggtgaagtaagctgagactcacaggtggattatttttactgcaaacaaggacctctgatttttttttttcttttgcaaacatttttaaaatgtgccctcctgggtttagctatattatttatccctcagaagccatcactaaaacagttgccccgtttacatagaatgcagattattgtctgtacacgttttgacagggattgttaattacttcaagaagattttgtgaaagtttctgtttctttgcaacaggaagctaggcaaaggttgagtttccgaagctggctggcccactatgtgcttagcagagtgagcggtcgtaattagtatcccttatgtgctttgtctcacatatggagggagagggatggatgctacttgatgtcaatataaaacatttcttagaagcatgaggagggaaaattctagtctcgttgtacttctatttaaccagagagacaagggcgtttgttattatccactcacataatcttggtaaacttaatgttgtggaatcctactggccccaattagctgatttcttgaatctacagcgaaggttaaatcctaatgttattgtctccaagaaaggagttttatctaaaggataacttagttatcaattatgataaagatctattgtcacttgttttgtttgcaggtgtctttaataaggcttcccataatcccttcaggaagaaatattttctccttttaaaaatagtattagctaaatataaaagctctggtccctgccattgttgttgattctttgagggacatttcccaacattcattgtttaaatggttgtcaggaagaatcaagtgaaacgtggtaaacaatgcagtaactggttcatcttactttgtgtgccgagcctttctcccggggatttgcattcgatgagtgggcttttgactgaggtatcgccaggatcattttgaagtatttgggcctgttgctatattaggaagtgaaaatttttattaaagccacccacccaaaaaaatgcatttaacctgccctcaaataaaggccaacaaaaatctaaatgtaaattttttttttttttttaagttgcctaggcctctctgtaaggatgaaaacagcccagtgctgttctgggactcttaatggaatcatgtaaacttaaaataaacactattatggtaagcacatagaatgaaaactaattttccaaatcaaatacattatattcaattcattttccccaatcaaccaaatgtttaaaacctgttagttataacagcaatcttctggaaattaattagaagcctattagctctgctagctgagccgaatgaagggggttgctcggtacatttctaagtagtctcctgaattaaagcaaagcaaggtcaaaatgacagttagctttgttcacctcatggctttgcttaaagtcgttgatcttttaggggggaaggagggaggtgttttgttttgcaaaggaaattttgtctactttgactcagttctgtgatacatttttaaaatttatttctagagccagtggggtgagccatacaggaagcctgatgttatctgtgtggatagtagccttctccattgcatgggcatctgaaatggagttgaattttaggcctcgtctaccgcatcaattcttctacagggtttatttagcccctttcaaaattcagatagtaggaaatttcctggatgactttgtgtttaacatccttagcaaaacatgcttcggacactggggccctgggttttgtggctgtcatcaggttctatgggtaataaacatgctgctgacatcacgggccctgggttttgatggctctcgttaggttcaataggtaataatcacagtgactagcagttcctcctaagcccagagaaactcacagaaagtgaggccttctcaacccagcagctgagattgactgaaacaattgagtttaaaaaaactggaaatttctttgtcaagatgttacccttggtgttatctagctgactgatcgacaggggaactacgtatcatcagaaccaactacggatggtattcttgagccagaaagaactttggcaggatgtatagtaacaaatagaatgaagattaaaatccacagaaaagttaggtatcttcataaaaagggagttgaaattctacacttaccagaacattcagactaagactgtcgagttgttattcttactaaagctgagatttaaaatcaaatagctatagaaataaataatgtagttgcatttatccatgtgactttctttttttttttttgagatggtctcactctgttacccaggctggagtgcaatggtgcgatctcagctcactgcaacctttgccccccaggttcaaacgattttcatgcctcagcctcctgagtagctgtgattacagatgaccaccaccactctaagctaatttttgtatttttagtagagacagggttttgccatgttgctcaggctggtctcgaactcctaacctcaggtgatccacccacctcggcctcccaaagtggtgggattacaggcatgagccactgcacctggcctcatgtgacctttttaatccagagcattcatgtttgattacgttttctgtatgatggtgatcgttttattggttttgtaagtaggagtctggaactgtggaccattgggtcagaactgaactgtttccaattgagtttgccaaagactggaggggtagatctgagaggagaaccctctgcttgtggcttggtgtctagaatgtaggctctgtagaagcaagtctgaaaccatgcacagattttattactctcccgatgaaatcgctgagataaggaaattctggtttacatgtgaccagatttgctggccagatagaggcaattaacctaactttgatttttggacttcaataaaatatttgtatttgtgagttttcatttgtttttatatagttagatgttggcactcattgcagatgggaacagtgacactggtaacttaaaagtgggtgtcatttgctgtcctgtattaagggaagaaacccagaggggcagcgagggtaatgtgtcactttggaactcagattggctcaggtgtgcaacagtagtgaataaagaaaggtgaggtttttgattaggccttttggaaggaaagccagaattaagggaagtttttgaatatatcataagatataaatatatcactggaaataaataacttatagaatacaaatgaacagtctgcaagttacctcaaggttgccatgggctaatcagataatttagccaaggctggcagtgcacatctggcttataaagagttgttcaaacatgtttttcttgtctgctttttcaaaacttgtaacagctttgaacatctacaatatttctaaagccaagtcatttatgaacatagaatggctcttcacaggttaaaagtgaatatcttgttttcataaagaattgaaatacaaatagcataaagatcttcatctggaacttatgttctttgaataggaatttggcattcaaaacatagtatgtttgcgtaaatcaacaaacaaaaacatagagatgatagtcaacattcacattttaaagtgcttgattacttcctttttttctgtggttttttttttttttttctttctttttttttttctgaaacagggtcttgctctgaagcccaggctggagtgcagtggcgcagtctcagctcactgcagcctccacctcccgggctcaagcaattctcatacctcagcctcccgagtagctgggactacaagtgtgcaccaccatggccagctaagttttgtatttttagtagagatggggtttcaccattttgcccaggctggtctctaatttctgaccccaagtgatcctgctgcctcagcctcccaaagtgctgggattacagacatgaggcactgcgctgggccagaagtgcttgattacttcctaatatcagcaccaatgccagcatcatgaatctcttcttccattttcttaaaacaataattggattaataggtaccctacctgtaatatttgtattaataatatcttattagcattttaattagaaatttaatattaatgatttggaatcagtagttttcaacaattttaatagtgcaaatttatttgtagtatttgatggggagatatggtgttttgtgactatatttacaactggatgtatctgggaatatctcaaagtttctcccaaaaggaaaacatttctattacaaatatgtgacttgtgaaaataatttgtaattcttttcaatatatctcattttttttttttttttttgagacagagtcttgctctatcacccaggctggagtgcagtggggcgatcttggctcactgcaacctccgcctcctgggttcaagcaattctcctgcctccgcctcccgagtagctgagattacaggcacccaccaccacgcctgtctaatttttgtatttttagtagagatggggtttcacgatgttggccagactggtctggaactcctgacctcaagtgatctgcccgtctcggcctccaaaagtgctgggattacaggcgtgcgccatcacgcctggccaatacgtgtcattcttattacatgtcttcctttttatttttttttcccaccagctttttattgagctcctactatatgctgagtatgcagaggtggaaaagatagaggctttatcttcatccacctgagaagcatttattgagtatcttgggtgtactaggccccatgttgggcttggagatatggggctaagtgaaattgaattcccttcttctatgagtttactctattgggagggacagatagaaagcagttaccatgctgtgtgataagacttacaatagaagggatactgtaggagagaatggttaaggtctcagcacgagacaaatttccaatcctagctctttcactttaagttcaattatggcttcctccaagactggccatgcaacacctaatgctggagtgaggactcaaaccctcttctcacagtgcagccatatgttagaataaatatctaaatagatttgttttgctttgcttgcctttgatttgtggctacaaaggacatacaaagagcaaaattcaaattttctggtccttaaatctaatctctctttaacttttggaaagaaactatgtgcatgccagactgttggcacctgtgtgtgtgtgtgtgtgtgtgtgtgtgtttgcacacctgtggctcaccctcaaatgtacccttctaattcttcatcctttaaggaccagcgaaagtctctctttcgcattagtgatgcttttctttaccactccattctgtaataaaacaatctctaggtcctgtaaaaagaagggatcatataacaccaggctgagcactgctctgagcatatttcacttgccccatctcatttaaacttcactcatagtcgttgagtcaatcagtatttcttggacacctcctgtatgccaagtacttttccaggatctagagcatggagcagttaactgggtatcagcttctaggaattggcattctagtgcaggaggtcgacaataaacagaccaataaacataaataatctaagttagtataggtctagtgtgttcagcaaaggaaagtgtttgctaatgactggaccagcatagtcaaggaggaggtgacgttgagtttgaaaaataaggaaacagccgtgcaaagaagatatgggggcaggttgagggaggggcacattgtatggaggaggaacaggtgccaggtctccagaagggaacaaagtggcatttcctcaggcagagagatgccaagcatgagcagggtacctgtagtcccagctacctgggaggctgaggcaggagaatcacttgaacttgggttgtagtgagccaaaattgcaccactgcactccagcctggacgacacactctgtctcaaaataaaataaaaaaaaaaaaaagaaaatagatttaacggactcacagttccatgtggctggggaggcctcacatggtggaaggtgaaggaggagcaaaggcatgtcttacatggcggcaggcaagagaacatgttcaagggaactgctgtttataaaatcatcagatctcatgtgacttattcactatcacgagaataccacgggaaaaacccaaccccatgattcagttacctccccctgggtccctcccacaacatgtagggattatgggagctacatacagttcaagatgagatttgggtggggacacagccaaaccatatctatcactaagtctctaataatagattatttgtcatctggtgcccacccatctccctatagaaagtcatataatgctcatttaatatgagcctatgatattttagatataaacctttcagaaattgtggtactagcctttttttcttaccccctgtgtctttagaattaaaggtagacaaacttagtttcctttccccaaaattcttttagacattttgagtggtcagtaagattcccagctgtggagactactcatttaaataactttattcctggttttatgataaacctggtctcaaacccaggtaccagagaaactgtgactgttttttagatatgagcatctggaagctcaggagagagaggacactagattttcttttctttctttcttttttttgagatggggtctcgctctgtcgcccaggctggagtgcagtggtgtgatctctgctcgctgcaaactttgcctcccagcttcaagcaattctcccatctcagactcctccacagtggctgggacaacaggtgtgtactaccacgcctggctaattttattttttggtagatatttggtagatacagggtttcaccatgttggccaggctggtctcgaactcctgacctcaggtgatccactcacctcagcctcccaaagtgctgggattacaggagtgagccaccatgcccagcctatatctttatctacagtattctgatgcacctttgttcaggttgtgatatatatagctctgtggtaatactgtataaacaaggaaaaacaattaactgtggcaaaagcaaaggcacatttctatagttactgttaaaaaataactttacattaaaactttgtaacaactggtgattgtacattgtactaatattattcactggaagtgcattctttatagaaagttacataagtatactaaagagttaaatttaaatactataaacatatacagtacacagcataaatatttttgtgaaataaaaacacctcatggtttaattaaatggaatgtttctgtcacaatttatactttgaatactctagttttgttttgttttgtttttttgagaggagtttcactcttgtcaccgaagctggagtgcaatggtgccatctcggctcactgtagcttctgcctccctgttccaagtgattgtcctgcctcagcctcccgggtagctgggattacaggtgactgccactatgcctggctaatttttttatttttagtagagatggggtttcaccatgttggccaggctggtcttgaactcctgacctcaggtggtccacccatatcagcctcccaatgtgctgggattacaggcatgagccaccacgcccagcctgaatactcttaaaaactgtctgtaaaggatctgaactcccccacagccccatgtatttgattttagacaacaaagtctgggtgccttatttcatgtgtgaaagagaaatagaatctcaggtcccagactccctatgccaaagggaaagttaagcttgggaacagagtcaccagtaccatctttcttttgttcccaaacagatagccatgatttcacaaccctactatcctgtgtcactgcctcatttcctgtactccctcctttatcttaatataaaatacagatcgactgagtgtgagacaatgcacaatccacattttcttctactccctcttttcacatgtaaaatgtagatatactggggctaatcagggtctcacaagaaggtgaccatctcactgtctaccctccctccctttttcttttttttatttttttttcccttctgcttgctcttctttaaatactgaagtttacaaaactccctctagaaaaaagcatcacagatgcccctgccacattctcatctgtggctaaataaacctctaatcgattgagacctgccttagttactttttggttaaaatatacgtgtgtgtgcgtatatatgtatatatatatacgcgcacatatatacgcacacacacgcacatacccctcaagaagcaattaaaccgttgatatgtaatcttccaattaaagtagcttgatgcccatcttaaactgtaaattgaggaaaataacatttgtggctgtaatagatgatttatgtagggctctagggcagtcggagtctacattttagccagccttgtaaacttgtgtatggaattcatagttgaacctatagagagctgaacccctctaaggtctttgagcagctaagtggcagctcatcttgtaattgtaaggttaaacaaggatgtgtgatgtgtgcacatgcatctctctcctttagagacgttattcccagttgatgggctttactgaaaatcagcgaggccggtaaccggcttaccctgtgcacacgtggtggttgtcctctgagttgtgcctggttgcttcctgaaaagggtcgttttcagagttctccctgctctttgcggtcacctgaaaaaggtctttgtggcagtggatgtctcctctatcttgctgttatcatcatcatctgcatcagcatcttggggttggacagcagatcactccattccaagctatgctgttgggaggcttcccttggctttggaactcttcacttaccccattgcaattcagtgtccagcagtgctgaggccactaggcttagtcaccatacttctgcctggtggaaacctgattgtgtttcaggtttggctttgttgtatgaggttttctgttttcgggagaattgtggatggagttagtgaaaccaatagcagcactaatggagctttatgcacatttgagtgaaactgaaagttaaggtattaacttctaacttgtccttgaacctccaggggtaaatgttaaatttattctttaattttcttgctaattagtgctctagggaggatgaagaagtgaacaactactcttgttgactaatccagtggtccccaacccctgggccacagaccagtactagtctgtgtggcctgttaggaacctggccacacagcaggaggtgagcggtggacaagaaaacaaagcttgctccccatcactcacgttaccgcctgacctctgcctcctgtcagatcgtcggcggcattagattctcataggagcacgaaccctgtgaacattgtgaaatgtgcatgctagggatctagcttgcatctaccttatgagaatctaatgcctgatcatctgtcattgtctcccatcacccccagatgggaccatctagttgcaggaaaacaagctcagggatcccactgattctacattatggtgagttgtataattatttcattatatattaccacataataatagaaataaagtacacaataaatgtaatgggcttgaatcatcctgaaactacctccatcgccatccatggaaaaattgtcctccgcgaaaccagtccctggtgccaaaaaggttgaggactgtgttctaatccacttgtttgttttcaccaccttctggattcacagcaccctccactccacctgtagcacatgcctgccactgggctgcctctggcggaccccattctctgccccaatccttggcctcattatgcttcctcagagtcagttgtgattcttcctcaacgtattcatgctacttatccttgttactgtaattttgtgatggcaatacttatcatataaactgatgaaacaggaatgccacaagaaagatttgtttgacaagtcgaagccttgggaaagaaatcttcactttaaaaaattgttaacaaattatgtgtggatgagaataaatggggtggagatgagaattggaggaaaataggattgtgtgctaatagcttcacatgtgtcttaaaattcatagatgatgtattatgtgtgtgatatatacataagaaagaccatgaaaatctccaacatcagacccggacatgttttttcatgcctgtaatctcagcactttgggaggctgaggagggcagatcacttgaggtcaagagttccagactagcctgaccaatgtggcgaagccccatctttactaaaaacccaaaaattagctgggagtggtggtgcacacctgtaatcccagctacttgggaggctgaaagaattgcttgaacatgggaggtggaggttgcagtgagtcaagatcataccactgcactccagcctgggcagcagagagagactccatctcaacaacaacaacaaaaaaacccaaaccaaaaaaacctcaaaaccaactttaaggattttgtattgtgtatcccttatttccatgctggccaaatacaagttcacatcacagcagcaaagggctttgtctgttgccctgcttggggaagctggtaaggcttcctggttattcctgagccatgtaggggagaaggaggcacatatggcaggaagtgcaggagtttaggatatctacagggacactgcagtgtggaatagctgcatcaggaggtttgagacaaggcattagaggagatcagatggagagatgcagaggggccagatcacaagaaggcttgtttcttaagcacaggaatgtagagtttagacatttgggtggaaggatatggagaggaatgggagactgtcagaaagatggggttgtaccagcatcaggaaaacaagaaaggatactggtttggacaagtttctctttaggacatccaggtcagaatgccttgtgtggctaatgaaagcccttgcttctgaatagggggcccacactgcaggatagtcgatcccctcaggcatgtgtcattcacaaggctgtgtcccagtagaaggccagttaggtttgcacacctccgtgaatgctttactagatcaactgttaaagctgtcagatatcttgccaatcctgtcaaattatagttgcttgcaaaattggagctgttctcaattccaaaattaaaaggaagccagcatcatttatgtggtctgtttagggtgattctacctcaggatatcagagccatgaaaattccctttgcaagtgctcttggttctctaggaaaagcttcaggttttgtttttgttttctgtttttttgtttttgagacggagtctcgctctgtcgcccaggctggagtgcagtggcgtgatctcagctcactgcaagcactgcctcccaggttcatgccattctcctgcctcagcctcccaagtagctgggactacaggtgcatgctaccacgccaggctaatttttgtatttttagtagagacagggtttcaccgtattggcccggctggtctcgaactcctgacctcgtgatccacccacctcagcctcccaaagtgctgggattacaggcgtgagccactgcgcccggcccagcttcaggttttaaaggtgtgagtgttgagtgtgctactgtgaataagattagatgtgactgggccaggtgtggtagttcacacctgtaatcccagcactttgggaggccaaggtgggtggatcacttgaggtcaggagtttgagaccagcctggccaacatggtgaaaccccatctctactaaaaatacaaaaattagctgggcgtggtggcgggcccttgtaataccagctacttggggggctgaggcagggagaattgcttgaatccaggagacagtggttgcagtgaaccaagattgtgccattgcactccagacagggcgagactcgatctaaaaaaaaaaaaggtgtgactagatatcacttgtaagtaaataacttcaaagtataatgtaggggccaggtgtggtggtccatgcctgtaatcccagaactttgggaggccgaagtgagaggattgctcaaggtcaggagttcaaaaccagcctgggcgacatagtgagacccccttctctataaaaataataaaagactttgccagagatggtgtcttatggttgtagtcctagcaatttgggaggccgacctggaaagaactcttgaacccaggagtttgagaccagcctgagcattatggtgagaccctgtctctacaaaaaaataaaacaattagctaggtgtagtggtgcgtgcctgtagtcccagctactctggaggctgagtccggaagatcacttgagcccagaagttcgaggttgcagtgaaccacagttgtgctactgcactccagcctgagcaacagagccagacccagactcaaaagaaccaaaaaataataataaaaaatttcaagtgtagtgtaggatggaatgggagaggcttggaatcatccttcttaagtttgactcctagctctaccgcttaccttctctttcctcacaaagccacatgctacgtctctgtaaaatggagaaaattctacctattccatgagggttattgtgaggataaaatgaagtcatttcaataacattcttagcataacatctaagctcactaaataaaaggtactttttaaatactacgtatatttttaagtgggagaaatagcctgacaatgacattatgctgcattaaggtaattgtcagacagttaccagacccataagtattaggacatgagtttgtattccagatattaggtttattatccctgaaggctttaatggctattttctcttctggaaccacagtatcaaaatcagttgttttcagaataaaccagtgagcactaaatatctcataataacgtaattttcataatattgctgaaacttccttggcccttgataacattgagtgtagagtctgagttatctagacttctgctagctaaaatctttgcctctaagaagtcttcctactagaaaaaaacaaatgaaaaatgaagataagatgcagaggttggatttaggcattttaattttttctgtttaaatttgggagtgctccgagtgtgctaacttgcacacagctgcactcagcaaaatactgtaatatattgaggcacacggaattgcaaaacctttcttccctacacacccctcatctaaaaaaaaaaaaaaatcagcagcttgactgagcttaaataactgacttttcatatcctttcatggaacacaaaggactagtcctgaggctacttgagccaccaatgcaggcagcagtggagaccaccactgaatgtgccagtccctcctcccacaaacaaaacacattgactgcagctttatgaagtgaaatgcccaagaaaaagaaaatgtgaaggaggtgtcctcagtcatttcttccctaggggggtgggagggcaggatgaggggcaggagaaaaagctgctgcatctggatgtggagaacaaagccatcctaagacttgagtataataggttgggtcactcgcttttatagaagcaaaagagtggaactgccttgacttgtctcagtaccactgacccttacatttcattgtgtagagatgtcagggaaagtgtgtagaaagcacactgaacaatgactttgtcattttgagatttctgaggtttgttcaccccttcccccaactcctaccctcaaatccccattggacaaaagagatcgttagttaggtcgccttgccgtcatttgaaagatctctgttttactgagtctttcaaaagtaaactcatccattttaactgaatcacggcgttctcatgctttcaaagtcaacaaaagagttttagtcactgcatttacaaggatggactagtctgtgaaaatgccagccctagagataatgattcatgccaactgccacattaaagtggatttccttgttaatagacagggcagttgatgacatgagttactggaaatatttgccaactcttgacccctggatttctgagatcaggatgataggattcacacaggcccactctaacaattcctttaccttttcttttttaatgaaagatgcaatggttgggttttttccagtgtgatagcacatgtagaaagcagtactgtcaccattagtgtggtgacagttaatcactggggaccctcccaggcttcccaggctggcaaccagtgttccaatttttcccagcatgtgtgttccaatgataatgtttgtagtttaacaagaagctaattaagacctaaagaaaaaaattaagagtctcatttttatcaagtctggtggtattcagcagaccatagaactttccattctggcatattggatgatgtccattgcaaaacaatagtggccattcgtggtgctttctcttcttgtcattttgcatccttagtaatgataaaatggacagctattacccaggagaggaaaatggccaaatgtttacttaattgaggacctttaaattctctctatgctattcttgattgattacattcatttttgtctgtatacctactgagttttcttgataagatgaacaaaaaaaggtttggactggagaacttgcctgagttttattaaaatcttgcagtcactattttctatatggatgtatcacttccatctgatgtggggcatgggtaagtgtaatctgttctacttgtgagttttgtgactcacttgttttctttcagccctttccctgggttcattgacttagtgttctctctcatttgcgttgagtcatgaagccgatagtgccgcttgtgcatcgcagcaaagggccagccacctatgggacacgtatcaaacatggatcaggagccatttttgttctagggcacatgggctggttaccattagttctcacatttgccctttcccaccctcaatgcacctgaggagatcatctcttagcgttatggttgtgtattgatacactgcccaacctctgcctgaacatggccaaagggatgggaatgaaattctagtgtcatattttttttaccctatctatttttattgaggtatagtttatatacaataaaatcgacagttttttttaggttgaattttactaattgtgtacattccaatatccaccctctaaaacaagatgtagagcatttccatctcctcaggaagtctcctttgctcctctgcagtcaattttcacacctctacacctcttccagatttctgtcaacatcaattagttttcctgttcttgaactacgtataaatggaaccaataatttttctgtggctggattcttttgttcaccatgtttttgagttctgtgtatgtttcagtggttcatttctttgttttctttttctgagtgatatttcattgtatgatgacatcaacatttatttgtctactctctgattgatgggtatttgaattgttgccagtttttagcaatgaatgttcttatagaagtgtttatgggtacactacatatgttttcattcatctcagataaaatgcataggagtggaattgctgggttcgtaaagttcactttaaaaaccaaaaatcaaactatgacaaggatttttataatggttgtactattttacacacccagtggcaatatatgagcattctagttgctccacatcctcgccaacatttagtatgatcaatctttttgtttttattctttttagtagagtatagatgatccatttgcattgccttgatgattaatattgagctttttccatacaggctaattggccattcaagtgtcttattttctgaaatactggttcagatctcctgccagctttttaaaacgtgtttttaaaaatcttgttgattttttagtttttaatatacataagtgtatttgtatatgtttaatattaggcatttgtgaatatttcctgttttgcaaattgtggtttttaatacatttgcttatttcgtcttcactggagaactttttgcatgaaactgttcataatctcacatttgtccatttaatgtctttataatctatagtgaaatttcttcttttattcctgacactgataatttgtttctgtcaatcagtttagcttggagtttatcaattttgattttttttccagtgaattcatgtttgattttgtaattttctctgtagttggtagattttctatttcattaatttcttatattttttaagttacattgatttaatttatctttttctttagctttttaagattgaacattaatctgttggttttcatttgtttcataatatatgcatttaaagttatacttcctctaagtattgcttagctgcatccaatgattttgatatgttgtgttttcattatctacagttcagaatatttatgagttgactttttttttttttttttttttagacagtatctcactctgtcgcccaggctggagtgcagtggtgcaatctcggctcactgcaacctccacctcccaggttcaagcgattcttgtgcctcagcctgttgaatagctgggattacaggcgcacatcaccacacccagctaatttttgtatttttagtagagatggagtttcaccatgttgcccaggttggtctgaaactcctggcctcaagtgagcctcccacctcagcctctaaaagtgctgggattataggcgtgagccactgtacctggcccatgagttgactttctgaagtaatattttagtagtgagttattatggagtatataacttcatttctaaagatttagggatttttttttttaaaaaaccttactgttactgatttctaattagccttgttgtaattcgataacatattctgtaatatttctaacctttgaaatgtattgagacttctttaatggcccagtatttactttactttggtaacggtcccctgtgcatttgaaaaaaaaaaaaaaaaaaaaaaaagaatgtatattctgtagctgtggagtatagagttctaaaaatgacaggtcaagttggcttataatatctggatcttcagtatctttactgaatttttgtccactgttctgtcatttactaagagtggggtgtttttgcttggtatctctctctctctctgtatttacagtctttgttgtaagcagcatctaattaggtctggctttttaaatgctcagctgaaattctctgtcattttatgtggagtttcatccatgtacatttaatgtaattatagatacggttggttttaagtctaccatcttggtatttgtcttctgttagtctcatatgttcttttccttctttgcagtgaatagaatatatgttcttattttattttttctatcacatttttagctctactctttatgttattgtttttagtggttgctctagagtttacatatccatttaagtttattgcaatctattttcaaataatttcctaccaaatttgcaaacaatagaataatcttactattatataatttatttctgctattctttgggcttatgttgtcatattgtttacttctacatatgctataaacttcatgatatattgggtccattttgctttaaataaccaatggtcttttaaagaaatttatacatatgtatgcatgtatgtgcatacatattatagaaaattgtgttttatatttattcacatatttgtcctttccagtgctctttatttctttctgaagtctgagcttccatctggtatcattttccttaagcctgaagaacttcctttcgggctggtctgctagagaccttctcctagcttttgcccatctgagcatgtctttatttcaactttgtttttaatgatcttttcaacagatagaagattctaggttgacagttttctttttttttcctttttttggcactgtacatatatcacatcattgtcttctcccttcattgtttctgatgagaaaccatcattattatgcttgttgcactatacattatgactcttcatggctgctttttaaaacaatttcctctttgagtttttgctgtttgactatatgtgtttagtatccttcttgggattaatgagcttcaatatatgggttggtatttttatttaattttggaaaattatgagtactttatgttttgatacacttttcttttctttctcttttaactccttaacttctgggactgaaaatgatagtatgttagactgtttggtgtagctccaagatctagggtgttgcattccagtctttcagtcttttttatttttgtctttcatttggataatttgtattgctctgtctttagggtcattgattctttctcttatcccaatctgctgccagcccattgaatatgtttttttttttctttcatagagatgggatctcgctgtgttgtcctggctggtctcaaactcctaggctcaagcaatcctcctccctcctcaagcaaacctcagtgctgggattataggcatgagccactgtacctggctaaatgttgtttttttgatattcaatttttgtttatagaattttcatttgttttgctcttatacttttcatctttttatgtttattgaccaattgaatatcatttgggtaagcacctatttaagtgtcttaacaatttttctattgagtactctgggtttttgttttgtttttcttactgatttgtagaattctttatgtattctgaattgcagataccttccttctgtactaatgcttatctttttagccctgtaatattgtgttttcataaacatacttatcaatcttttcctttatggtcattgatttttgtgttctgtttaaaaaaatctgtatctatttcagtgtcttatttatttatttgttagttttccataagttactgaggtacaggtggtatttggttacatgactaagctctttagtggtgatttgagagattttggtgcacccatcacccaagcagtgtacactgcaccatatttgtagtgttttatccctcgccctcctcccactcttccccctaaacccccaaagtccattgtatcattcttatgcctttgcatcctcatagcttagctcccatgtatcagtgagaacatacaatgtttggttttccattcctgagttacttcactcagaataatagtctccagtctcatccaggtcactgcaaatgctgtcagttcattcctttctatggttgaggagtattccatcagatagatagatagatagatagatagatagatagatagatagatagatagataatctcacagtttctttatccactcattgattgatgggcatttgggttggttccatgattttgcaattgtgaatcgtgctgctataaacatgtgtgtgcaagtatcttttccaaataatgatttattttcctctgggtagatagccagtagtgggattgctggatcaaatggtagatctacttttagttctttaaggaatttccacactattttccatagcgactgtactagtttacattcccaccagcagtgtagaagagttccctgatcactgcatccatgccaacatctactgttttctgatttttttattatggccattcttgcaggagtaaggtggtatcacattgtgtttttgatttgcatttccctagtcattagtgatagtgagcattgtatatcttctttccagaattttctcttcatgtcctaagtccactttctgatgagattgtttttttcttactgatttgttctaattcattgtagactctggatattactcctttgtcaaatgtgtatagattgtgaagatttactcccactctgtgtgttgtctcttcactctgctgaatgtgccttttgcggtgcaaaagctccttagtttaattaagtccctactatttatctttgtttttattgcatttgcttttgggttcttagtcatgaaatccttgcctaaaccaatgtctagaagggtttttccaatgttatcttctagaatttttatagtttccaggtcttagatttaagtctctgatccatcttgagttgatttttgtataaggtcagagataaggatccagtttcattctcctacatgtggctagccagttatcccagcaccatttgttgaaaagggtgtcctttccccactttatgattttgtttgctttgtcaaatatcagttggcggttaagtatttgggttctctattctgttccattggtctgtgtgcctatttttataccagtaccatgctgttttggtgactatggccttatagtacagtttgaaatcaagtagtgtgatgcctccagatttgttctgtttgattagtcttgctttggctctgcgggctcttttttggttccatgtgaattttagaatttttttttttaattctgtgcagaatgatggtggtattttgatgggaattgcattgaatttgtagattgcttttggcagtatggtcattttcacaatattgattctatccatccatgagcatgagatgtatttccatttatttgtgttgtctatgatttcttccagcagtgttttgtagttttccttgtagaggtcttttgattccttggttaggtatattcctaagtattttattttattttaatttttgcagctattgtaaaaggggtttagttcttgatttgattctctacttggttcctgttggcgtatagaagagctactgatttgtgtacattaatcttatatctggaaactttgctcaattattttatcagttctaggagctttctggaggagtctttaggctttccaaggtaaacgacagtttgacttcctctttaccaatttggatgccctttatttctttcttttgtctgattgatctggccaggacttccagtactatgttgaagaggagtggtaagagtgggcatccttgtcttgttccagttctccgaggaaatgctttcaacttttccccattcagtattatgttggctgtgggtttgtcatagatggcttttattacattgaggtatgtctcttgtatgccgattttgctgagagttttaatcttaaagggatgctggattttgtcgaatgctttttctgcatctattgagatgattatgtgattttttggttttaattttgtttatgtggtgtatcacatttattgacttgcatatgttaaaccatctctacatccctggtatgaaacccacttgatcatggtggcttatctttttgatatgttgttggattcagttaacaagtattttgttaaggattttagcatctatgttcatcaaggatatcggtttgcagtgttctttttggttatgtcctttcctcgttttggtattatggtgatgctggctttatagaatgaattagggagggttccttctttctctgtcttatggaatagtgtccaaaggattggtaccaattcttctttgaatgtctggtaaaattctgctgtgaatctgtctggtcttggacttttttttgttggtaatttttaaattaccatttcagtcttgctgcttgttattggtctgttcagggtatctaattcttcctgatttaagctaggagggttgtatttttccaggaatttatccatctcttctaggttttctagtttatgtgtgtaaagatgttcatagtagccttgaatgatcttttgtatttcagtggtgtcagttaatttttctctcttcttttcttggttaatcttgctaatggcctatcaattttatttaccttttcaaaaaaccagctttttgttttatttatcttttgtgttttgttgttgttgtttcatttcatttagttctgctctgatcttagttatttcctttcttctgctgggtttgggtttggtttgttcttgtttctctagttccttgaggtgtgaccttggaatgtcagtttgtgctctttcagctttttcaatgcaggtgtttaaggctatgaactttcctcttagtactgcctttgctgtatcccagaggttttgataggttgtgtcattattgtcattcagtttgaaatattttttaatttccatcttgatttcatttttgacccaatgctcattcaggagcagattatttaatttccatgtatttgcatggttttgaagattccttttggagttgaatcatatggtctatcttggaaaaagttccatgcactgtcgaatagaatgtgtattctgcagttgttggatgaaatgttctatttatgtatgttaagtccatttgttccaaggtatagtttaaatccattgtttctttgttgactttttgtcttaatgatctgtctagtgctgtcagtgaagtattgaagtcccccactgttattgtgttgctgtctctcttatttcttaattctattagtaattgttttataaatttgagagctgtagtgttgggtgcatatatgtttaggactgtgatattttccttttggacaaggccttttactgttagataatgtccctctttgtctcttttaactgctgttgctttaaagtttgttttgtctgatataagaatagctgcccctgctgtgtttcatgtcgatttgcatgaaatcctttttccacccctttaagtttctgtgagtgcttatgtgttaggtgagtctccagaaggcagcagattggttggtgagtttttatccattctgcacttctgtatcttttaagtggagcatttaggcaatttacattcaatattagtgttgagatgtgaggtactgttgtattcatcgcgctgtttgttgtctgtgtactttgtgttttttttgtttgtttttgctttttaacttgtatttttgttttataggtcctgtatgatttatgctttaaagagtttctgttttgatgcgtttccaggatttgtttcaagatttagagctccttttagcagtttcttacagtggtggtttggtagtagtgaattctcttagcatttgtttgtttgaaaaaaactgtatctttctttcatatgtggagcttagtttcactggatgcaaaattcttggctgatcattgttttgtttgaggaggctgaagatagggccccaatcccttctagcttatagggtttctgctgagaaatctgctgttaatctgataggttttcctttataggttacctggtgcttctgtctcacagctcttaagattctttctttggtcttacctttgggtaacctgatgacagtgcacctaggtgatgatttttttcaatgaatttcccaggtgttctttgtgcttcttgtatttggatgtctaggtctctagcaaggctgaagaagttttcctcgattatttgcccaaatatgttttccaagcttttagaattctcttcttcctcaggaacactgattattcttaggcttggtcgtttaacataatcccagacttcttggaggttttgttcatattttcttattctttttccatttgtatttgttggattgggttaattagaagaccttgtctttgagttctttcttctactacttgtttcttcttctttcttctacttattcagttctattgctgagactttccagagcattttgcatttctgtaagtgtgtccaatgtctctcgaatttttgattttttttaagctatctgtttctttgactatttctccctttatgtcttgtattatttgttggatttccttgcattgtgctttgcctttctctggtgcccccctgattagcttaataactaacctcctaaattctttttcaggtaaatcagggatttcttctcagtttggatccattgctggtgaactagtgtgattttgtgaggctggtaaagagccttattttgtcacattatcagagtgggttttctagttccttttctcatttgggtaggctctgtcagagggaaggtcttgagctgaaggctgttgttcagattcttttgtcccacagggtgttcccttgatatagtactctctcccttttggtgtggatacggcttcctgtgagccgaaccgcggtgattattgtctctcttctgggtctagccacccagtgagtctgcctggttcccggttggcactggcggttgtctgcagagagtcctgtgatgtgaacctcacagagatctctttgggtctctcagccatggataccagcacctgttccggtggaggtggtcggggggtgcaatggaccctgtgacggttcttagctttggtttaatgctctatttttgtactggttggcctcctgttggaaggtggcactttgcagagagcattagctgtggtagcatgaagaggaactagcagtgcacaggaccctaggactccctggattatatgccctttgtcttccactaccacggtgcgtagggaaggaccatcaggtgggggcagggctaggcatgtctgagctcagactctccttgggtgggtcttgctgcagagtatttggggtgtctcctaggtcctgcagtagcagtccacttccttcaaagggtctgtggctcctcttgggattgctggtttgttcttgaagtcgatccagagctaaagttcacatgcaagcctctgcacactgctctgttagtccgagtcagagctgcaatctagtcctgcctctcgtctgccatgatcccacctcttgggattggcttctttttttttttctttttttgacagagtctcactgtcacctaggctggagtgcagtggcatgatttcggctcactgcaactttcatctcctgggttcaagccctggtgttttcttgccactatttatatgatcatgtggttcttcctgtttcgttaacctgataaatagcattgattgattaattgtcagatcttaaatcaggcttgtattactggtgtaaacagtttataaagtataattattttttatgttcttagattcagtgtatttagtatgttatttagtgttcttttttgttgttgtttgctttttcacccaagctggagtgcagtggcgtgatctcagcttccggttgcaagtgtttctcctgcctcagcctcccaagtagctgggattacaggtgcccgcgaccacgcctagctaaattttgtatttttagtagagacggggtttcaccatgttggccaggctggtctcaaactcctgaccttgtgatccgccctccttggcctcccaaagtgctgggattacaggtgtgagtcaccgggcccggacttagtgttcttaacacagtttggtttataattttcctttctttggtttttatatcaggataatgctggattccaattctctagaagaatttgataaaacttctgcaaaatcatcttgtgacccatctttgttttttctatgggaaatttttgtgtcatgaattcatattcttaaattcaataatagaattattcagatttaggttttttattatgtcagtctttgcccatcatttttccagaaatttgccttttgcatcaaaatttttaatttattggaacggtgtttattatatattctttttaatgcctgtagtatctcttctgttattccctgttaattcatgataatgataattttcctctctttttttcttgattagtctttttgaagtttattgatttcatcagtttttttatataatgaggctttgggtttgttgatttttctccttcaaattagttttctatttaatcattttctccttttttctaatttccatttttctcagattttaatttaatatgctactcatttttctatctttgtaaggtatatttttagatcctttacttttaacctgtctttaaaaaaaagtttgaaggaataattttacttgtaaacagcattagttgcagtcctgaaattttaatattattaggttttcattttcttttatttgaaaagtttctaattttattgtaatttatttgaaacaggtgttatatagaaatatattgctgaattcctaacatttctagttacatttctaattacattgatttcatgttaaatccacttatgtcagaatatattctgtataatatctgtctcttgaagtttgatgatacttgctttatggcataataaagatgcacttgaaaagtgtgtttatgcagttattggctatagtattgtagcctttaggtcatcattaagtcaagtttattaatcatgttttcaaattttctctgtcgatttttatgtgcttgttatatcagttattaagataagtgggttaaaacttatcttttatttccacttttatatgccttttctaagatgtgtatttttaaggtagcatatagacggacttcagccttgaatttcataataaacattaacatggaaaaaatgtacaaaggaaaccatctgtcagtgagatatgctgaccacaaaggaagggagaggtgcaccacattgctctaatgccttacaccattcactcttcattggagttagctgggactcaggattaagcactaaccgaagtccaacacaggtaccagcgctggatgtcaaaagatcagattagcatatgagggatgaaaggagtgattaatgtatcccaagggaaggacaagtttagaaaagcttagagaatgtttgtttagatcttgtcatacacagaagacataccaacactccataaagttctgatttaaaggcattcactgggttggatgaggtaacaaaaaaaacagatgtaaagtagagatctccccaggtgggacctgggaaccagagttgacctctgaactccctgaggcaggtgagatgctacagtagcacataatttacatctgctgacttagtgctgatgctgtcagtatttgggcttaggagcttacatttaagtgtcttccatattgtcccttttgcttctattcatcctgtaattgaaggtaatgataatgatttgacagaattacatttttatttcttaatattcctgtcggtttgtataccctgttcataattttagtggctccagaagaaatcctgtattagccaggagcacaacctgttatgttagtcatttcattgagaagtaggttttatttttttttgagacagagtcttgctctgtcacccagtctggagtgcagtggcatgatctcggctcactgcaagcctcagcctcccaagtagctgggattgcaggcatgcaccaccacgcccagctaagtttttgtgtttttagtagagacggggtttcgccatgttgcccaggctggtgttgagctcaggcaatctgcctgccttgacctcccaaagtgttaggattataggcgtgagccaccgcaccctgccagttttttgtttgtttgttgtttgtttgttttttgttttagtctcatgtgttcccaaaataaataagtagaagaatttcttctgccaccctatcagtaaacaccttactgatcaaaaactagtgggcaatttttttctctctaaatcagaagaaaatcttgccatagtctctcaccaagaagtgaaccctgctttgtttattacacctaagatttgtcttctgcgaagtcagtaatcgtttaaagcaatctggatgatttgtacttatcacagcttagaacacaattcttcagtggcttacagcagaattaaaagctttccactttctgtgaggtgttagcaaccttaatgatcctgattttatgttttaataccataaacaaatcatgaaaataccatctactgattaagtgacctcatgattaaatacatatttcatcttgtacctaatagaaggttgacagagagagggagagttcaaatgaggaatagaatgagccagaaggatggatggcatttttatttgcagaaaataggaatacatttttactgctgtttatagaaaacatgttcgttggcacaagcttcacaaagactagcaggaacagaatcccacaaaatgaagtttaaagtaaatagtggatagatacctaaaaatttctccaggactcaaagcagtttggtggttaaatgccaaacaggcattgtagttaaaattatgcttgttaaaagaatatgttccattctgtaatgttcggatacaaaattaattctagaagagtctgccgggggaaattttatatttttcactaccattcaaatatagatattgaatatgaaatgtattcaaccttcattttgtgtcctgaggttttatatatttattaaaatgtggttcttctttttttcttaagtcattttgttttctgggtctagaactcatctttttgtaagacttttagatgtaaacaataattcttaaatcaatatgtgttgccatgttctattagcaaatattttaagactttttaaagatcagctcttctttttgagctgagaagtctgttatttcctaattagctgggagctgggattggtcacctcactgagagaccagatataaccacacacacacacacacacacacacacacacacacacaataaccttaaaaactagaaaattcagaaaacaaaaatataaaaaatacagatatatttcggtattaaatgctttaaaaaatatgaatcgtgtgtaggatatagtatcttgcagtgattaagagaacaggtgtaaggtcagtatgactgaattttctgtctttgaggaagttactgaacctctctgagactcagtttcctcctgtgtaaatggagatgataatccctcctatttagatatgagagtgaagttagataatggatgcgaaatacatatgtactaaggtttggatataagcaaggcttatgacatgttgcctcttcttggtttttgggagggcagggcaattgtacctttctttggctgtcagctaggtacagaaaattgtgggtggcctagtaggccagatgctgggctggtgggtcaagatgcaggtggtggtgctgagaagacacacacagaactgcctgtgttcccgcagcaagcaaactgtgattgcgacccgcaagtgattatttatgctgtactttctggttgtctgttaaacctgcctgtgaaaatcagttgtaagtcttccttagaaacctctacaaagtgtgcatgtattcctccttatatttctttttgtttgtttgtttgttttgttttttgagatgtagtctcactttctcgtccaggctggagtgcagtggcaccatctcggatcactgcaacctccagctcccaggttcaggcagttgtcctccctcagcctctcgagtagctggggttacaaatatgcggcaccacacccggctatttttttttttctcagtagagatagggtttcaccatgttggccaggctggtctccaactcctgacctcaggtgatccacccgcctctgcctcccaaagtgctgggattacaggtgtgagccaccacaactggcctctccttatatttctatagcactctgtactttctgctgaagtcatgtacttttatgtaagacagtgaactttggaggcctcagagcatgtataacgtgaatctgcacgtcccccactgttctatccttctcaagaagcaagcgttgtggtttcagagtaggtagggactaacttgagttgcactcatatttcccgaagccatagaccgtgatatcacacgtttcctaataaagatgaatactgaaatgagcatcatccagtgtcttgggtttttatgcttcttgcttttgtttttatatttcaccttttagaccaaggtaatttccaaagataatgtcaccttgctgggtgaggtgatgggtaagtgaacattcacagacccgttagcacagtgccttgcacgtgctcatacatgtcatttgctattgttatcatgtgcctctgaaatagacgtttgaaatactctcctaatcgtggaaaatttaatgcatatccaagtgttaaagctaaaaaaaaaaccctgttagacattttgacttgttttcttgttatcaaacctcttcctcagtgctactaaatgtaagagaaatagaagacaaaaatttctgacaatataaaattcaatatattgtaataaaaagaaaaaagtctcaggtcttttaaaacatgtaaaatttaattacatttctcttatctattctttattgggcatgttaatgaactctaatttcttatgtaagtgtgtttaggggaaaaattaaagaaaaattcagggattttatcctgaccaataaaaagctagccgtatgctggggacaagctaaaatgtagtggctgacaatgcatgctcctcagctctgtgactggtgctgtgtgttcttgatcaagttacttttttctccctgtgcctcagtgtctccatctgtaaaatggtgtagtaatactacttcatagggatattgtgagatttaagtgagttgatacatgtgtatttaatatacagccagatacacaatcagcattcagtaaatgttagcaaaggatagataccaagagagatgactccccacttccaaaggtgaagatttaaattatttcctttttttctgagcactgaatttgcaattagtcacttccttatcccgtgcatagctgaggcttctgggttccttgtctatgatgcctgcttgctcatttcccgcataacatcaactgactcatgatagtttgggattcaagtcctactctaaatctcagttttctcatccattaaatagggaaagtaataatgcctgactcatgaggctggtgagtgtttcaaaagaactaatgggggcctggtgtggtggctcacgctcataattccagcactttgggaggcagaggtgggcagatcacttgagatcgggagttcgagaccagcctggccaatatggtgaaacaccatctctactaaaaatacaaaaattaggcatggtgacatgcacctgtagtcccagctactcaggaaactgaggcaggagaatcacttgaacacgggagtgggaggctgcagtgagaggagatggcaccacttcactccagcctgggtgacagagcaagactccatctcaaaaaaaaaaaaaagaaaaaggaaaaaaaaacctaatggataagtttatatcatagtgtttggcacatggcaggcatgtaatagatatcatcaggaccacctatacttttgttattcctttgtatggaaaagcagtccctggtactacaataagtctttcagagaaaggagtgtaatcctaacaacaactcatgaaagtatttttgaaaagaatacttgataaggaaaacctgcatctacttctgctatttcagacattgctacaagtggttggtgtggtctctgtggctgtggccgtgattccttggatcgcaatacccttggttccccttggaatcattttcatttttcttcggcgatattttttggaaacgtcaagagatgtgaagcgcctggaatctacaagtgagtatggaaactcgggttggtatagacatgctagctagtttccatttatgccataaattacagagaccccctgaaattcggcagactctgtcttccagaatttctctaacattaggtaattgaacgtattggccattatgaatcattgtgtcccttagagcatgtggaattgatagcctgcaacgtgcaactttgcatttggaataaggaaggagtgaaggccatatggggagtaatattctacaggaatgtcagcactgtgaagacagggactctccgtgtcttgtttatgacatactttcttacacaaagccggcacttaattaaacatttttcttagaaataaaatatttgatcatggtgaaactaatatagaaggaaaataattagggtattttagcatctttccccgaagatactaaaagtgacaaggaaatgagaaggatggagaaaggaaaagaggtgtcagaagcaatgtatttggtaaatttatgacttttgcaaactcacaaaatggctaggaagttgcagttttaaacgttttgaaaagataagcattgttattttcagttttccatttgttaccagcggtgcttgttctaatgtcacagtttgaggtttttccccctcaggctgtttatatatatatggacactgaaaataatccccttagatcacaaggagatatatcagtttagaaaacatatagtctgttgctctcttcaatttcctagttttggaatcatgaggaagacattttatgattaatcactctattccacatgtaatcgcagagatgaaataatccagagttcatctcattatgcatgcacaaattaacatatttcatcattgttaaacacaaactcataaggagagtagaattgctttactttttaataaaaggtataaggataatagccaaaaaataaagaaggaagatatttgtatcagaaaagctgaatgccaactcagctctctggaagccacgcctagaagagaagcattgagtcccatcattttcagtatcttctactgagtggtaaatagaagtttattaggacaaagcagtttttggttgtgacatatatatgtttctcttttaacaatgaacatttatttatttatttatttattttgagatggagtcttgctgtcacccaggctggagtgcagtggcgcaatctcagcttactgcagcctccacctcctgggttcaagtgattctcatgcctcagcctcccaagtagctgggattacaagtgtgcaccaccacacctcactattttcatattattagtagagatggggtttcaccatgttggccaggctggtcttgaactcctgacctcaagtgatccacctgcctcagcctcccaaagtgctggaactacaggtgtgtactgctgcacctggccaacagtgaactctaagaggcatttatcctaagtgtctgcatgaagtagaaggggtgacagtccataaaagttgtagaaaaacttttcagtcatcaagaaaaccagctaagctaccatgaggtctagtcttgtaaggttttcagtgggcaggccgagcagtggagtccacatgtgagtaacacttggccaataggacttgctagggaaggtagagtataattgctgggagaccttccttgtgcagatgactggccctagccagtgttgtgtgtggacagcaaggctgtgcaggcattttatggtttgggcccgctcatgaaatgaagttattcgagagtcttgttttaagggagtctgtggtatgttgaaggaagcagccgttccagaaggaacatcttgacgtagactgtctgtgtcaacagccacatccgatccatgtggatgtggagaaaagggggacttaggaaggctttttgggaagcagtgtaggattttctctcttgaatttcagcatgtaccttaaagcttgaaaacattttcatgtggagattctgacaaccttatcatggcccctgaggcatatttgggtgttcccgtaccctgattggctgtaacaatgagttaaatatgcaggattctttctccatgcgctcagatcaccaaccacgggggctggttggttggaactatttactgttattcgtccagggtggtgggtctctgccataagtcacaattccactgtttcttctcagcagcagtggatcgtggtttttgagaccactgctggagtcaccagctgaaagcaggatgcctgactgccgtggcagggaggcataatccagcttcatccttgtgccctcaaggatttccaaagcctctgttggactgcctcactgcccctggagtcatagccggcatttaatgaatcttaataacaaatctgggccgggcgcattggctcacacctgtaatcctggcactttgggaggccgaggtgggtggatcacttgaggtcaagagttcgagaccagcctgaccaacatggagaaaccccatctctgctaaaaatacaaaattagctgggcgtgatggtgcatgcctgtaatcccagctacttgggaggctgagacatgagaatcgcttgaacccaggaggtggaggttgcagtgagctgagattgtgccattgcacttggcaggctgaggcaggagaatcacttgaacccaggaggcagaggttgaggtgagccgagattgcaccattgcactccagcctgggcaacaagagtgaaactgaaaaagcaaaacaaaacaaaacaaaaaacaaaaactaatctgcagttgatcattttatgtttgcaagagtcaccatatcaacagtcagtcatagagaagtacataaaaaccggaatggcatttggctgcatttctctagccacctccactcatttggcaatgcctgaaatgtgaagccgtatccaatttctgtttgtaaagatattgtgatccactagcaatgtctgccatgagtgtgaacccatgtgtcccatgttcgttcatcctagattcccagggactttgttcaatgcaaggtggttaataaccggcacaggaatagggaaggctgttggatattagctaagtaagattaggggatttttaaagcgtgggctacaaagtctggagaaaaatgccctcaggatgcatgagaacctttaactctgattattctctctctctgatactgtggctcagattaaaagcacagccttggaaataaaacagatatgagtccatgcccaagtctaccacttgcgtggcttactttacttaaccttgggcagtgttttttttgttttcttgtttttgtttttttgagacatagtctcactctgttgcccaggctagagtgcagtggccgtgatcttgggtcactgcaacttccacctcccgagttcaagaaattctcctgtctcagcttcctgaatagctaggactgcaggcacccgccaccacacctggctaatttttgtatttttagtagagacagggattcaccatattgatcaggctggtctcgaactcctgacctcagatgatccacccgcctcagcctcccaaagtgctgggattacaggcgtgagccatcgcacccagctttgggcagtgttcttaatgcctcaagtctgtttttcccactgtcaaggatataatacttatgagggttgcctgagactgcttggaaaccttgaacatacgggaactaccagaggcgctatagccttgagaattaaaaccgtaataaccctgagaggtcctacacagcgtcagtaccccgcagcaagactggtagaccagatctttgcatgcagttccttttcatgttcttttcagagaagacagaaaatctctgtagagtgtatcctaaagagttctctgtgttgtggaaaacacagctattgatcttgtgaaacggcaggttgtgtcagctggaaactgctgactagtacgttagagctgaggcttgacatacgctctccctcggtactagttagttgtctttgcagacctcccagctcaccctcactggcagccctctcagccctaagtggggtgtgaaagagaaaggactatcttttcaaaggttacaaattcctgctataccttggtaatttggtgtgaattaaagtgtgtagcttgatcttcatgatattcccgggtgttccaaaactgggatggtacctaatttctcaagttgaccctgccctgaaacccagttggagataaaacagtggcgacttggatctcctgatgaggaaagcaaatgacaatagctatgttgaagaatttcattccaggactctgtccccatgactgccacatctccttccttctcagtggcattctttatatgatggacgcgttcagtcacaacactcccttgctctggaggtaagagcatggttctagtgatttctctgaactactgggagccaaactctttgtagggtaatggggcctggaattctcttgtgttattcccaatatcaccctgtttccagattgaccaagttccagggtgcaggctagaacatctgaggcgtgcagaaaagacctgtgcagaacatccagcctttctcacagaagcaccagctcagtcctcttgcggtcatgtcacctgccaccttcccagtgcaaagttacaggttatagagagctgacacaaataacgagtaaaaggttactctgtgtgttgaagagtactctttttgttttcttgtttttgtttttttgagacatagtctcgctctgtcacccaggctggagtgcagtggccgtaatcttggcttaccgcaacttccacctcccgagttcaagcaattctcccgtctcagcttcctgagtagttgggactacaggcgcccgccaccacacctggctaatttttgtatttttagtagagacattgtggatgccagagatagagaatagagagaaccctgtggactcgtgggaggctctctgcctgaattagacataagggaagtgccagatcacattctggtggagaatctatgctcagggaaggtctggtttcttaaagcactatcacaggagagggcccctaaaagttagtgcccccagtcagatgtatcagtcaggaaagagccccaaggatgggtggacagtcagtaacctgcagctccatctgcctttccccaacccagggcttcccactttctcagaaccccagtgtctcatacctggcggcctcctccttcacttacggaactgtggactctggactctgatatatgtggaacctccatgtcttggcacactggtaccccagcacccccaaatgtgtagtgtctgtgtgtacagtgggcacaccagtattgagtcagctgtagcacagatcggcatggggatgctgtactaagagtccgacccagaaaatgagttagaatttttctcttaaattttccactccctccgccccttacccccaccctaccccctcatcattttataaaacatatgtagccatcgcctgtaagatagattggccacgcacggtggctcacacctgtaatcctagcactttgggtggctgaggcagcctgattgctggagcccaggagttcgagaccagcctgagcaatgtgacgaaacccagtgtctacaaaaatatataaaaattagctgagtgtggtggcacacctgtagttccagctactcaggaggctgaggtgggaggatcacttgagcctgggaggttgaggctgcagtgagccaagatcatgccattgcactcaagcctgggtgacagagtgagaccctgtctcagaaaaaaataaataaataaaaagttatcttaacttctcccggacaccccatgttttactaacagggtcttctctggagctacacaggtagcaaagtcagtgtttgctaattgcaaagcacaaatcatttatcccagaaaagaatgctaaagacattgtgctaggtcacgtgtccccaatatgcacctgccccagtatggcctcattcatggtagacaattgaaactctcaggaattcctccctgcccaaaagtagctagccctcatgtccgctgctatgcaggagggaggtatgtcctggtagtcatcaaatggtgtgcttgaaacacagtggcctgctggaaatggtggctcacacctgcctgtaatcccagcactttgggaggccaaggcaggaggaggaccctcatctctatgaaaaactcaaaaattatccaggcacggtggtgtgcatgtctagtcccagctacttgggagcctgaggtgggaggatcccttgagccttggaattcaaggtggcagtgagctatgatcacaccactgcacccagcctcggtgacagagtgaaatcctgtttctaaaaaacccaacaggccaggtgcggtggctcacacttgtaatcccagcactttgggaggccgaggtgggcagatcacctgaagtcaggagttcaagaccagcctggccaagatggcaaaaccatgtctctactaaaaattcaaaaattagccggccgtggtggtggacatctgtaatcccagctacttagggggctgaggcaggagaatcgcttgaacgggggcaggtcggggcagggcggcaactccctcttaaaaaaaaaaaaaaaaacctacaccacacaaacaaaaacacaatggctcaaggaggagcagctggtcagggaacctcatgggatatacagctcccaaagaaaaaagaagtcacacaaaaaagaattcacttcttaaaattctgtagagatgaagaacccactgagaccacagtcagattctgaaaaaagcaatggcacatgccatagagacctccagagatcaggacaagtttgcagtggggcagtcataaaaacatccgtccggttcctggagccaatgttaagaccattcagagacatcttggctgggcaggttccttgggcacggcacaagggcattgcagcacccaggtccatggagatcacaaaggattcttccagcatgagtgggcacagaagattccccaggatgcagggaagtgacagtctgtctgttcagctcacttactgagtacctgtcctgtgccaggtaccatccagttaccagggtgcaatggctatagctgacccttgagaaattagcaatttaaggtggggacagacacatagatggctaattgtaattcagtatggtgagtactcttaacagagaattgttttttaaaatcctactggctcaaaaatcagaaaaatatcatttctgcccaaagagatgtcagggaagaatatggagaggaggaagacctggaaggctgagttaggaaggaaagaattataactagatttgaatgtggtcaaaaataggacgtttatttccaggccccttatgtgaggtgtggtttgagcaggagcttgagattccagtggcagggtcccctcaggctattgggaacatttatttttccttgaaacatgaagcctcctaggaggcctgcgtgtgctgtttggtggatacgtgaccatggagcttgggaggccgcaggtttttctgcacccagcctcactgagctgttttctctgtctgtttccccagctcggagtccagtgttttcccacttgtcatcttctctccaggggctctggaccatccgggcatacaaagcagaagagaggtgtcaggaactgtttgatgcacaccaggatttacattcaggtctgtctatttctggaaatggtttcaaaggacaggatctgctgctttttctggcttaacctccctggtcagatgagcttgttggcaggcacctcagggcccagccccacatcctgctttttttgcgcatcttcgtctccttccccatccccttcttctgggcttggactcctctcggaatcgctgctgcacgttccctctttgtgccccctgactggcttgtggggtctttctctcaccatgcatggcctgtggctctgtcagcaaacgttttctgcaaaaggccacctagtaagtgttttaggcattgtgtgccattattgtctctgttgtgatgaatcacctttgccattgtagcacaaaagcagatgtcaatacattggcaaatggctgtgactatgtttcaataaaactttatttacaaaaataggtgctggctcacgtgctgtagtttgctgaccccttgcatcagtgaagattttttcaatatggaaatttcagaatttccaccaaatctacaaaattcagatccgtcattccaatctttattttatcttgctgattaaatggcactttaaaaaccacatgctaaaaggaaaaaagaagtagcaaacaaacaaacaaaaaaccacatgcaaatcctgttagtgaggtcatttttatatagcccctaagcaatagtcagtgtgtgtgggccttctggtaagtatggaaggtgggagaagtaaattgggagctgcactctgctgttggagaactggaccagtcaaccatgtgtgtgggtggacttcacatgagatgcacttcacataagtatttctcagcactgtacgagatgtccttatgagactacttttctcagttctttattaggatcatatttctgggtttcatattcgcatgcatcctcacagaaagccacggtaccattgtgtatgtgtatcgtatattgcctgtatcacttagctttctggaatctaaaggttccttgggtgtgcaactttggtgccctactccacgtaaaaatcttctgtagctcaactgagcaaaacacactcgcacattcatctacttattcatcatgcttattaccgttctcaaattcagaggcttggttcttgtttttgacaacgtcccgctggttcgccgtccgtctggatgccatctgtgccatgtttgtcatcatcgttgcctttgggtccctgattctggcaaaaagtaagtacagatgtgaataactatgtatggtatgattacaatttatagctgtgtttacatttattaaactcttgccaccttgtctactactacatactgtttggtcctaatgaagtgtattaaatcatttacgatgtgtcaggttgggtaggattcagcagtgtgactcatttaaggagtcatttgggtcttgatgggtttatctttctttgaatgggttgagatatgcgcagttgagattctgaacattcctgttagtgtctggtagttgtgaagagaaaaccaatttattctgaagcattttgtccaacttagggtgttagccttccaactacttgaatctattgtttgtagttgcctggtgcatgaggttgagaaaaattctcagcaggagagtattatcttcaatgccacatgggtaccagacaagcagggcatgagttcaccaccccagtaacaacagtgcattacaatacttaataatggaacaaggagagtagtattttagtctcaaaagcattggcacttacaacctattgctttgtttttagtggtttccagctgtggttgcattgcacgtagaaagtggaataatgtaatgggctttgaaaccataataatgaatgtctgaataatgacattatttcttgcgtttgtaatactgttaattaaatctatgtcgatcctgttggaattcataaaatcatctaaaaatttttctaaatatacagtgttgttttccccattgtatcttgatctcaagcaacaaatggtaaaagtatagctattaatgtcattaaatgtgaattgtttcaacattatgaagggttcctcttggtaagtggcagaaggagccaggcttaggtttgaagtgagactgactttattcccttcttcctccttacgtagctctggatgccgggcaggttggtttggcactgtcctatgccctcacgctcatggggatgtttcagtggtgtgttcgacaaagtgctgaagttgagaatatggtaatatttaccttcacgttctttgccttttcaatctccttgccattaaatggtataaaagccattcttatgtgaaatattaaaactgttatttttacatctttggtaacagattttttttaagatccttcctccatctgtttaaagttaatgtaaaataaaatatatacatctttttctgagtcttatggttgctctgtcagcaggttttatattcatcacaagctttttcagatgtaataaatgtctctgtaggagggaggttctgaaattctagagaggatataagctaatttcttagaagcctgtttaattttgtttcttaacgggtaattcctcattcctgttaaaagaagacttcagtattttgaggttgtttacatttaattaataggtctcctcctctcccagttctagcgtttactctcttatgtgaagaacagaagggaggaaggccttaactttgctggtgtgccttcttggtacagaaagcctcctcttggaatgtgctagtcaaagggtattagtttatggtggtataggaggctttaatcaatgttttaaatatttgcaccttcccctaaagagagaaaagcaataaacataaaaatcttttcattcttctcatagagcaaaagttgagtaattattacagtgaggtttcacgatcatccagtttaactgacctatatcaggtgatccttctatagcaaaagattcttttttggggggtaggggtgaggggacagagttttgctcttgtaccccaggctggagtgcaatagtgcgatcttggctcactgcaacctccacctcccgggttcaagcgattttcctgcctcagcctcctgagtagctgggattacaggcatgcagcaccacgcccggctaatttttgtatttttagtagaaatggggtttcaccatgttgaccaggctggtgtcaaacacctgaccttaggtgatccacctgccccggcctcccaaagtgctgggattataggcatgagccaccgcgcccagccagcaaaagattcttgattggtggctctaagtattcctttcctttacaaaattttcttgcctttaatacagatgtgagaagtggataaataaaatctaagcattcatttctctcattcttttaacctaatgttgaaggaagtggttgtaagtgaaggtgttacacaatgatgaaccaaatttgtaagtcatcaacatcctcgtctgtctcctgcttctctccttaaccaactatgtatgaaagaagaacatttcattgacagtctcttaacatccataaatgacaccctccattcctaacccctcgggatgtcatatttctttcagatgatctcagtagaaagggtcattgaatacacagaccttgaaaaagaagcaccttgggaatatcagaaacgcccaccaccagcctggccccatgaaggagtgataatctttgacaatgtgaacttcatgtacagtccaggtgggcctctggtactgaagcatctgacagcactcattaaatcacaagaaaaggtttgtttaaagcatcttgcctcttctcaatttcagaagatttagtgctatgtctgcttgttgtcttccttgtggatgtgtgaaggggatcagtgatacgtaggttaacctgtcttggaaactaaccgtggaatgtggataccaacattcttcctgctgtgaactgctttactgtggttggtgggccccgggcctcagggctggagcttaacgtgacccaggatactctgtttgatacctaattactcatggatttttccaggaagtcaactctggctttgtgtcaccaacactcctatgtctaattctgtcgatttttactttgttgcatttctcaagtccttctcttcccctccattgctgcagcttctgttccagcctttctcctcctccatcctttggtcctgtattagtctgttttcacactgctgataaaggtatacccaagactaggcaatttacagaagaaagagaggtttaatggacttaaagttccacatggatggggaggcctcagactcatgatggcaggcaaggaggagcaagtcacatcttatatggatggcagcaggcaaagagagagtttgtgcagggaaacttccccttataaaaccatcagatctcatgatacttattcactatcatgagaacaccacaggaaagacctgcccccatgattcaattacctcccaccgggtccctcccacaacatgtgggaatttaagatgagatttgggtggggacacagccaaacattatcaggccctttccttagtctttcttgccttcctttaacctgtgctttgctttccctccccatccctttcactgcaaactctttctttctgaaacagtttgatcacagatctgatccttacgtggccagctccttgcctgggtgagcagctgctgcaaccttaatgagccccaggcccaccctgacaggacctgtctggctctcagcccccaagggaagacccagatcccatgaccccatcagtgctcagaaatcagacccccaagctggaggcagtaaaggcaccagagactcactcaaagtcagtgaaaggaaaacaaggagggacttgggaggctgtgtggagttttgtgagctggttttgcaggtatctaagtctgccagcaatgtccctttcacatgtgtcctggggcccttggctaggactaggacagcctcttgaaggaactaaaccagaacaaacaagacagtagaatctcttccccttcccacccctctcctcacaactcccaatatggacacacatcccctgcactcagggtgccctccttctccccaagcacctgtctgccttgctcttagtgtgcacccttttcagtcagttcaagcatctctgcctctttgaaactatattctccacatcatcttatagattcttttttcgagacagagtcttgctctgtcgcccaggctggagtgcaatgtcacattcccggcacactgcaacctccacctcccaggttcaagcgattttcctgcttcaacctcccccgtagctgggattataggtgtgcaccaccatacccaactcatttttgaatttttagtagagaccaggttttgccatgttggccatggctggtctcgaactcctgagctaaagtgatccgcccaccttaacctcccaaatcatgcctgggattacaggcatgagccaccatgcctggccagattctttaatgtaacatctgtggcccacccgtgttcataacagcattatttgcagtgagcagtaggtggaagcagcccaagtgtccattgactgaggaatggaaaaacaaaatgtgatacgcacgcataatggaatattatccagacttaaaaagaaggtgattctgacacatgctgacatgtgtgattctgacatggatgagccctgaggacattatgctgagtgaattaggccagacacctaaggacggtgctataaggttccacttacatgtgggtacctggagtagttagtcatggagacagaaagtaggatggtgggcggcaggggtaggggaatgggcattagtgtttaatgggtacagagtttcagttttacaagataaatggagttttagagatggatgatggtgacggttgcccaacaacatgaatgtatttaatataattgaactgaacattttcaagtgattacaatgatcaattttatgttactttaccacaatttgaaaagtacataaagtaccttttgtgtattttaccacaatttttttttaaagaagatagcacgatggcatgatttataattctgggtcagcatctcacagtaccctgagcctcttaaagtcagggagcattttatattcgtctctgtacccccagaaaatggcatgctgcagggcacatggtgggtgcctgtgagagtgagggatatgcacatacaaagaaatcggtaacaaaacacacacgacagctcccgcaacagcccgttctctgggtgtcagtgttagatactttcggaactgctcttttcagctcttcccaccacagacccatttaatgggctatagtcacaattgaatgaatgatacccttgtgccatgaaaaataaatatacagcttcatgcccagaagatacccagggaaccagcaaaagctgattcctcattatctacccagcatccttgtgagtgtgaagaaggtggagaccactctgcaggcagcatcagctgtagctcttgctgaaagcaaggtttctcagattctgttcctgatggggccagggggatgtttgcttactctcagacaatgtgttattaggtcctacctgatcaacatcattctgttagtttggccacgttgtaaatttctcttgtagccataaaatatgaattatctacaaacctctgttgtacacattagaaaacaacctatatccccacattgatatcgttccatcttaaaacccccccaaatcataggattacctgagatctgaaatgtgggagggtaaattgaatttgaagactgaattatagctacaaccacttggcttttgagacagagtctcgctgtgtcatctaggctggagtgcagtggcgcaatcttggctcattctgcctcccaggttcaagcgattctcctgcctcagcctcccgagtagctgcgattacaggcacccgctgccatgcctggctaatttttgtatttttagtggatccggggtttcaccatgttggtcaggctggtcttgaaccccgacctcaagcaatccacctgcctcgacctcccaaagtgctgggattacaggcatgagccactgcgctgagccccacttggcttttgatttgtgtcctggttcactcacagtgtcacctttagcttcatttgtgtattcaggcaacatcgtggtgagttggttccactttttgtgtgtatattcagggttcgtctcctccacacctgcctgcagccccaggatctcaggcagtccctttgctgttggagctgatggagaggggcattgtttccagtggagatgtaggaatgtgtccacacagcagaaacagggcttcattctctttcaattgcttcatctgctcagatttcctggacattataacaaataggaaaaagtaataggcgctaagtaggtttctaattcacagaagaaatagcaagtaaaaaagaatgaaccaaaatgaggtatataccaccctagccttcctggttagattccaaacactggctgcatttttcatttagatggttttgtggttgatttaatcattttagagagtactgggccattttaaagcatttttcagctctagaggtagattgattttggtttgttatttttttttccttgctcaaagctattacttggataatacctttttacagatgtgtactagaccttgctatagtgtgcaaaaatattagtttcttatattctctccttttttacattaatgtttgctgagaaacccctcctctcacagccagattgtcccacttgccctgcctgcttgctcatctcaggggctgggatcagcatcacctgcctctgcttggaaacatgttagaaatgcagactgtcaggcccaccccacccttttgattaaaattgcactgggacaagaaccacccccactcctgcccctgcattaaagccgttgctctccggtaagcaattttggatgactaataatctgtgatttccaagaaacttcctttgacaacttgaagtggagctcgtggattgccccagcccctcttgtgactaaacatgagactctggatagtcctgggccaagtgccaccctacaggttttttgtttttttacttttatattctgcaaattatgaatttacattacaatttaattctgtgtgattccccatttatgcattcatttgcacctttccggtcatctctgtcttctatcacagttttcatcccaccatacagccttccatgaatagcagtctctgtcctcataccagctcagcacagcgatgtatttgagttccgttcactactgatgggatcaaaatgggtctcactgccccacagtacactaggtctgtctggcctgtttcccagttgccccatgtccaacgtagctgcaggcttctctcccagcctcttctgtgggtgccagttcttcctgtcaacagctgtaatccaccctaatacaggtactgtcttggctcacagtagtcagcttcttgtcctagccaccttcttatactcacgcatgtccacagcatgcattaaatgtatgacaataggaccagtatggcaggccagtgcctttaaagacaaccacacttctccccgctgtctcccttctagctacaccaagggaatacagagccaggctatccaagtgattgggaggccatcggcagaatgggcaagaggcaggcagacttgggtttcagtcccattccatcacttaggggctcagtcatttcaacagtttaatcaatcttactaagcctcgatttttctcttttgcaaaatgcaagtgatagggcctagccattagagttttataacttaaacaagataagaggtgtaaaacacctagcttattgtatacctgaacaatatggcaatagatttcccataaatgtttcaagcctgagttaaatgcttaactctctgggggatttctggttttttttgcaggacaccacaggtgatacaaataatacaaagctaattccaatataggccctgcccacagcacctatcgcctagtagaagaaacaaagtagtatataaatgcctgctccgtaagatagaaggaattcgcagattttatggctgtttagaaaagatgttacgacagccattaagtgtgggagaaatccacacgaggggacaagtggaggattttaaggcaattacacatttgaaacagactttggaaggtggttaggatttcagcaggtcgaaatgcatgtgaaaggcacgatggcatatgccaaggctcgatgccgtgatttgatatgaagaattaggcatctctgagcatacaagggcatgaactaccaggtgaataacacacatgtgcacacttagtcctcacagccaccccgcaaactcaatcctgctcatggagctaaggatggaaaggttagttgggactgttttgtagaggaggtttcccagtgtggagtgccaggcagagagctgtacttcggaagtttaatctgagaaatgagtgcacggggaagacgctgaaggcctgaagccaattgattttatgtactgctggcaagatgtgatggggcaagtgattccactttgtagaatcaaactaatgttgattaaaacaaagttataataccctggttagtgaatttgcagggatacaggtgggagtagaaattggtatcatatttctggagggtagtttggcatcacttaacagcctcctttgaaaatgttcatacctgttcctcagcaattccacatctaagaatttattttaagaaaccaattaaggttgcttgcaaagatgtagcttcaaggatatttaacatggtattatttacaatagcaaaatattggagcctaaacatccacaaataggggatttgttgaataaataatcatatatactgtaatattatgtagctactgaagtaaatacttttattaaataatagattataatattctgtgcatattctcattttgcctaaatatatgagattatatctttaggaacacagataactcacactcaagttcagaaagaaaaggtattaacatgtgacaaggattctgtcagattgctggggttgtggccagcatttatttatttttcgaattcacttgcactgattataactagcaaaagagtttttgtttttcaaatgttaatgcagccttgcactgaggtaatggctgcagaaattaaagtgagggtattgagtcaagaaacagaacaagtaatatttttagtgcttggagttgagaaaacctgggagatgggtgttttgagcctgtgaacttggggaagaatttattagattaaaatggaggagttagaagcagcagctgtttggaggggggctgttgggtattaatcatgttgagtttcatatatgaagagagatccaagtacaaatgtctaatgtttggccaaagagaccactcttggcccagttggggaaacaaaaagggtcaattgtaaagcaattaaaataaaactaagtgtctctttcgtgttatgaatgtaaacttactgatattagtgatattctccagaggatttggtgaaacccattggtgacttatgaaagacttggagactgtaattttgatgactttgaagagaactaaccagagccaggttttctttggttgccttttgctgattatatcctcacctgagtttggagtgcctagtcttatggttgtaggcagccctcagtgttccctacctttgagggggtccatcctggccatctactaataatggcctacaaatgtccaggtttgcacagatggatcagtttcccatagagctgataacatgagtgtccacacattctcaaaaacacagcatttgtctatgtctagatacgtgctgatttactgagaaacacacataagccccacacacacacacacacacatacacacatacacgtgtgtgtgtgtgtatgtgtgtgagagagacaaaatatagtcaggtatttaatatttggaagtttctctaccaaagaatgtgtcatcttaaatgatagaagtctggaaaaatgaatacctgtttatgtcacttgtgacacctctgtcttgaattaatatccctgtgaaattatctcagaaattcaattggtgtgtgtgtgtgtatatatatatatatatatatatatatatatatatatacacacacacacacacccggatgtacctatgtgcagaaaatggcccacctataaagtataaactaggatttaccataaggtagaatatgactccaaagttaataaaattagctaaagccactttttaaacatttacatttttatattttgtacatgtatctctttaaagataaaattccttgtggaaatgccattattgactttacagatatggaggtgttcaaatgaggtaatatgtcacatttccaacacatacccagtgcccagtaaagttttgcagtgagttttaaaatttattaaataatggacaaatgattgaaggcatgttttatgtccttcgttgactccagatttctaaataaggaggatgtcatttcttgggaagttcccaccaggaaatttgcagttgtgcaaggtcattggtgcagaggccagtttctgcatacagatttatatgcacacatgtgaaagccagtttttacaatatagacgtattgcccccacctttttaccagcattttattgattctttgatcgtattggcagtgcacttcatttctctctgtcttggctttaatagaggagtgatacttgacacaaatgtttctcaaggggcaattgtaagtattaattagtttgcagcatgccttttgaactgtgcagatgaaaggccttacgtaaatagcaaatgttacttgcgttgttgttgatctcattatgtgttttttggctactggttactactgtcttttaagacattgcaatcttcacttcagaattttgaaacattttgagacaaaatataggcagatatttaatatttggaagtttctctaccaaagaatatgttatcttaaataatagaactctagaaaaatgaatactcgtttatgtcacttctgacacctctgtcttgaattaatatccctgtgaaattatctcagaaattcagattactcagatcctgcaagcaaagctaatttaaaagttgccttttcatgggccacttaggagactgttgacttttcaatgccagtaaacagattctgttattttcaactcttttttagaacagtggatctcaaccaggggcagttttgccccagaggacgtttgtcagtgacatttttggtggtatcattttgggagtgtgctcctggtatctatgcagtagggtccagggatgctagcgaacctcccacaatgcctggggcagcttccaaaatgaagaagtatccagctcagaaggtcatcagtgctgaggttgggaaactcttagactacactcaatatagaatgtccttaattcttcttcaaaaaccgaaagttttctcctagttttgctgcatcctgtgatttttttttttttttaatcctgccgcctggatctctctgtaggttggcattgtgggaagaaccggagctggaaaaagttccctcatctcagccctttttagattgtcagaacccgaaggtaaaatttggattgataagatcttgacaactgaaattggacttcacgatttaaggaagaagatgtcaatcatacctcaggtatgcaagtcatagcgtccttacctgccccttttataagagctactatgtttaattgcttttactcttattgctttttttaattggatgaaaggattgttttttttttcacccaatagagcatgtttttatgagcagatattttcaacaggtattttcatcagatatccagctttgttcatttctctctctctctgtgtgtgtgtgtgtgtgtgtgtgtgatatttaataacttacgcagatagatttctgtactaagatgccacagttttatccactgataaccataaagaacaaaatgatgcattgtttgtttagcactggggaggtttctatggggagatgtggattttaagtgtcttaatgttggaattttgctgtaggaactaaagctaccttctcaaaggtgattacctccatgaagggctttctgtgaaactgtgggctgtgagagttaaaaaacttatagttggctttgtggtgacttttagaatctagctcttggtgaatgattttaaccaggaggttgttaaagaatagcaaggaagaacatgagagacggaattccatctctctgcacttctgcttcatcttccttacgatcaccattgtgagagtgtgtggtgtatttcacacagacccagtgagtgtttgctctgatggtggagggttaaattggccatcctttcccggactctgattctattttcttttcttctcctttgcagaagtgactctcaaggagtgttctagagattggattatttgtacaataagagctcctgtcattgctttggttcatatttaacataaattcagaaagtattcattgagtaattactattctccaggtgtatagtcatgagcaacatagaccttgtccccaccggcatggggtctgcagctgtggggcctcatggcttccatcggacctcacagttccatcctgtccttcactttaacacctccacatattcaactccagacatggctgggttttttgtttgttttcttttaatgtgggttttttttttttttaacactctatagtcattgaggggagctgaggaacacacacacacacacacacacacacacacacacacacacacaaacacatattctggagaagagaaacacagagaggagacaagagcaaaacccaggcagtaatgagctttctgggcatgtggatataaacaactcttcaatgcctgtttagtaggaagcatagagaacgtgccaccggaagggaaggagaatgtgatttttatcttagaccaagtacagttatggctatcctagcactgacctctaaaacaattggaatcacgcttaagtaatttggaggatgtgaagaaattggaaccctgtgcactgttggtgggaatgtaaaatggtgcagccactttggaaaacactgtagagattcctcaaaaaatgagagctaacgtgatccagcagttccacttccagaaagaattaaaagcgggatctcagagttttgtacatccatgatcatcacagtacccaaaaggtggaaatagctcgtgtccatcgccagatgagcggatgaataaaacgtggtctatccatacaatgggaaattattcagctttaaaatggaaggaaatcctgacagtctataatgcagatataccctaaagacattatgctaagtgaaataagccagtcacaaaaggacagacactagatggttcccctaatatgagatacctagactagtcaaattcacagagacacaaaggagaagcgtcgtcaccaggggctgagggaaggtggggggttgggagttacattatttcacataggacttcagttttgtcagatgaaaagcgtcttgtgaatggatggtggtgatggctgcaaaacaatgtgaatgtccttaagaccactgaaatgttgactttgaaatggcaaaagcagtaaattttatgctatgtgtattgtaccacaatttttatttttagtttaaagaaaaaaaagtatccctttcaggataaaatgggaagaaatgtttagcacgttagattccctctggctattagaagcatgacttagtgcttacagtagaaaatgagagtataaattctcaagttttatattttggttatgcccatctcaaaaatgggccaaatgaggtttacttagcagagataatgggcatgtctgtaaagtgcttttatatccttggatgaaaggttctaggaacgtgccctgcattactttgaatgaattcttaataagaaatagttgtgtgcttgtgtacataaaagaactctaaataaagaagtaacattagatgattcttggctctgccagtaatgttttggaagcacatctgagcaaagactaaatataccttgacatcaccaggttttggttcagttccataagtttccaccctacttttgagcaaatgctctatgtatgtagtccagggagcatgcttacaaaacactgctaagctttgtatccatgtagatcctgatctccaagcattgtaaacagagagactttcctttttaactttgtatggctttgtctccaaggctcaatgttggttgaaaaaaagaaacatagtctagagggactgtgcaatacttaatgcgacccaggaaatcattcagcagactgcctgggatagaatctttcagagcatcttctaagcgtcaacacgacccacatttttattccagcactgcctgatagaagtgtgacctcaatgaagtcacttagcctccaagcttcagtttcctcatccttaaaccaaacctagtaattactaacttacagatttgttgtgaagattttactagatgagaacatgtttgtggccctactctgggttctgaggaatgctcaatagtaactatttctaattaaggattggggtgcaggcctttagggcattattgctactcgctattctagaaggacttggctcattaacttctgtttctatttttgtgatccttggtgaattcctttaaccaaattgtttatgtaaatttaaatagtgaagcagcaacaaacaaaaaaaaatgtgcacaataaaagcctaagagagaaatctaatgtttttctcacaaggaacaaaaggtgaggctatcactttgttttctggctttcccccaccccggtcttagcggcattcctcaccactctcagtacccctctaatgctttgcatttcgcgagcaggcagccgacactggttctcagccctgcgtgagaacaggggcttgtccctcttagatccagtgctttagtgattgttgcgtcccagacaagttacacaagtagtgagaattcctaacatttgcagaatccttaacatggttatcttctttccttgccatctcccacttcgtcctcacagcaattctgtgtcatcctcatttgacacattttcaaactgaggcacagagagcttaacccacttaacaagtaaacagcagagtcaggattcaaatggaatttacggcgaatctcaatgccagatcctgagttcctgaaccctctcctagggactttaaacccatgttggctggcgcagtccccgatcagaactctgctttgcaacatgatttagtgtgggctcgtgcaggtgcacacacacgcacagaaacaaaagtctcacaacacgatattactccatgcttctgcgccctgatattttctattatatccattctattctggttcatataaaagacataaggatggtcatgagtcacaaaagtgatttcatgatccattggttgcacctgccatttgaagaacagcgtgcctcactgtgctgccctgcttggccgggctcctgctgcctggcagcaccgtgcaaggagcctcatgacacagtgattgtcactgcagccctgcagggtgtgtcaagttagccccattctccaggaaggaaactaaggctcagggagattaataacttacctggagatgaacagctaataagtagtagaatcagaactcagaactatccaactcaattttttttcagtaagtatttgttggacagcatgatatctcatcagacattttactcattgtttttcttttctttttctttttcttttctttttttttttttttttttttttttgagacggagtcttgctctgttgccaggctggactgcagtgacgccatctcagctcactgcaatatctgcctcctgggttcaagcgattctcctgcctctgcctcccgagtagctgggattacaggtgcgtgccaccacacccagctaatctttgtatttttagtagagacagagtttcaccatgttggccaggatggtctcgatctcctgaccttgtgatccgcctgcctcagcctcccaaagtactgtttgtttttctgtctacccaacttacaaaaggttcccagaagccataaccaaagagagcaaatatacagcaaagtcaaaaggtatcttttctttgaactttatctgtcatttggacagttaggtcattttgaaagactgaatcatttgtgatttatttttatttttatttttattttttccaaaaccttaagtgacactaagcactaaaagaaaatcattttggaaacagagtgtattcacttatgtgtcgtgggctagtgagcgtcagaagatcctccaagccttaccttgtgggagctcagagccctttttcttccgaggcctcgctggctgcagagggtggagaaggctggagacttgaggttgcatgaaggttactggtctgcagtgcagaaagcatacacccctcttcctcagaagtgagtggaaagccaaatggcttgtgtcaccacacactgatgtagggaatctaggaagtttgggagcaaacacagcaaaagcagaaccaagcgctgtttcttcgaatggccatgtttgggcaagtctagcctgcatggcttcctggggttgtgtggagcacgagtttctgtgttctctctcttcctggcttatccctttcatttatggttcagggtcctctgtcactcttgaccacaccattagcaactcaaattcgtggttaggattaagcagcaaggacctgggaaagaactggggcacagaaatgatgacatacatagtcaggggccagtcctggagtcactttaagaaacaaatactgggccgggcacggtggctcacgcctgtaatcccagcactttgggaggccaaggagggtggatcacgaggtcaagagatcaagaccattatggccaacatggtaaaaccccgtctctactaaaaatacaaaaattagccggacgtggtggtgcgcatctgtagtcccagctgctcgggaggccgaagcaggagaatcgcttgaaccccagaggcagaggttgccatgagctgagattgtgccactgcactccagcctggcgacagagggagactctgtctcaaaaaaaaaaaatactgaattcttaagaaagtacccctcaatttgtattcaaaatttcaggaagaagcgaacagtgaaagtacttcctaaataatttccctaaacagaatagttagctgaaatgtatgcttcttttgtgttcatgacacagggtagttaagtgcacttcccaaggagaacaccaaggtgatactataactcagacaagagtttgcttaactgaaggatctggaaaaatggatttcaaaactttttttaggatggattatttactcctccaatcctactggcacaaataaatgttttcaactaaagagtaacttcatgcaaattcaacatttatgatagcaccctaacggttggcatacatcaacagctataatctttgttaggattaaacagattcatttttcatatttgatggacttttttgtttttctatcaaagcaaaagctaagtagtttttaagcagcccactgctcagacttctgctatcttggtatttctactccctgaattttcttcagtaagttgaaaaggttaaccagagtgtgtctctttaagacttctttttttattacctgattttctttcctttttttttttttttcttctttttgagaacaaaattcaaagggaaaagaggtaggtatgcagttactagtaaagaaatacaattggattctggcctaatgcagtcagtcctttgtttctgcacactgaagtcttcattaaggccatggaactgctccctggagctggtgacctttttgtatctaaagaagactttacacgacttaaattctttttcctttgttggtgaacaatgttcttttcttctgaaaatggatgatgatcagttcattcagaggctacagggtttttttaaaaaagaagggaaaccaagatttaaagtgacttcaggtgattccctgattcttgacacagggagatgagctgccctgaatcaaggtcttcaggatttgaaatgcacacatagctctgaggacatcaggcagcagcagttgtggctagctactgtgcagtgtatattttaagagagcgaagtttcctggtttgggacaagattagggtaaagtattgtgctttgtcctgctggtttgtaactccccatgcgatttttgtcttggtcccaggtcgttttaagtgtctgaaggttggtggatagagtttcttcttgagataatgagaggcttgtcttccagaagtttatatgaaagctctaggaagactgtaattttcagtcttgcagtcctgctgagggattatcaatttactgcactaaatgctttgattcagagcggccatttttaggtcacgtggtgggttttttttttgctgttgttgctgttgttttgagacagtcttgctctgtctcccaggctgcagtgcagtggtgctatcttggctcacttcaacctccacctcctgggttcaagtgattctcctgtctcagcctcccgagtagctggaattacaggcgcaccccaccctgcctggctactttttgtatttttagtagagatgggatttcaccatgttggccaggctggtcttgaacttctgaccaccagtgaaccacctgcctcggcctcccaaagtgctgggattacaggcatgagccaccacacccagcctggtcacatgtttaatatcagcttgtcttatgtgagtaatgaggacaaaattactactcagtatggcgcaaagatttttaaaaagtatgacctttaaaccctaatgaaaaacaggtttgatctggtgcttcatttaaaataatacgttgaacagaacattggttttgctaacaatggaggttaaaactcgtactaaatgacattttaaaatatataccatcaataaatatgtacttaggctactaaatcttttacattttacatgaagattgtatgtttaccataaatctctactctgaaatgttctgcctgcagaggttggaattttagagttgataattacaaagagtaagtcaagtttttatcttttaatctgaaataaccagaatgatggttattcccctcacaagaaattcccaccattgtttagatggttgttcaggttttggtcttcagttgggtacttttaagacagaccttacctgtgactcttggaatttttcagttccatttggtaattcagaaacatcatgtgaccagtgacttttcagtgcttttggaaggatattggccactttatcagctttatacacacaaagtgcccattttaccgtcgtttccatttttgcattttgctgaggacttatgtttttggtggcaccctgtctgccttctacatccatttcttcctcaccagccttaaaacggagacgatagggaaagggatgagagcctccctgggtatcatttttctttatggctggagaaaaaagaagtctaccacctttatctctcttctcaggcttttgggaagtgaggaggaacagtcctgccccaaagccaggtgagatttgaggccagtggttcccttgagcatttctccagtacctgtggaagagtctcaccttctcttgttcccacatctgtgcatccccttgttctgcccctatccttgaaagcagttgatggggctcctatatccttatggcctggcttattagagccttccagaagaaaagtttgtgtttttgtttttttgttgtttttttttttaagatggagacttgctctgtggcccaggctggagtgcagtgacggaatcttggctcactgcaacctctgcctcccaggtccaagtgattctcctgcctcagcctcccaagtagctgggactacaggtgcccgccaccgcacccagctaccagaagaaaactttcacacagcctacctaagcttatgttcaagagtctctcttgaaatccaggaagaggctgatattccaagagtgatttaattgtgggatcctcctgaagcagatgaataggaacagctatttaaattgatgtaattttattatgacctccttcacagtggttttcaggtaaccctgctttcttagttaataatgaggttctgtgacccaggtaaccttgatgcacagatgagataatgtggggattcactgatgcaaaatcagaggcaatcctttcataagtagaggtgcctctggccccagttgtttagatctcctttggccaaaaaaaaaaaaaaaaaaaaaaaaaaaaaaaaggatgtcccattctgacattggagagatttttttttttttttttgagatggagttttgctcttgttgcccaggctggagtgcaatggcacgatctcggctcactgcaacctccacctcctggattcaagcgattctcttgcctcagcctcctaagtagctgggattacaggcatgtgccaccatgcccagctaatttttgtatttttagtagagacagggtttcactatgttggtcgggctggtctagaactcctgacctcaggtgatccacccgcctcgacctcccaaaatactaagattacatgcgtgagccactgcgcccggtgagagattcttaatcttggaaaactgttttgccaacggagaaaataatcctaatttattctttagtgcaaattggaaaatgcttaataatttggctttgaagcacaaactttaatcatgctgtcggtattttccagtattacatgattgatagttaatttctatagctctattcatgtagaccctcgaataattatatccttatatttcatgttaagctaataatatgaggaaaacagttttaaacatcaggcctgtatttttcattttcttcttaagatagcacattgcaacagttttgttagtgttcagtggtctggaaggtattttggagcacgctttgtacagtggaacattaatagatatgttgttttgtaaacaggcatttgtaacgctataattattatcatgaattttattttttggtatcttaattctattgttgatgttagcattggaataaaatgaaaaaagagtctgtggtaatgaccgtgactattttgggcacttaggaacctgttttgttcactggaacaatgaggaaaaacctggatccctttaatgagcacacggatgaggaactgtggaatgccttacaagaggtaattgataaaatgtaattatctttagtctgttagcctcagtatgtgtatatgtacctttacagcattgcaggaaattaagaggagcttagcggtttaactaactttgttcaccacccaggagatcattgaggatgtggatatgctataatgtgtatactgatgatgatgaaaaccaaaaataaaatttccctggttctcattttaattttcttcctgttgtccaaaacagtttggtgttgttttatttgtctttagcaatgcgttaaactagaagttgtatttatgagttgagatcctattagtgactaagttactctgcaccatttattttactgctctgttcttagggaatttctagtaagggaagaccatagtcgtttttcattaactaaaagatagatcatatttatgaaatgctttaagttttataagaaagtgtttataaaggtaaattatacagttggaatgggataataattatttattggcaaacgtgtaattttaatgcagataacagaaccctgcagcctctgctaaggttttatactaatatgttgatttctagaggatttttctattatttatgtggttcctgttgggccacttcttgaaattttctcacccttgcatgaaaaaaggactttgactattaaggtgctgttggtttgtgtattttaacactgattttctgtgttcagtctagttctgcaaatttgtgccagtctacttgatggcagaaaccatatcataaaactggtaatccctcacaggacctagtttagtcttttgcttttaaaaagtaagcatttaaggctgggtgcagcggttgatgcctgtaatcccagcactttggaagtctgaggtgggtgaatcactggaggtcagaagtttgagaccagcctgaccaacatggtgaaaccccatttctactaaaaatacagagattagctgggtatggtggtgtgcgcctgtagtcccagctactcaggaggctgagacaagagaattgcttgaacctgggaggccaaggttgcagtgagccgagatcgtgccactgcactcccatctgggcgacagagcaagactccgtctcaaaataaataaataaataaataaaaataaaaattggccaggcccggtggctcatgcctgtaatcccagcactttgggaggctgaggcggatggatcacgaggtcaggagttccagaccagcctggccaacttggtgaaaccctgtgtctactaaaaataccaaaattagccagacgtggtggtgcgcatctgtagccccagctactcaggaggctgaggcaggagaattgcttgaacctgggaggcggaggttgtggtgagccaacattgtgccactgcactccagcctaggcaacaagagtgaaactccatcccaaaataaataataaatattaaaagttaaaaaaaagtaagcatttaataagtatgtattaatatgtttgatctcttcatttcaaagaagtgtggagcctggacaacatggtggactttgtctctactaaaaataaaaaaaaaaaaagaattagccagatgtggtggcatgcacctgtagtcccagctactcagggagttgaggtgggaggatcttgtgagccctggaggtcgaggctgcagtgagccatgattgcaccactgcactccagcctgagtgacagagattaatttccctccattgttattgttgttgttttgaattggtgcatttgtcattgttgcccttccagggatagctctgaaatctttaatttatagatgggttttgactgtgagcaagtagacttggaggcctgacagtttcctgccagtaattcttgtttctgaaggcatgtcattgccgagtccttacacacccaccctgctttccagcaactgtggggattttctttttctaaattaggtcgattacttcacctcctgatacttgataagcaattgacctctgatttcatttaaatttgtgaatctctgtacagtgaaattctaggagagaagaggtgggtacagttaactgtcaaatgtaaagaaagataaggcaatcctgtgcccctaaactctcaggacaggtttaatagtgaaattgtgacacaccctaaaagaacaagaattactcataaagtgtttttctatttgtttcagagcttgagattccttgtcacagattctcagagagcaaaagtactttttagaaacacatttctctatgaacagtgaagaaatgttaattgggagatgatcctatcaaaaaccatcatggaacttgactgtaactcatacttatttcatttgttatagccaaaattaaaataaaatttagtagcctctcaagaattctagaaatgatgaggtggaagacgtggtaggtccccctcagaagtgaaaaattatcccatcattgtctttctctgggaactacttctttatggcattgtaggtttttctgtgaatgatttggaagagttactaaaaattagggtacaacattgtatttccagtgtgattccagctgtttttaatcattcttatattctgacacctgacctaagaaagacaccagagcatttacattgctcgtttgggggtaatgagacaaagactggaggagagtgttttcttttctctacagttttcctggattttccaaatttccttctgggtgcttgtattctttttaccttctagatggtcaggggaaaggctgagcactcctaacaaatgaagcattgtgagtttttcacaacaagtttcatgactacaagttgatggaggctgggggcattctgataggtcaggaattcttcccctggggtccgtggagtctgagggtcttctcgtagagaattccaaatcttacttcctggtgattgtaaacgtgaagttatgtgtgtgtgtttatcttgagagataccacacaagggattcagcaccacgactctggtgccattcaagtttctctggacttctctgtcacattctgtctctctgctgtctccatggttttcatctttcattgatatccagttcagaactggataactcatcttgctctttagtaggaaacctggtgtcatttggaaaccccctttaaagcagacaaaaaacatagtcacttggtttataaatgaggccaaactggaaatgggaacccaaactcagagggttggcttgagattaggacagcactgtcagttttttcctctttaaccacttaaaaggtggtttaaccacataaaaaggaaagatgccttttatttcttggaagttttttttatttcttcttacccatgatcccttggaaagggtaatacctgacatgcaaaagaagttcgggcatctggagggagacagtcctatggatgtggttgtgtcatcttggttatttttttatttatttatttttatttatttatttatttatttgagacagagtctcactctgtcatccaggttggaatgcggtggcacagtctcggctcactgcaacctccgcctcccgggtccaagcgattctcctgcctcagcctcccgagtagctgtgattacaggtgcctgccaccatgccggctactctttttgtatttttagtagagacggggtttcaccatgttggccaggctggtctcaaactcctgacctcgtgatccacctgcttcagcctcccaaagtgctgggattacaggcgtgagccaccgcgcctggcctatttttatttatttatttatttttttagacagagtcttgctctgtcgcccaggctggagtgcagtggtgcaatctcagctcactgcaaactctacctcctgggttcaagtgattctcctgcctcagcctcccaggtagctaggattaaaggcaagccccaccatgcctggctaatttttgtatttttagtagagacagggttttgccatgttggccacactggtctcaaactcctgacctcaagtgatctgcctgtctcggcctcccagagtgctgggattacaggcgtgagccaccacaccctgctcgttttttggggtttcttttctaatgctgaaagttatcgtaaatactgaaaaatagtcagctgtaaatggaagaaagtttactagaattagtgccacttcgggcccctaaataagagcaactctgtaaatataacgtaagtaatgattaaagatggaagtcgtttatgagaaaaaagtcaaaagatcacacagtaggtacaactaagaaaatgaatcagcagcacgttatttctgttaattaaaaaacgactttaatactgggatctacaattaagactaggttatatcatgttggaatagtggagaaattatctaatcatgttcaacattgatagaattgctgttagaatacaaggatgtcttgtattcaggacaccataagacagaaatctgcacatcagcagtgtccacatcctctgggccttctattccccacaccttgcacctccatttttcccaggcctgtattgcccagaatgggcttccgctcgcttcgttcacacttagctgtgttcttgttaaaggttgttcccatctgttgagttgctgtttatcacatttcagtctctggcatcagagacttcctttatgaaaagtcagaaagttcaaagaaacatggaaacagaatctgacatccacatgagtctctttgaggctttgaaaacatttatgatgatagaaatgggctgtcttagaaagttcagttcattattttcacttttcctgtagtttcctattttttctaagcttcaaaataacctgatacattgtgtttgaaatgtatagtttcaaatagtatgatttgattttgttttcctgaaattacaacctttattaaatgtagaaaacattaagttttctatattttaaagtataatgttatgatatcttggagccaattaattttataaggactgtttcttttacaatgacatttagtaagaaaattgtatgtaaattctatttctttgtggatttactttgtaatttataagaatagacatgtcacaaaatgaggtatccttgtgacttcatacattcaacagattatgtgtggggaggtttttacataggcattgtagactctggagctatagcagtcatcaagagagataaaatccctaccctcttagggcacaaattcttgtatggaagatagaaaataagaaaatgcatatgtaatataatattaggtactggtaaatgcagtgaagaaaactacagcagtgcatgaaaagaactagctgactgcattattaaaaataggcggctgggcgtagtggctcacgcctgtaatcccagcactttgggaggccgaggcgggtggatcacgaggtcaggagatcgagaccatcctggccaatatggtgaaaccccatctatactaaaaatacaaaaacaaaattagccaggtgtggtggtatgcacctgtagtcccagctactcgggaggctgaggcaggagaatcgcttgaacctgggaggcagagattgcagtgagctgagatcgcaccactgcactccaacctgggtgacagagcaagaatccacctcaaaaaaaaaaaaaaaaaaaaagaataggcagtatttcattgtccaggaaggagcaaaataaacaaaaagaatagatattatctattgatctcttacttggtaccaagcactattgtaaatgctacacatactgactgattttatactccaacaattttaggagataaacatcttcaaaataatcttagtatggtcttatttacaagttaattaggaagctaagatagagaaagttcaggaacttgcccagttggcagagccaggcaggactcatacccatgctgtgtgtcttcaaggctccatttttttattttaaaatgtccaaatcacagaacagtcaaatgaatagtattatgaacatacacatacccttctccaagattcaccatttgttaatacggtattttgctacatttgcttcctctcttatagcccttgaaagtaagttgcagacatttccatgaagttgcagttcatccttaaatatgtatgtgtacctcctaagaacaagaacattcaactacatgacataatacagttatttacctcactgaagaaattgaagagtaatgtaataccattgtttaatatattttcaatttccccagttgtcactcttagtcactgtgttccactgcctccattgtctttttctcagtgctaatacttaaccataacttgaatgtatgataacactacagagggccttcacattcatatcttttttttttaattgagacagagtcttactctgtcactcaggctagagtgcagtggcgcgatcttggcttattgcaacctccgcctccctggttcaagcaattctcctgcctcagcctcctaatgggattacaagtgcccgccaccatgcccagctaattttttttgtattattagtagagatgggatttcaccatgttggccaggctggtctcgaactcctgacctcagatgatctgcctgccccagcctcccaaagtgctgggattacaggcatgagccactgtacttggccatacattcatatcattctcataaccatccccgattcaatcatgatgacagagtctcagaagacactgttatctgggaaatgtgttcattattcttcacctcacaaccctattcttcatcaagtcaatgtggataacctcaaggagggtcaaaacccagaagaatgatgggttggccccttaatcaagggcaagtgtgagattatttcttcaaatctggctgccggtcttagaaaagacctttttgcacttaccagtattatcaaaatcaactcagaaggaaaagctaataaaaactttgctaacatctacttttgatcagttccatcacatggggtataggtctgtgagtatgtttcataaaaagattactcagcaagtcctcttctttgtaatggagagggtttgactaagctgacatattccatcctataattttcagggtaacattttgcaccacgagccaaatcttacacttcggattttaatttcctaccttgcatgctaatgccaaatatcaataccatatttaatcttaactcaaaattcctgtttcttggagttggacttccatcatgagtacaactcaagatcacattcatagaagtgtgcttccgtgtttaaggtacatgacaatgttacccgtttactcttggctttttgttgttgggcattgtagttctgtacacctgcttattggccatcactcatctatctgcttgctgatctcttaattggagatgtattgactcttggttcctctatagctctcaaatgtcacctgagtttggctcttgttctataaaatttctccaaaacaaacatcagtgaactgaaccaccacccaatgtagtatcaaatcatcttatagctacaattttataaagatacattaatatcaacatcatctatccccgtcgtctggggcaagatgttatattgtgtcctgtttttttgtgagttttcattcactgcaaaacatttattagactgtagaaaatgtactgacctactttatagccataggggcttaaacttgggaaaggaccagcccaagaataagctcctgatttcctaacaaatgaggcacagtttcccattgtttgcatttgtatttttttaacttttccagttgattaaaaaaccttccaaaatggtaaagtgcctataagatgatatctttggaggaccatacttcctgcagtaattttctttttaaattttcccttgagttatactcactcgtctccaaaatgtgctttgggaaacttgactcaaccagaaagatcctttcaccttttcttcagactctatattgggagcatgagcttcattttttgagaaacttccttccctacctggaagaggggttcttgttggctgtcatgttggttattggtaagggagttcaggtgctgggggacactgatatgatttttttccaacaactctattgaggtctaatttgcatagcagaaaatgctccccttagaagtgattcagtgattttggtaaatttatagagttgtgcagtcattgcaggaatccagttttaaaacatctctcttaccccaagaaatttccttgtgtccatttacagttaatcctccagccccttggcaaccatcactcttattgtctctctaaatttctgtaatcttttaactaaaaagaagggaattttttttatctttctgtattttacctacagaatacttttattgatcatactgtgtttttcttaatgaaattggcccaggcagtattaacacgtgaccctgcatgaacagactgtgtttgctgatggtgataaaggagcatcttgggttccattgtttgttctcttaagtcagaatatttccgttttgtgttgactctaccatctttctcattgaacattaactagaggtaattcagcctcatgtgtgtgtccacttaagttatatctctcgagagaagggacttgaaggttctaatgtctatgaggcttgactacttccatagcggcttgaatgatagcagtcattcttctttgtacatctacaggtacaacttaaagaaaccattgaagatcttcctggtaaaatggatactgaattagcagaatcaggatccaattttagtgttggacaaagacaactggtgtgccttgccagggcaattctcaggaaaaatcagatattgattattgatgaagcgacggcaaatgtggatccaaggtataaagctgaggtccatgtaaccttgagtccacattttaagtgtgtaaatgggaaacatggaatgattctgagaaatatttctaagtgctctgtttgccccagacataacattttaacatggataaattcattctgaaaaaaaaagaagaaacccaaacgtgttttccagtgtcagagatattattcagtatcccaggagagctagattcctaaaatccactcccaataatcagctttaagcaatttggagggaagacatttttcgttgttttatgaaaattagtaaattactacatagatttttatacttgtttttaaagaataagattgtcctaaaacattttaacatgatttttaaaacattaaatagatatgatcttttttttttaaatctctattgtgaagtagagctttttaagtcttaagtctactttttgcatctttacgaaattaaacttaacttctttgattgcagaactgatgagttaatacaaaaaaaaatccgggagaaatttgcccactgcaccgtgctaaccattgcacacagattgaacaccattattgacagcgacaagataatggtgagtccttcacctgcggaattcctgttgctcccaattatgttcactttttcagtttattccttccttgtaaaacttgatagaaacccctagtaagttaattttctgttaattttggctctcttcccagcagtaattcatatgcttaactacaccctcagtgctactaacaatatatccaatgtatctctttgcatataatcatatgcaaaaatcatatgttaaaagtttaccatgaaaatattccaaatctaagattcagcttgtgatgctaactgtcatactacggagtagtatccaatagaagatcacagtcattgtcactgtcacagttgtttcagcatgcttgatccccttaatgaaagatttaggtttttatatactgcaaggggcttgttgggtaaggttgcagaacttctatgctgttgggacgttcacaagatacgtgtcacaggggaagagatgagaagatccatcacaaattattttcagagagggcctagccagaaaaacaaatgattccaacagaaaggatttaacataggaaatttgttacataagaattggagggcttagaaaatgaagggaaacagtgataattttaggaagcaaggccaggcacggtggctcatgcctgtaatctcagcactttaggaggccgaggcaggcagattacttgaggtcaggagttcgagaccagcctggccaacgtggggaaaccctgtctctactaataatacaaagattacctggatgtggtggcaggcgcctgtagtctaaatgtatcatatagacttcttgttgggatttgctgttaccgcattggtgatagctactccttttattatctaatgcttggaagtgctgtcaacttagaaggtctgattagttagagagacagcaagcaaggacagaacttggcagacaagtcagttggtcactcctaaatctgatcaatcagcttctgaccacataaatgtctagttcacaagcatcttcttgatccatcagcgctgttaccattattgaagtgtgcccattagtttattgctttatataccagtccctctaggtagattttgagaaccttaatttttttctctcttgagtaatgtctttatctaaactctgaacatggttctacaaagcaatttacagttggcccctccctacctttctagcctttcctccctctgttctctctctttcctttgcagtaaaagccacagtcctttagttattgtccttcagttcatcaaacgcagcattcactgttgcggtcatgccctctctacaccatgcacaatggcggcttagactatggtgtgagcagtgaagatggtgcaatggatagatttggagtaaatagcaaagtaaagcaactggactgtgatggattgaatgtgagatttgagggaagacaggggtagtcagtcctggtttctctgtttgggacctgactatctggatgaatgaggaagacccggaagaagtaaacttggaggagggaaaggcaagcattcccttggaggatgtaactgttgagatgaccttgcatttcaacatggagctttccttctcactcccaactccattagtgtctccatctatggcgatctctccaatgatattgggagagcttccatttagggctccctggccacgaggtcatcagtggcatcacaggaggtcctaccaggaggtataaatttaagtaaggagtcttattacaagctctgaattctttgtgagaactattttccaatttttcttaacaggcagtggcaggattcagcctcagggaacccaggagacatgcattctgtagcttgagattgggaactggcctctatgttccctcaacccctagctgaaagcatctcctgtattctagagcttctgatcatcagccagctttcaattcgggggaacaccataaataccattcttcctcagatctttgattttggaggtgttttgttttttttgtttgtttgttttttccccttgtttgctttagagataccgttccagaaaacacatgttctgttctgttattctgaaagctgtgaaaacatagagacaagtgaatcagctgcaaagctcagcactccaaaaggcaggctcagggagtggctggggaagtgacagatgttaatgaaggacataaccaacactattgtcatcatgcagtcctgtaattgcaagtgcttaaggtgtaataattacgttttgttgcattggtgaatacttctccacaaagacggatagatatagttttgtttactgtaagtaaatcaaacaaaaagcttgttgggaaacaactgcgacctaattaatagctttgtttatgtgttgactctccaaagggatttacccagttttggttcattaagcgccatcaatgtgttaagcttagaattttattttatgaagatgttctcccagttttaactttattaaacatggtgtagtcttaatgacagctaatttaatcttcatttgctcagttgccacaaaacagtagagcaagacagacaaattagaaatcctcttttttctaatacgcaccactatctccacattaaagacagcttcctccctgtagtttttaggattagctggttacttgtgacctgttttcctttcagccaatagcacagccttttcctccagtccctgcacacccgtccttacaacgctctggattctccctggtagtgtgagtgaacgaggaataagcgaatctgcagttagagaattcttcgggagtgaattacagagaagcaaaaccaggcctgagaaattcagattgtagctcttttctttgtaggcaatcttatgggtgtataatgtatatctttctttctaaacccaaatctctttttagtagcgtttcctcagagaaaacaaactagaaatcgttctagcagaaccagctggagaaacacaactcaaagctaacctgagttttatttaaattctatgtttcatcttcatggaacttctctttaagaaaccgacaacggccacaattagaacatttcagaagaggaaaaattacttcttgaaaaatatgctgagacatttaattaaagtgttcagggggacaaagaactaatgtgaaggtagaaagcacaaactggggctgggcgcggtggctcatgcctgtaatcccagcactttgggaggccgagaagggcagatcacctgagaggtcagaagtttgagaccagcctggccaacatggtgaaaccctgtctctactaaaaatacagaaaaattagctgggcgtggtgccgtgtgcctgtaatcccagctactcgggaggctgaggcaggagacgcttttgaacccgggaggcggaggttgcagtgagccgagatcgcgccactgcactccagcctgggcgacagagtgagatccatctcaaaaaataaaaaatgaacacactgggagaataaatacacacaattgcagagctttggggaagtggctgagtgggtcactgggacctacccttcatcttccccaggtgagaagaatcatttactgtttcaagacctgaggcaggattttaagtaatctttgccacatgccatagtatcttgtcccagagaagagtcacaggcacccattttaccagtgagggaaccaatctccaacgtcagatgactctccgtacacccctttcatcatggtggcccagaaacgacttctgaaatggaaaccctcccaccctcactctgcctgttgctaagtggggtttctctgtattgcttgctgccatagtgaaagctgttccgagcttttcttttcctatggtcaggctttatccttcaccctgccctgcccttcccctgttcctgagatcaccccactatcagcgatggcatcctgccaattaaatggattaaattgttttgcagtttgttcacttaatttttatatctaggacagctacctggaatatctgcagatatttaggcctgataaacacatcttcattgagcttatgtaactgagtaactgactaatgcattccagtataatgtgtttttccttgaccttctagagagcagcaagtgatttgaggtttgcattgctggagagatcctggggccacgggaccaacatcaatgcatggcttagtttacagttttacttgggtagaggaaaggtgaggaccaagcaggagatttcaggactgttttcatgtagctacagaagatatgaagatacaaattcaagattatgcccttttttctgtacaaaaagaaaattcagagtcactttattttgttgtaaaagatctagaatctttggtcaaatcagtaaatacagattgagtcccctaatctgaaatctgaaatgctcctaaatctgaaactttttgagctctgatgtgaagcttgtaggagacactcattggggcatttcagattttggattttcggattaagtatgctgaatctgtaagtatgtataatgcaaacattgcaaaattcaaaagtatctgaaatctgaaacacttctggtcccaggcatttcctaagtatactcaacatgcataaaggctaagtgggtaaagttctattcttagcattttttcatgtgcatcctaacttggcccttgtagcatcagattgttccttattttctcttttccaatatttaatttgtgagtcaagcctctgccctcattcctgctgtgtctcctttttgctttttctctctcttgtctatagccatcaacttgaggcatgtggtcctccaaggctatagcctgaatcctagcatccctatacctccttccatatctgttttccagggccagctagactctttctctgctggatctcactctgtggtcttaccagactgcaccactggtcagtcacccaattgtgccctgaatttcccttcctttgtatttaacttttaggcagtgtgcatggggtgcctgctcacacgtcatgtgcaatgccaggccatggagatgcaacagtgaacaagagcaagcacataaccctgcccttgaggaagtgataggtgagctgtcagacctctcggcatctggaatgaccacggtcctcccacccctcacctccaccaccatttctacgtgtctaagtctgtccattcctcaaggcccagtttgctattttctcctccctgaagctcctcctcagaaattttggccagaggtgacttctgctgctgctaaactcccgcttgttttgccttttttctggcattctagtcacttgagtgttttcttctgtctttttttttttttttttttttgagtatgggcttcctaaaagcaggggctgggacttacccatctttgcctcttccacagcatctagcataatgacatgaatgcagtaagtgtgcaataaatgtgtgctgaataaattcaggaattcatgaaggttcacttccattttcctccaatgtgttttggcagagtgtcacttgctcattattaatcctgaaactttaatgaagtttgttttcttgggccatatgtgggggctcatgcctgtaatcccagcactttgggaagccaaggtgggaggatcgctttgagctcaggagtttaaaaccagcatgggcaacatagcgaaaccccatctctacaaagaaacaaaaattagccaggctttggcggcgtgcacctgtagtcccagctacttgggaggctgaggcttgagtccaggaggtggaggttgcagtgaaccgagaccacaccactgcactccagtctgggtaacagagtgagactctatttcaacaacaacaacaaaaaatttgtcttctttttctgtgagtatatgccaggcacacagtaaataattttgagtcctgggtgtaataggactcaaattgtagtggaaagtgaataggtgaacttttttatgcttacaggcatatttttcttaaaatatgcagttattatccaaatgaaaaggtgtcttagaaaattaactgtttacagttctcattgcccatattttacttctgaaaacaaagaaactgaaagtaaataataatgtacctctgggaactcacatgaagaggaaagaagacaggtttacacccgggttcaaatcccagctctgccatcttccgatttgtgcagcctaggctaagttgtttaacttatttgcacttccatctttatctctggctgtcagcatcttgatagactgtttcttgctcatctttgaatctcccattcctaaaatgatactttggaaatagacattcactcaatattggatgaatggatggaaggaaggaaattaccttatccattctattttgggagttttctgggatgactgtaaaagcagagcatgttcaacccattttattttccttttcaagttcacaaactgatattttagttatggggtgctttcattgatttttatggtagccatactctttgttaggtcatatttatatgccaaggatgccttgtctcaaatcttgcagattcatctgcagctataataatccagttcattataagatactatatttggggggttatttgggattttggggttttttttttttttttttggacacagagtctcactctgttgcccaggctggagtgcagtggcatgatcttggctcactgcatcctccacctcctgggttcaagtgattctcgtgccttagcctcctgggtagctgggactacagttgcacaccaccatgcccagctaatttttgtatttttagtaaaggtggggttttgtcatgttggccaggctggtttcgaactcctggcctcaagtgatccacctgccttggcctcccaaagtgctaggattataggcgtgagccactgaacctggcctatattttgttttaatgcatatcaaaaaaatattaaagaggtcggttttattttatattttttaagtgtgaaaccttatagaagttaaaattttaagttctagtaaattattaaggtcatggttctatcacccctaaactcaaaaactctcctaacaaataaaatgcagttgctaagttgttgatatttataaggcttaaagtattttgaccaaatgatctttctgtcatttttattattaatctaataataataatgctttttgagaacattatttttttttttctggctctgcctttttagattctggtcaattttgagaactcctggtctcagtggcattcatgtgttttcagacaatgagagggaatctggaaagatttactagtcactcaaatgtgaataaatttagtaggaatttggacaaggaccaaatagtagtaggacttcctttccattaaacattatgtaaagtctttacagagaactcactcactctcaactctgtgggaataatttttaaaagtttacttgttgcttttgcagactaaaacttcatcattttagcaagtaatttggttcacttatttacttagtctttagcattagagagacctgtatttttaaattgcagattttttccttcctcgtcaggaggagtggttatgttctgtaatgctatgcttaagtaaaattacacatttggggtatctaaattggcatgccaaattataggacattttaattgttatgtggatgtgacagattcaattattcttgaactcttttgagaaagctgcccttagcagtgattcacagtagtaaacaaaagattaacaggaaaatgccctttatgaggcttaataaatgtgtccgattaaataccatgggacggaattaactgcaatgtctacatgtagaaaaacaacctgtgtcctgcttggaggttcagcatattctcttaagataaatttactctaaatatggcctaactgaagaactaagtgccacttaacctcagaactgttttcctaggtacgtcatttgggccaattgttcagactctttcttccctctgaaaccattaaccaaagccactaataagtagaaatgcagagttaagagccccttcctccctctttcaatttccagtggacatattaatgagcaataaagcagctaaaaggcaagcagctcaagaaagagaaagaagcaaagaaaggtgattgggaaaacagatattcagccctcagcaatgcagactgggctgccccgtgtgccatgtgggctgtgatcacaggaatttggagctcaatttcttaattggttctttagtcttatccaaagagaaaattggatttctagagatttcttctgtgcagagagcaattatgctaaagctgcttaggtaacagctttttcggctagcctttctctctcggaataataaagtacacccagagccgatttcagaatgcaccttaacctcaccatccagagtttagcccctcttggcagctgacatgttctagaaccttaaagaaattccagaagcatttacttcttttccattgcttagagtctatgaaactggctcggcaattaatttactgtcaggtctctcccatctgatttttatgacattaccctaccttttagataaatttaatttgactttcttaaatcaagaagtttcccaactctgatcatatgtataaatacccctcaaggctgagagtctgagagttaaaagcactaagtaatgataagaacccaaaatgcctttggcagaatataaaatgccacaggactgctgagtgcccagaataatagtctagaactttcattttcttcctttcctataacattatagtaataaaaggtcaggttaggcctttgtttgcttcgtaaaacagggtaatcaaaccatttaaatactatccaggcctaccacccaaacagattctctccctctcctgcccctttccgaaatattgtctctgttataatatgttactgcaaaacattgtgtttcaatgggtttctttctgctgattaacaggttttagattcaggaagactgaaagaatatgatgagccgtatgttttgctgcaaaataaagagagcctattttacaagatggtgcaacaactgggcaaggcagaagccgctgccctcactgaaacagcaaaacaggtgagcgtgctccaaggagttgtaattaaagtttgtctcagcggctccctccgcacaatttggcaccatgggtatggtaacaagcactgtgtacccttttcaattataagcctgcagagacaaagcttcatgagtgggtcttaacggcacgtcccgggttgaagtaaggtctgcaaagagttggcagaagcgggtaggggttggggggtcgagtgtgtgcacacatgtgtgcatgccgtgtgcccaagaagcggagaggtgttagaccagactttttacacatttagactctgtgggttcagattctcatagaaaaaggcatagagcacatagtactcatattctgcaaacccattgcatttcattcttattgataggcaaatgctgttgaggtacatacaggagatttaagagtttgggcaaaaagtgtgggatattgtttattgttctagaatgatctacctagaaaatgttctacctagatctacctagattgcttttggtttctgttttattatttgtaaagaaaactgttacataatactctcactgttgacctgggttttcccctcattctttgttgtttagaattaggcccatatagcccatatgcttcctccaccttctataagaggcagttgtcaggctgggagtggtggttcatgcctgtaatcccagcactttgggaggccaagcaggcagatcacctgaggttgggagtctcagaccagcctgaccaacacggagaaaccccgtctctactaaaaatacaaaaattagctgggagtggtagcacatgcctgtaacaccagctactcaggaggctaggcagaagaatcacttgaaccgaggaggcggaggttgcggtgggccaagatcacgccactgcactccagcctgggcagtaagagcgaaactccgtctcaaaaaaaaaaaaaaaaagatgtaattgccatcaggacaaatcaagaatttataatatgttatagctatagcctgaataatccttgaagtatgtttataaggcattaaagacacgcaggctacgtgatctctttccaacaatggtgatgtggaagtatctcattctacagatgtgataactgcagtttgatttaagggacttagccagatgtcacatggtcacctgtaattcttccttaaaattctgtgaggtgagagttgtattgatggagggagggaaggaacatccaatgttcttggcttagggtggaaggagacttctagcagtacatggtgaggctcccatcaaaactgttcatccataggcagtataatatgggtataattttccttcattgttttctgtatttttcaggttttcatcactgtaggtagaataaaattgcttgtttgtgtgtaatattttaaatatctattacagacaacagaataagaaaataggggccaacatggtgaaaccccatttctactaaaaatataaaaatcagctgggtgtagtggcgattgcctgtaatcccagctactcgggagactgaggcaggaaaatcacttgaacctgggaggtggaggttgcagtgagccaagatcatgacactgcactccagcctgggcgacagagcgagacaccatctcaaaaaaaaaaaaaaaaaaaaaagaccaggcgtgatggctcacacctgtaaccccagcactttgtttgggaggccgaggcgggtggatcacaaggtcaagagataaagaccatcctggccaacatggtgaaatccatctctactaaaaatacaaaaattagctgggcgtggtggcacacatctgtagtcccagctactcagggagactgaggcaggagaatagcttgaacctgggaggcggaggttgcagtgagctgagatggcgccactgcactccagcctggcaacagagcgaaactgcgtctcaaaaagaaaaaagaaaaagaaaatatgttcccatatctaatggtatttctgtattaaagatttatccaaataaaacctaggttgccttcagctcctatttcatctcattctccacagaagtgaggaactatccttgccactgtctgtaggatatttctttgaatcctgcatttatcctcaaaacgattctataaatgcctttgtgtgcacagtattacgctgggcactagcaaatacattaaacatgcccctagtcattgacaatataagccaaagaatagagcagagcagagatttgattgatgtggtgagccctgatggcaatgatgatgatgatgatatgtgtcagatgtgcactgtgcacttctcattatgcctgtttaagaggctgaggcatagagagggaaggaaattgcccatgatctcatagctagcagaattataggcagagtccggattcaagcctggctttaggatcgacaaaaatctgtgttctgaattttcataagaatcacattgtgtatgaataaagagggaagctgtacttgaagcactgtatttcttttatacttgaaatttacagaatacttttatcttctagcgtgtctcccagccaaagcttccctcataaaacccgatcaatcatttgggattccctgtataatctagtcacaaaagagccaggaacctcaaaaaccctttttgttctttggtacctcaggcatttcacatcaaagagatgtgtccctatctatatatcaaaatacctatttaaaaaatatgttatatattatcaaggcatggagtaataagaaataggtcatagaattttagcatgttccaactaacataagataatatagttcacctttgttttacagatgaggaaactaaggccccaagaagtaagtgggccctgactaatttatagcagagacagaattaggaatctttttttaaatcaatgtttaatgcaagtataacatacatatagaaagggacattggtcatagaattgaaatctcaattactggtccagtaatcttccatctaattcaacaatattaatcgtaacttacgttcgtatagttctttataatttattttacattgtttacatagttcttacatgtatgattctacttaatcctcacagcagtctgtaagtcttactgtattgatgaggatgttgggtcatgtgtcttcatgtggacacagagctggtccgtggagaacagaaggtagattgctgggggaggccgatgtcttcccctaagtagcgttctgtgtcaagcctgaaaacgctgctccttgtctcatttggtatccaagatgcagctagtcgcccaaattcacacagtggcagaatttccttcctggattttagtcctgcctaaccactggctcaggtcacctcctctacagaaagacataaggaaatacacagcttgattctcatccaagttgaatattttcttgacatttctgcatacacttggtcctcttaggagaacaagctgtcagattgtcaaccttttaaatgtgcaagcatcaaatatcaatgcatcattcacaactgtaacaccatgaggattagtctaaatcaacaagcttttcgctctcacagattagaattcatttgttggaaggaaaactcaacatctgggaaaaggtacttccaagtcacgtattcttgaccacggagttgctttcctgaaaatgctggtgcaggcaaagctgagtctctcttttgactgacctttgcagatgactcagtattttaatattttaaagtaaatttaaattacataattacatttcaggtacataaagctgaagggtgcactggtttgctcaggctgccatagcaaagtagcacagactagctggcttaacccacagcagattatgttctcacacttccgtgctggagtctgagatcagggtgtcagcagagctgctttcctctgaggcctctctccttggcttgcagatggctatatgttcacggggtctgttcacggggtcttttctctgtgtatgtctgtgtcctgatcacctctttctctaaggacaccagtcatattggatcagggcccaccctaaaggcctcattttaacttaattacacctttaaagactttctccaaatacagtcacattctgatgtacttgggggttaggacttcaacataggaatttagggggatgcaaatcagcccataacacagggtaaattcaatcattgtcttccctgatgaagccgacctaatttgaggttcccagtgagtaacagaggtgccattttatgcactcatgaaattgccagatacaactcaaaagttatgaaatcctggccaggtgtggtggttcacacctgtaatcccagcactttaggaagttgaggcgggtatatcacttgaagtcaggagttcgagaccagcctggccaacatggtgaaaccctgtctctactaaaaataaaaaaattagccaggcatggtggcgcatgcttgtaatctcagctactcgggaggctgaggctggagaatcacttgaacccaggagatggaggttgcagtgagcctacgtcacacgactgcactctagcctgggcggcagagcaagactccgtctcaaaaaaatatggatggatggatggatggatggatggatggatggatggatggatggatagatagacaagaagtcctgacatcctggatcctaggagcctggggcctgtttgaataggtggaggagacacttagcagccaatggccttacagaagtcacccaaggcctgtgagcctcagaggcctcacctgtcatgccaggattgcagtactgctccggtttcttcactgttaacatgtattaaatgagatagtgtatgtttaagtgagtcaaagaatataaggtgttttacaaatataagcgaattctagctattggttataaaagctcagtacttttttaagactgtagactgaactcttagctcccaataatagcaaaagaagtatccaaagttttgtagctttatagactaaataattacaaattatttttaagaatcagcttaccaaatgatatatgctcatgttacaaaattcaaagcattgatagttttgcaaaaaactttaataagtaaaaagtaagtcactctgccacacctgcctttcatcacgcagttcctctgccaggtttcagccctggcannnnnnnnnnnnnnnnnnnnnnnnnnnnnnnnnnnnnnnnnnnnnnnnnnnnnnnnnnnnnnnnnnnnnnnnnnnnnnnnnnnnnnnnnnnnnnnnnnnnnnnnnnnnnnnnnnnnnnnnnnnnnnnnnnnnnnnnnnnnnnnnnnnnnnnnnnnnnnnnnnnnnnnnnnnnnnnnnnnnnnnnnnnnnnnnnnnnnnnnnnnnnnnnnnnnnnnnnnnnnnnnnnnnnnnnnnnnnnnnnnnnnnnnntttttaaagcagtttcactcctgttgcccaggctggacctctatggtgcaatctcagctcactgcagtctccatcaagtgattctcctgcctcagcctcctgagtagctgggattacaggcgcccaccaccatgcctggctaatttttttgtatttttagtagagatgggtttttaccatgttggccaggctggtcttgaacttctgacctcaggtaacccacccaccttggcctcccaaagtgctgggattacaggcgtgagccaccatgaccggccagttacctcattttttaatggctacctagtatttatactttttccactctgtacttttcacttttcccaattaacttccaattaagttagctatttttgtttttttcctggtgaatgacttatcagatttatttactagtttatattctgtttcccagttgatcagtttctgcttttatctttattacctttgttttttggtttttctcgttgcttcttcttgaatgcatttgtgtccattctttcttccttagtattttagcgctgtgaattttcgtattctgttggttttgatatgtagtgctttcactcatagtttattttttatttatacattctgcaattttggattttaattttctctggcccagaaattattgaagagggaagtttttaaaactttttggtggtagcggtttgttttttctgttcatttcttttctgttttacgcatcagtttcattttcattgcatgtcatccatatcctttctatccatttggaattttctttgtgtcctagtttttctagatgttctttgggcattgaaaagatggtgttatctgtttaaggtatagagtttaataaggtttaattagttctactttgttaattacattcttattaatccttatttatattggtctattttctgtgacttggatctagaggtgaattagtttcacactgtacatatttctctttgtagtacctgtcatttttgttttggtaactttgatgctatggttttcagtccacagatgttcataacttgggtttccactatgaattatatttcctgccattttaacacacctttctttgattcgtgtaatggttttggtcctaaatccacactggttcaaaactagactgggtcgcgtgcttttactttgctttctttgtctgctatatatgggattgtctttgaatatccaaaggtgtgtctcctgtatatggcgtggttaggttttactctgaggtttaatcttagcctttgtttttaatagatgattttagtacatttacatttattgagattataagtatgttttgtcttagttctgtcatgttatgctttcagtttttagtattcctttttaccttttaatttgtagtagataatttttgtttctttgaatattgttttgcatgtgttccttttgtttcctctaaatgctgtttcttgactccccattataaacaataacaatataaatacacttctgtctccatcctaccaccaaattttagcttagtttttcttctatttgccttcaaaccccaaatatacttaagcctctgttatttggcttttctttaaatgatactttctccatcttttagttagctaaagtttatccttcagtgctttttaaacctcaggctacaacccactagtggtgctgtggaatcaatttggtccatcatgactagtgtgttttaagatgtaaaatagaatacaatggaatagaagaaaaataacatgtatctttcatagtaatggtaatattttttgaaatgcttttcagtatagatacagatataggtagtggatgcgtaccaagtccctgtgtacagtgaaatgtgccacccattattgtgggtggcagtttaaaaaaaaaaagttgcaaaacaatgctctataccatctcaaagggaaaggttccttggaatttagaatccctgacttattgcatgtctgaaatctttgttacccctctgatttaaatgtggtggctgtaccatggcacacatttacctatgtgacaaacctgcacgttctgcacatgttatcctggaatttaacataaaaataaaaattttaaaaagttgtggatataaaattattgggtcacaccttctttcacttagtatgttgcagcctttgctctaaggtcttctcgtgttgtctgttcatatggagacatctatgaccatgtttgacacaactcagccttttttctttctttctttctttttcttttttttttttgagacagggtcttgctctgttgtccaggctggagtgcagtggcacaatcatagctcactggagccttaacctcccaggctcaagcaatgctcccttctcagcctcccttaaagctggaactagaggcacatgccaccatacctggctaattttttttccccccatagagacaaggtctcactgtgttttccatgctggtcttgaactcctgggcttaaaccatcatcccaccttggcctcccaaagtgctgggattacagatgtgtgccactatgcccagccagatcttttttcttgtatgctgaaagggtcattagttttcctaggacattattgtgcagtctttcagactttgattcaagttttcttttttttctggaagtttacttgaattatatccttgaatttttttatttgattatattctcttctttacaaatatctatcatgtatatgttttatgtcctttgtctattttgtaaagctattttctccttaatcctttttagttctttattaacttttagttattttgtttgtttgctcaatcctatcctgtgtctcacactgttttttcagcattggctaatctttgtgctgccttcagtagaaatgccacttatttttttattttttattttcccttttttgagacagagtctccgtctattccacaaactggagtgcagtggcgtgctcttggctcactgcaccctccaactcccggttcaagcaattctcatgcttcagcctcccaagtagctgggattacaggtgtgcgccatcacaattggctaattcttgtagttttacaagatttcattatgttcattatatgatacaagttttcattatgttggccaggctggcctcgaactcctggccctcaagtgatcctcccacctcagcctcccaaagtgctgggattacaggtgtgagccattgcacctagcccatttctttgatattttcacttttcttttccacttcacttttgaccactgtcaactcatgtttcagcatcttctgttgctctgccatgttttcctgtatttttgtatctctgttatgcacagcctgatcattctgctgcattttctttgaatgaattatattcataaactctatgtgctcaacatttgtcatgtgtttatcttacttcatttcttatttgtataatctccaggccctgtactactcttaaaattataataataatttttattattcctactcctcacctatgactaaaacgaactcttcctagaccagatagttacaggatagttgtggctagggccttgtttctggctaaagggaatttttctgtgcttaatgtagaagtactttatgacccagagaggctgcgtgtgtggtgggggggatgcagggagggatgtgagtgtgtatgtgtatgggtgtatgggtgtgtgggtgtgtgggtgtgtgtgggggggttggggtgccccatgggtgtgtggtgggggtgtgtgtgagggagggtgtgtgtgggggnnnnnnnnnnnnnnnnnnnnnnnnnnnnnnnnnnnnnnnnnnnnnnnnnnnnnnnnnnnnnnnnnnnnnnnnnnnnnnnnnnnnnnnnnnnnnnnnnnnnnnnnnnnnnnnnnnnnnnnnnnnnnnnnnnnnnnnnnnnnnnnnnnnnnnnnnnnnnnnnnnnnnnnnnnnnnnnnnnnnnnnnnnnnnnnnnnnnnnnnnnnnnnnnnnnnnnnnnnnnnnnnnnnnnnnnnnnnnnnnnnnnnnnnnnnnnnnnnnnnnnnnnnnnnnnnnnnnnnnnnnnnnnnnnnnnnnnnnnnnnnnnnnnnnnnnnnnnnnnnnnnnnnnnnnnnnnnnnnnnnnnnnnnnnnnnnnnnnnnnnnnnnnnnnnnnnnnnnnnnnnnnnnnnnnnnnnnnnnnnnnnnnnnnnnnnnnnnnnnnnnnnnnnnnnnnnnnnnnnnnnnnnnnnnnnnnnnnnnnnnnnnnnnnnnnnnnnnnnnnnnnnnnnnnnnnnnnnnnnnnnnnnnnnnnnnnnnnnnnnnnnnnnnnnnnnnnnnnnnnnnnnnnnnnnnnnnnnnnnnnnnnnnnnnnnnnnnnnnnnnnnnnnnnnnnnnnnnnnnnnnnnnnnnnnnnnnnnnnnnnnnnnnnnnnnnnnnnnnnnnnnnnnnnnnnnnnnnnnnnnnnnnnnnnnnnnnnnnnnnnnnnnnnnnnnnnnnnnnnnnnnnnnnnnnnnnnnnnnnnnnnnnnnnnnnnnnnnnnnnnnnnnnnnnnnnnnnnnnnnnnnnnnnnnnnnnnnnnnnnnnnnnnnnnnnnnnnnnnnnnnnnnnnnnnnnnnnnnnnnnnnnnnnnnnnnnnnnnnnnnnnnnnnnnnnnnnnnnnnnnnnnnnnnnnnnnnnnnnnnnnnnnnnnnnnnnnnnnnnnnnnnnnnnnnnnnnnnnnnnnnnnnnnnnnnnnnnnnnnnnnnnnnnnnnnnnnnnnnnnnnnnnnnnnnnnnnnnnnnnnnnnnnnnnngggtgtgtggggggtgtgggggtgtgtggtgtgggtgtgtgtgggtgtgtgtgtgtatgtgaaattgagagtgcatgtcctgcctttcttcctccttagcttacagaatacgggcaattgcaatctgtcttctgtcaggacctcaccaatgtacataggtcagtcaaagatgtttctaattgattctttattgacataccttagcgctcctccaattaactgggagaattcctatgattgttgaggcttgctcttcatagacatcttctcagccttgccacagccccattggttccagttgcatatggcagcccttcatgatattttaccattcaggctctcctgatttcacaaagatttagcttattttttattaatgaatatctttgatgttcagagtggtttctgaaaggaaaaggagaggaaattcattactccattatattaaaagcagaagtcctttctaagtctccattactctttgacaatatgcatgccaattatgtacaccaaaattagactggctttaaaaatgatgaacttgaggccttgagagttactgtgattgaattagggccatacacatcagtaaaaatgaactgacagggtcttgagcctgaattcaacacatcagatggtatcttaggaatgcaatgtcaatcaaagcccagttgctctcctttgtccacgtgcgggagcttgtattgctctgttgattttagtaaaatctagctctgttacggtggctttactgatgagttagagtttaaatatgaacttagtttcatcctacattagaggaactataatggagcaaactcaagagaagaaggaaaagagggacaaggtttcccatactcactgacctgatactcttcttgccgcaaacgtgaacgcttatggcattgtctcccttaagcttcacagtccttctgacctgctgttattatccccttttgacacatgaaaatgctaaagtacaagaatctgagtaactttttttttttttttttttgttttgagacagtctctcactctgtcacccaggctggagtgtagtgttgcagtctcggctcactgcaatctctgcctcctgggttcaagtgattctcctgcctcagcctcccgagtagctgggactacaagcgtgcaccaccatgcctggctaatttttgtatttttcgtagagatggggtttcaccatgttggccaggctggtctcaaactcctgacctcaagtgatccacctgccttggcctcccaaactgctgagattacaggtgtgagccaccacgcccagcctgagtaagttttcaaagccaccagttcaaaagtgttcatactccatcttctatgatctttcagttctacctttctgcctcccaggttaccatattcattcagttgaaattgtctcagccacagctttgggattctgtaaagataaaagatgcaccagagggattcctaaatgctttgtcttcatccttcgagctgggcgatacctccacgttctgtgtgcttaggggccacttctctgagcagcattcatcatgacacccaacactaatgcagcaggttttcaacctgtagtttgtagccattaatcagttcctgtgacgtaagctattgttatctcatgttacagatgaggcagctggtagagagagtggttaggtaatttttccagaatcagcagtgaatccaggagagagctgagactggacctgtctatcccagacatagcttacaacatgagggctttgctaaaagtagttcagtaatctcaactcccttcatcacctgcactgtaaaaaagatgtttcatctcacctgtgctgttacccatagtgtgttataaaacctggtagcagaagagaaaaagaaaggtcaaatcaaagaatatatacacaggaagtttgtttttgactaagtatttcagaccatgaagctaagaccatttgggtttaaagttgctaataacaacactttctttatatatatttaaaaaaatacatcaagagggttacacagaaggaagcagcctatttggggaaggctatcaagcagtagaaagtgatgtgaatgtctatttgttcttttggctgtttttagtttcactacagaatagcctttttggagtacataaatctataaccacacaaaatatggctagcttaaaaaagtgggagagggagatgatatgaaattatcccctgaaaagtcttacttttgaacacttgcattataatggaaatagcctcagatttcttctggtggcattccagcattattggacaatttattttctccttaagtgacattttagtacattgtgtgttatatgtaatgatatttctggagtaacaagtgtgcaagaagtgagagaaaaagaaagtacacttaatatgtaggcaggtgtctcagcactttcttttttgtacgtgaatcccattatctccagtgataactttgttgacagcacccaccaatatattcagagcaaggttttataaaatagatccagaatcgtatgactaagagacccaggtgacacgtgtcagcctcagatagttgctacattttctgttttaaagattcaaacaaaacttttcacattcttctttggggaaaaaaaattacatttgaagtcctttttcacccaaacacgttttgagataagagctcacaagtcttgacattatttcattttgttatgcgcatctgtcaaggaaccaagatacgatacagctactaaaaactgatgattgtggaacagagaaacttgacagcatttcatttcctttatgttctgattatacgtttatcagaaaacctgtatctcttctagttcagctagaaattggtagaattcaggaactcaaaggcttggcaaagaactgtcctattatttggtatcatcttacattttagagaagttgcttggttgagtcattgttaaagcttttgcttctcttttcattattgtgggccactatccacagaccacatttctataggccctataactgctttgccgcacaaattaaacgccgggatgtttcatacgtatatgccagcatttcaatgcttgtcaatcagagtttataaaatatagggattacaacttgatattaacatccaaatctattgtgctcattttacgtgtgaaaatgagaaaccctcatgcagacgctagatttcccagcctctttgtcaccctgtttttaatttatctccaggttttgagtcagtaaaatgattccgcttatcaatttaatacagagataaaacatatctatgaatcagagtgatcggaactaaaatggatctacaggttgtttggcattcagcccagccctgctgagggttttagtggggctaatttctctgtacagtagattcatccctgttcttaaattgtgcctcagtgagggatatgatttgcttcacatgaagaagtagacacagaagtgcattgtttcagggaggagactttaaaattttgaaacattctttttatgcttaccttttttttttctaggtatacttcaaaagaaattatccacatattggtcacactgaccacatggttacaaacacttccaatggacagccctcgaccttaactattttcgagacagcactgtgaatccaaccaaaatgtcaagtccgttccgaaggcattttccactagtttttggactatgtaaaccacattgtacttttttttactttggcaacaaatatttatacatacaagatgctagttcatttgaatatttctcccaacttatccaaggatctccagctctaacaaaatggtttatttttatttaaatgtcaatagttgttttttaaaatccaaatcagaggtgcaggccaccagttaaatgccgtctatcaggttttgtgccttaagagactacagagtcaaagctcatttttaaaggagtaggacaaagttgtcacaggtttttgttgttgtttttattgcccccaaaattacatgttaatttccatttatatcagggattctatttacttgaagactgtgaagttgccattttgtctcattgttttctttgacataactaggatccattatttcccctgaaggcttcttgttagaaaatagtacagttacaaccaataggaacaacaaaaagaaaaagtttgtgacattgtagtagggagtgtgtaccccttactccccatcaaaaaaaaaaatggatacatggttaaaggatagaagggcaatattttatcatatgttctaaaagagaaggaagagaaaatactactttctcaaaatggaagcccttaaaggtgctttgatactgaaggacacaaatgtgaccgtccatcctcctttagagttgcatgacttggacacggtaactgttgcagttttagactcagcattgtgacacttcccaagaaggccaaacctctaaccgacattcctgaaatacgtggcattattcttttttggatttctcatttatggaaggctaaccctctgttgactgtaagccttttggtttgggctgtattgaaatcctttctaaattgcatgaataggctctgctaacgtgatgagacaaactgaaaattattgcaagcattgactataattatgcagtacgttctcaggatgcatccaggggttcattttcatgagcctgtccaggttagtttactcctgaccactaatagcattgtcatttgggctttctgttgaatgaatcaacaaaccacaatacttcctgggaccttttgtactttatttgaactatgagtctttaatttttcctgatgatggtggctgtaatatgttgagttcagtttactaaaggttttactattatggtttgaagtggagtctcatgacctctcagaataaggtgtcacctccctgaaattgcatatatgtatatagacatgcacacgtgtgcatttgtttgtatacatatatttgtccttcgtatagcaagttttttgctcatcagcagagagcaaccgatgttttattgagtgaagccttaaaaagcacacaccacacacagctaactgccaaaatacattgaccgtagtagctgttcaactcctagtacttagaaatacacgtatggttaatgttcagtccaacaaaccacacacagtaaatgtttattaatagtcatggttcgtattttaggtgactgaaattgcaacagtgatcataatgaggtttgttaaaacgatagctatattcaaaatgtctatatgtttatttggacttttgaggttaaagacagtcatataaacgtcctgtttctgttttaatgttatcatagaattttttaatgaaactaaattcaattgaaataaatgatagttttcatctccattcagagatctgtatttctgtgcttcaagggattcctgactcatgttcttgctgatgaatgccagtgagttttcctgagatcgaaaaatacagtatcaaaggataccttctatcatcaaccggttctcttggcaaattaggtgtaccaagtattctaacgggtagatttcagtgggtttcagacagtttgaagcagttgctatttaagcaagtccatttgcaccattctaggaagaaagagtattagcttatgcctcaggcttgagcagtattaaatggttgaggtttttgcttttggttttggtttttaaggtgactttgtccaaaactaacaagaaacatctaccgctgttacgctgaaatcactattaaataatgattctcaaaatgtggtccctggaccagcagcataccgcatcacctgggaactcgttagaaatgcacctttttgtgcctcaccgcagatctactgaatcagaaactctggtggtgggggccaggaatgtgtgttttaacaagccatagggtgactttttttaaggggccatgctaatctctgtatcattacaattttagtatatgtgctactgaagcgagcgccctaagtgtgattctgatgcaggctaaagtctgagaaccagtaccataaacttaaagaactcttaaaactcattaagaaaaacacagaaagcccaattagagaaatggacaagagatttgaatgggtatttcacaaaagagaatatccaaatggccaataactggaaaagtgctcactctttattagttaccagggaaatgcaaattaaaagcaccatgagataccactagacaccactagaatgtgtaaaatgtaacagactgagaataccaacccagtgccaatgaagcaacaggaattctcaggtactgccatgtaagtacattgaaaaaccatcttcggaaaacaatttgacagcattgactcaaactgcacactctgcgatctgtctgtagcactccaaatgtgtacacatgtgcaccaagagatgttgtcaaggatgttcctagaaacataattcctaacagcccaaacgagataatccaaatactcatcagcagcagaaggaaaacaaattatgaggtattaaaatacttctacagcaatgaaagcaattgactacatgaagaactcatgagtttcacagacatgatatttattccaaagaaacctggcccaaaagattatttatgatcccatttatataaaattcaaaaatgttacagctgaacaaaggagtgcaacaccagaacagttcataactttggggagatggaaggtgttggtaattaggggaaatacacatgaatcttctacgatacttaaaatactttttgtggctgggcatggtggctcatgcctgtaatcccagcactttgggaggccgaggcgggcagatcatgaggtcaggagatcgagaccatcctggctaacacggcgaaaccccgtctctactaaaaatacaaaatattagccgggcatggtggcgggcgcctgtagtcccagctactcgggagcctgaggcaggagaatggcgtgaacctgggaggcggagcttgcagtgagccgagatcgagccactacactccaacctgggcgacacagcgagactccatctcaaaaaaaaaaaaaaaaaatttttgtttggctgggtggtgattagatcgttattaattgaacacttttatgtgtcatacttcacactgagttaactttttaaaaagttggtcttgtttttcctttagaatctcagattcagtgcttcagtcttcaaaaagggaataatttacacgtaggaaattacttctgctgagttcttaaaataagaagctctttgacggttgtcttttgtggtccatcacagctgatgcgtctgatggttttggtacctgagaagccaaggtctatattttctctaaccaataaataaaataaatctcacttcctcttcaattttaggataagtacaaaaataaggaactctaaggtttttctggattctatttgtttaaccactctactgaggtatgactggcatatagaaagttatacatatttaatgtgtatgctttgtgtttggagacaaatatcacctatgaaaccatcaccacattctatgtcataaacatgtccatcacctcaaagtttccacctgctcattttctattttttaatctccattagaggagatgaggtacataaataaaataatttcagggacttggtctcggcaaagatgtatggctaagacttcaaggacaggcaatttaaatagacaaatgggactatattaaactaaaaagcttctgcacagcaaaggaagcagtcaacagagtgaagagacaacctgttgaatgggagaaaatattctcaaagtattcatccaacaagggactaatacctagaatatacgaggaactgcaacaactgaatagtaaaagacccacataattccattaaaaagtggggaaatgacatgaacaggcatttcttaaaagaggacatacaaatgtccaacaaatatatgagaaatgctcaacatcactaaccatccaggaaactcaaatcaaaaccacagtgagatatcaccacaatgagatatcaccttcccctggttagaatggctattattaaaatgagaataaataacggatcctagtgaaaatgcagaaaagagggaacttttacatactgttagtgggaatgtaaattaatagaatcctatggaaaatagtatggagatttcttttttttttttttttttttttnnnnnnnnnnnnnnnnnnnnnnnnnnnnnnnnnnnnnnnnnnnnnnnnnnnnnnnnnnnnnnnnnnnnnnnnnnnnnnnnnnnnnnnnnnnnnnnnnnnnnnnnnnnnnnnnnnnnnnnnnnnnnnnnnnnnnnnnnnnnnnnnnnnnnnnnnnnnnnnnnnnnnnnnnnnnnnnnnnnnnnnnnnnnnnnnnnnnnnnnnnnnnnnnnnnnnnnnnnnnnnnnnnnnnnnnnnnnnnnnnnnnnnnnnnnnnnnnnnnnnnnnnnnnnnnnnnnnnnnnnnnnnnnnnnnnnnnnnnnnnnnnnnnnnnnnnnnnnnnnnnnnnnnnnnnnnnnnnnnnnnnnnnnnnnnnnnnnnnnnnnnnnnnnnnnnnnnnnnnnnnnnnnnnnnnnnnnnnnnnnnnnnnnnnnnnnnnnnnnnnnnnnnnnnnnnnnnnnnnnnnnnnnnnnnnnnnnnnnnnnnnnnnnnnnnnnnnnnnnnnnnnnnnnnnnnnnnnnnnnnnnnnnnnnnnnnnnnnnnnnnnnnnnnnnnnnnnnnnnnnnnnnnnnnnnnnnnnnnnnnnnnnnnnnnnnnnnnnnnnnnnnnnnnnnnnnnnnnnnnnnnnnnnctggccagtatggtgaaaccccatccctattaaaaatataaaaattagccagtacatcgtggcacatgcctgtaatctgtaatcctagctactcggcaggctgaggcaggagaattgcttgaacctgagagacagaggctgcagtgagccgaggtcatgccactgcactccagcctggataacagaataagactctgtcttaaaaaaaaaaaaaaagatgtaccatacaaaccagcaatctcactaactgtgtatttacccaaaggaaaagaaacatatatttctttcatcagtatatcaaagggatacctgcactcttacatttatcatagcactattcacaatagcaaaaatatggcatcaacctaagtgtccatcaatggatgaaataattttttatatgatgtacatatatgtaccatgcaatactattcagccataaaaaaaagaatggaaccatgtcatttgcagcaatgtggatggaactagaggtcattctgttaagtgaaataaggcaggaacaaaaagacaaataccacatattctctcatattggagctaaaacatttaatctcttggaaatagagaatagaatcatagataccagaggctgggaagggtgggtgggtgagagagggaggctggttaatgggtatgaacacaagtagaagaaagaagttctaatgtttaatagcagcctagggtgactatagttagcaacaatacattatatatttcaaagtaactagaagagaggacttgaaatgttaccagcacatagaaatgataaatactgaaggtgatagataccctcaaatgccctggcttgataattacacattctatgcatgtaacaaatacatgtatcccataaatatgtaattttaaaaatatatactatgtatcaatagaagaaataatgctaagtgcttttattaataacactataagtggttgatgtcttgtgaagaaacaactttaatcaattcaatgagtcagtgaattagatttattatgtagtattgttcaatttagtgagttgagttaatattaatttatcagctgattaacttgtccttatgtactgcaatgaaaattcgtgtttttctttcagagggtttgactgtggagattttagaagcctgtcttctcaaatctcggtatttgtttcaaatcccgttctcaaaagattaatgtatgccctgaagtatgttagattttgcacctgaatgaatgtgtaagtcacttcccacaaccaattctgttttagagcgttttcaagatctgcctttacctagaagactgtatgacattctggccatcacagctcaaaataatgtctttataattccacaaatgtgatatgcattactaatggacttattttactaaaagcaaagagagaaatctatcacctgaaataaagaaaactaagaatgttcaacaagtaatgctcatcctaaaagccatgtctatgctcaacccaacttattcaccaaatggtctaattctcaaatcctcattctttgaaaattgagtaaatgtgtgtcaatgaaatacttccaccctacttgataaatagtatagttatggactacattattccccaaatatagattgaaaaacaaatagttttcctcaaaaattgtaataaactcatggtttaatttccacaaaatatgttatatgtgttttaatggatatgttgatccttatcaaatggaagttttcaacccagagggtaattcattcacatacagagtccttgtttccactattttatatcggatttcaggatttagaaataagtgttatgattctgcagaagctagatgggggttgggaagaaataagtcttacgaatataactaacagttttcaagtaaaaatcctccccaagccctagaagcttctttggtctgtgctgcagtttgattatctgggatgcagactctgagatggagtttggtgttccggatgtttattacagagttacccttggaattaatccttgtggaatgaagagggaagaagcaggattgggtggatggagaaattgagctggagtgctagccagagagaccagctgatcccaccaggaaccctggagctaaaatggtccatgagggtcgtcctgtgtgccaatggccagggctttctccctccaccttgattagtcattgcatgagggctgtccccaaaaggggtgacagcagaaggttgcccagcaactacacctccagaagctgggacaagtccttgaagggggtgatgggtggcacatctccatgtccaccacagtgtatgttccagctctggagggagattattgaggtgttcagtggcagaagactcctggtgattggcatttaagtcaaaatgaattgccagttgacaggagatggctgatgaagtgattgtcttcaacaacctatgacctgaaaaagagaagagaaggtccatgcaggggaaatatcctcgttgtctttattctctaaaatcagccgtgttcatttattccaggaagtgatcttacgagcagtcttcggattggctaactcctatgtatgtcgataataccctgagcacccctcattacaatgaatcatagctggggtctgcagtgtgcaggactcctgcttagaaggacccagcacttagtttaatgccctgttttcgccatctagatattctgaagttttaaacaaagggccctgcttttgtattttgcactgggatctataaattatatatgctgccctgagtatttgtggttctgtttcctctctaaaccatgagcttctgaggacttggaccatgccctgttgattttaaaatctgcatcttctagcacaatgtctgtcacatcgtgggtgctcataaatgtttgctgagtgaatggataatgactgggaagaagccttcctttaaactgtaattctgagatttaagggagtatcctggggtagtagaaagatccctagtttgggggtcaatcccatatatctggcagccaattctgtcttagctactccctagcaatgttgggtgatcaaagtatatgctgtccgatgtcggagacttttgagagtgaaaagaaagcactaaccagccatggtgccagggcaataaattgggactgtccttgacaaatggggatatggccaccctatagccatgtatccttggttacatgcttggataagtttctgtctctatgaacctcaactgcttcatctgtaaaatggacatagttcctgaacttgcacagttgctttggttgggatgattggtggaccaagagcatccaacagaacagaaaggttaggacctagagggaaatgcattgagtttgtatagtaagaaggtcccttcttccatcatgagaggagagtaagataaatgtggatgaaggtaggtttgtaaactgtagaaggtgtatttcaggaggtcctcaccatggcctaaaccgaactgttcttactttacatagagttaaaatgaaacaagcacacacgagaaggagcccaagctctggagtccaccttcctgggtccgaatgctggctcctctgtgcagtgggagtggctgcctgggtttgagtccaagttctactacctgttaattgttggcccttgtgttgggaagcacactatgcttccatttctttttctgtaaaattgaggttggggtggtacttttctcagagggctgttgggaggatgaaatatgaaggacgtactctacaacagtgacgctcaaagcatggtctgtgggctagtgccaggccatgaactgttcgtaacctcaggccacaataagtacaggaatttcaggaaagccattagaaacctttataggcttttgactttgccatgacatccaaactcatgattgggggactccttgtggagcagccaagagtttgttgaacctggataatgaggcatgtgtggtgtgagtagcacattagccatgcacagtagaactacttattagtttgcaatggattgaaaatttaaaataattaaataaaacctattcttaaccccagataattgagaagcaccattttagaacaatgcctggtgtgcaattagctctcagtaaacacaagcctctttattaatcagggaaaaattataccatgacttacatgtttaaaattaggctacacagactttccaaatgctctactatacattagcaatattctaaaatagcattaaaagccaaaatcctgctcattgttaattagggatgtgtaaagtctaaaagtattttaaaaacgatgctatgcatatgtttacaccaagtctattcttgaattaacagcatgatcttgatgttgaaggtggtagctgggtacacatcaggccacttgtaaaagtggggaacatggggccgggtgcggtggctcatgcctgtaatcccagcactttgggagaccgaggcagacagatcacctgaggtcgggaattcgagaccagcctgaccaacatggagaaaccccgtctctactaaaaatacaaaattagccaggcatggggtcctgcgcctgtaatcccagctacttgggaggctgaggcaggagaattgcttgaaccagggaggcggagattgcagtgagccaagatcgcaccattgcactccagccagggcaacaagagcgaaactctgtctcaaaaaagaaaaggggggggggaacacgggttgatatgcagggtattgactttcctttaaaaacagaaagaatgtgggttaactgaggttttgctttttaaatgtaatgttctaaagaaaataacctcatcttttcaaaaataaagcagcagtgtagattga

SEQ ID NO: 59 - DNA, 3913 bp, Homo sapiens
tgttaacaggtggctcaatcccttgtttaaaattggccataaacggagattagaggaagatgatatgtattcagtgctgccagaagaccgctcacagcaccttggagaggagttgcaagggttctgggataaagaagttttaagagctgagaatgacgcacagaagccttctttaacaagagcaatcataaagtgttactggaaatcttatttagttttgggaatttttacgttaattgaggaaagtgccaaagtaatccagcccatatttttgggaaaaattattaattattttgaaaattatgatcccatggattctgtggctttgaacacagcgtacgcctatgccacggtgctgactttttgcacgctcattttggctatactgcatcacttatatttttatcacgttcagtgtgctgggatgaggttacgagtagccatgtgccatatgatttatcggaaggcacttcgtcttagtaacatggccatggggaagacaaccacaggccagatagtcaatctgctgtccaatgatgtgaacaagtttgatcaggtgacagtgttcttacacttcctgtgggcaggaccactgcaggcgattgcagtgactgccctactctggatggagataggaatatcgtgccttgctgggatggcagttctaatcattctcctgcccttgcaaagctgttttgggaagttgttctcatcactgaggagtaaaactgcaactttcacggatgccaggatcaggaccatgaatgaagttataactggtataaggataataaaaatgtacgcctgggaaaagtcattttcaaatcttattaccaatttgagaaagaaggagatttccaagattctgagaagttcctgcctcagagggatgaatttggcttcatttttcagtgcaagcaaaatcatcgtgtttgtgaccttcaccacctacgtgctcctcggcagtgtgatcacagccagccgcgtgttcgtggcagtgacgctgtatggggctgtgcggctgacggttaccctcttcttcccctcagccattgagagggtgtcagaggcaatcgtcagcatccgaagaatccagacctttttgctacttgatgagatatcacagcgcaaccgtcagctgccgtcagatggtaaaaagatggtgcatgtgcaggattttactgctttttgggataaggcatcagagaccccaactctacaaggcctttcctttactgtcagacctggcgaattgttagctgtggtcggccccgtgggagcagggaagtcatcactgttaagtgccgtgctcggggaattggccccaagtcacgggctggtcagcgtgcatggaagaattgcctatgtgtctcagcagccctgggtgttctcgggaactctgaggagtaatattttatttgggaagaaatacgaaaaggaacgatatgaaaaagtcataaaggcttgtgctctgaaaaaggatttacagctgttggaggatggtgatctgactgtgataggagatcggggaaccacgctgagtggagggcagaaagcacgggtaaaccttgcaagagcagtgtatcaagatgctgacatctatctcctggacgatcctctcagtgcagtagatgcggaagttagcagacacttgttcgaactgtgtatttgtcaaattttgcatgagaagatcacaattttagtgactcatcagttgcagtacctcaaagctgcaagtcagattctgatattgaaagatggtaaaatggtgcagaaggggacttacactgagttcctaaaatctggtatagattttggctcccttttaaagaaggataatgaggaaagtgaacaacctccagttccaggaactcccacactaaggaatcgtaccttctcagagtcttcggtttggtctcaacaatcttctagaccctccttgaaagatggtgctctggagagccaagatacagagaatgtcccagttacactatcagaggagaaccgttctgaaggaaaagttggttttcaggcctataagaattacttcagagctggtgctcactggattgtcttcattttccttattctcctaaacactgcagctcaggttgcctatgtgcttcaagattggtggctttcatactgggcaaacaaacaaagtatgctaaatgtcactgtaaatggaggaggaaatgtaaccgagaagctagatcttaactggtacttaggaatttattcaggtttaactgtagctaccgttctttttggcatagcaagatctctattggtattctacgtccttgttaactcttcacaaactttgcacaacaaaatgtttgagtcaattctgaaagctccggtattattctttgatagaaatccaataggaagaattttaaatcgtttctccaaagacattggacacttggatgatttgctgccgctgacgtttttagatttcatccagacattgctacaagtggttggtgtggtctctgtggctgtggccgtgattccttggatcgcaatacccttggttccccttggaatcattttcatttttcttcggcgatattttttggaaacgtcaagagatgtgaagcgcctggaatctacaactcggagtccagtgttttcccacttgtcatcttctctccaggggctctggaccatccgggcatacaaagcagaagagaggtgtcaggaactgtttgatgcacaccaggatttacattcagaggcttggttcttgtttttgacaacgtcccgctggttcgccgtccgtctggatgccatctgtgccatgtttgtcatcatcgttgcctttgggtccctgattctggcaaaaactctggatgccgggcaggttggtttggcactgtcctatgccctcacgctcatggggatgtttcagtggtgtgttcgacaaagtgctgaagttgagaatatgatgatctcagtagaaagggtcattgaatacacagaccttgaaaaagaagcaccttgggaatatcagaaacgcccaccaccagcctggccccatgaaggagtgataatctttgacaatgtgaacttcatgtacagtccaggtgggcctctggtactgaagcatctgacagcactcattaaatcacaagaaaaggttggcattgtgggaagaaccggagctggaaaaagttccctcatctcagccctttttagattgtcagaacccgaaggtaaaatttggattgataagatcttgacaactgaaattggacttcacgatttaaggaagaagatgtcaatcatacctcaggaacctgttttgttcactggaacaatgaggaaaaacctggatccctttaatgagcacacggatgaggaactgtggaatgccttacaagaggtacaacttaaagaaaccattgaagatcttcctggtaaaatggatactgaattagcagaatcaggatccaattttagtgttggacaaagacaactggtgtgccttgccagggcaattctcaggaaaaatcagatattgattattgatgaagcgacggcaaatgtggatccaagaactgatgagttaatacaaaaaaaaatccgggagaaatttgcccactgcaccgtgctaaccattgcacacagattgaacaccattattgacagcgacaagataatggttttagattcaggaagactgaaagaatatgatgagccgtatgttttgctgcaaaataaagagagcctattttacaagatggtgcaacaactgggcaaggcagaagccgctgccctcactgaaacagcaaaacaggtatacttcaaaagaaattatccacatattggtcacactgaccacatggttacaaacacttccaatggacagccctcgaccttaactattttcgagacagcactgtga

SEQ ID NO: 60 - protein, 1303 aa, Homo sapiens
VNRWLNPLFKIGHKRRLEEDDMYSVLPEDRSQHLGEELQGFWDKEVLRAENDAQKPSLTRAIIKCYWKSYLVLGIFTLIEESAKVIQPIFLGKIINYFENYDPMDSVALNTAYAYATVLTFCTLILAILHHLYFYHVQCAGMRLRVAMCHMIYRKALRLSNMAMGKTTTGQIVNLLSNDVNKFDQVTVFLHFLWAGPLQAIAVTALLWMEIGISCLAGMAVLIILLPLQSCFGKLFSSLRSKTATFTDARIRTMNEVITGIRIIKMYAWEKSFSNLITNLRKKEISKILRSSCLRGMNLASFFSASKIIVFVTFTTYVLLGSVITASRVFVAVTLYGAVRLTVTLFFPSAIERVSEAIVSIRRIQTFLLLDEISQRNRQLPSDGKKMVHVQDFTAFWDKASETPTLQGLSFTVRPGELLAVVGPVGAGKSSLLSAVLGELAPSHGLVSVHGRIAYVSQQPWVFSGTLRSNILFGKKYEKERYEKVIKACALKKDLQLLEDGDLTVIGDRGTTLSGGQKARVNLARAVYQDADIYLLDDPLSAVDAEVSRHLFELCICQILHEKITILVTHQLQYLKAASQILILKDGKMVQKGTYTEFLKSGIDFGSLLKKDNEESEQPPVPGTPTLRNRTFSESSVWSQQSSRPSLKDGALESQDTENVPVTLSEENRSEGKVGFQAYKNYFRAGAHWIVFIFLILLNTAAQVAYVLQDWWLSYWANKQSMLNVTVNGGGNVTEKLDLNWYLGIYSGLTVATVLFGIARSLLVFYVLVNSSQTLHNKMFESILKAPVLFFDRNPIGRILNRFSKDIGHLDDLLPLTFLDFIQTLLQVVGVVSVAVAVIPWIAIPLVPLGIIFIFLRRYFLETSRDVKRLESTTRSPVFSHLSSSLQGLWTIRAYKAEERCQELFDAHQDLHSEAWFLFLTTSRWFAVRLDAICAMFVIIVAFGSLILAKTLDAGQVGLALSYALTLMGMFQWCVRQSAEVENMMISVERVIEYTDLEKEAPWEYQKRPPPAWPHEGVIIFDNVNFMYSPGGPLVLKHLTALIKSQEKVGIVGRTGAGKSSLISALFRLSEPEGKIWIDKILTTEIGLHDLRKKMSIIPQEPVLFTGTMRKNLDPFNEHTDEELWNALQEVQLKETIEDLPGKMDTELAESGSNFSVGQRQLVCLARAILRKNQILIIDEATANVDPRTDELIQKKIREKFAHCTVLTIAHRLNTIIDSDKIMVLDSGRLKEYDEPYVLLQNKESLFYKMVQQLGKAEAAALTETAKQVYFKRNYPHIGHTDHMVTNTSNGQPSTLTIFETAL

SEQ ID NO: 61 - DNA, 43633 bp, Mus musculus
  misc_feature (1)...(43633): n = A,T,C or G
aatagaagcagttataaatagtctcccagccaaaaaaagcccaggaccagacgggtttagtgcagagttctatcagaccttcaaagaagatctaattccaattctgcacaaactatttcacaaaatagaagtagaaggtactctacccaactcattttatgaagccactattactctgatacctaaaccacagaaagacccaacaaagatagagaacttcagannnnnnnnnnnnnnnnnnnnnnnnnnnnnnnnnnnnnnnnnnnnnnnnnnnnnnnnnnnnnnnnnnnnnnnnnnnnnnnnnnnnnnnnnnnnnnnnnnnnnnnnnnnnnnnnnnnnnnnnnnnnnnnnnnnnnnnnnnnnnnnnnnnnnnnnnnnnnnnnnnnnnnnnnnnnnnnnnnnnnnnnnnnnnnnnnnnnnnnnnnnnnnnnnnnnnnnnnnnnnnnnnnnnnnnnnnnnnnnnnnnnnnnnnnnnnnnnnnnnnnnnnnnnnnnnnnnnnnnnnnnnnnnnnnnnnnnnnnnnnnnnnnnnnnnnnnnnnnnnnnnnnnnnnnnnnnnnnnnnnnnnnnnnnnnnnnnnnnnnnnnnnnnnnnnnnnnnnnnnnnnnnnnnnnnnnnnnnnnnnnnnnnnnnnnnnnnnnnnnnnnnnnnnnnnnnnnnnnnnnnnnnnnnnnnnnnnnnnnnnnnnnnnnnnnnnnnnnnnnnnnnnnnnnnnnnnnnnnnnnnnnnnnnnnnngcccgtacctaaacatgataaaagcaatctacagcaaaccagtagccaacatcaaagtaaatggagagaagctggaagcaatcccactaaaatcagggactagacaaggctgcccactttctccctaccttttcaacatagtacttgaagtattagccagagcaattcgacaacaaaaggagatcaaggggatacaaattggaaaagaggaagtcaaaatatcactttttgcagatgatatgatagtatatataagtgaccctaaaaattctaccagagaactcctaaacctgataaacagcttcggtgaagtagctggatataaaataaactcaaacaagtcaatggcctttctctatacaaagaataaacaggctgagaaagaaattagggaaacaacacccttctcaatagtcacaaataatataaaatatcttggcgtgactctaactaaggaagtgaaagatgtgtatgataaaaacttcaaatctctgaagaaagaaattaaagaagatctcagaagatggaaagatctcccatgctcatggattggcaggatcaacattgtaaaaatggctatcttgccaaaagcaatctacagattcaatgcaatccccatcacaattccaactcaattcttcaacgaattggaaggagcaatttgcaaattcgtctggaataacaaaaaacttaggatagcaaaaagtcttctcaaggataaaagaacttctggcggaatcaccatgccagacctaaagctttactacagagcaattgtgataaaaactgcatggtactggtatagagacagacaagtagaccaatggaatagaattgaagacccagaaatgaacccacacaccttatggtcacttgatcttcgacaagggagctaaccatccagtggaagaaagacagcattttcaacaattggtgctggcacaactggttgttatcgtgtagaagaatgcgaatcgatccatacttatctccttgtactaaggtcaaatctaagtggatcaaggaacttcacataaaaccagagacactgaaacttatagaggagaaagtggggaaaagccttgaagatatgggcacaggggaaaaattcctgaacagaacagcaatggcttgtgctgtaagttcgagaattgacaaatgggacctaatgaaactccaaagtttctgcaaggcaaaagacaccgtcaataagacaaaaagaccaccaacagattgggaaaggatctttacctatcctaaatcagataggggactaatatccaacatatataaagaactcaagaaggtggacttcagaaaatcaaataaccccattaaaaaatggggctcagaactgaacaaagaattctcacctgaggaataccgaatggcagagaagcacctgaaaaaatgttcaacatctttaatcatcagggaaatgcaaatcaaaacaaccctgagattccacctcacaccagtcagaatggctaagatcaaaaattcaggtgacagcagatgctggcgtggatgtggagaaagaggaacactcctccattgttggtgggattgcaggcttgtacaaccactctggaaatcagtctggcggttcctcagaaaattggacatagtactaccggaggatccagcaatacctctcctgggcatatatccagaagatgccccaactggtaagaaggacacatgctccactatgttcatagcagccttatttataatagccagaagctggaaagaacccagatgcccctcaacagaggaatggatacagaaaatgtggtacatctacacaatggagtactactcagctattaaaaagaatgaatttatgaaattcctatgcaaatggatggacctggagggcatcatcctgagtgaggtaacacattcacaaaggaactcacacaatatgtactcactgataagtggatattagccccaaacctaggatacccaagatataagatacaatttgctaaacacatgaaactcaagaagaatgaagactgaagtgtggacactatgcccctccttagaattgggaacaaaacacccatggaaggagttacaaagacaaagtttggagctgagatgaaaggatggaccatgtagagactgccatatccagggatccaccccataatcagcatccaaacgctgacaccattgcatatactagcaagattttattgaaaggacccagatgtagctgtctcttgtgagactatgccggggcctagcaaacacagaagtggaagctcacagtcagctaatggatggatcacagggctcccaatggaggagctagagaaagtagccaaggagctaaagggatctgcaaccctataggtggaacaacattatgaactaaccagtaccccggagctcttgactctagctgcatatgtatcaaaagatggcctagtcggccatcactggaaagaaaggcccattggacacgcaaactttatatgccccagtacaggggaacgccagggccaaaaagggggagtgggtgggtaggggagtgggggtgggtgggaatgggggacttttggtatagcattggaagtgtaaatgaggtaaatacctaataaaaatgggaaaaaaattaaaaaaaaaacttcttattcttggtggacaagtgaaaaaatctaccaactttgaagctgctgctttactctattttctaggtcaaatgtcccttccccctccagatataaacagtgatgactacctttatgcttcatgacctatatactcacatcactactacatgtatggttctttgctacatgtgtaacacatgcaaaaggtgtttgcttccccatcaacctgcccatcatcttttctcgtgttcttccttttgctaatacatctctagctttagttgggttcacatttctcttcttcatttgaaactaaagtaaccataacaactattttttctgaccaatatgtttcaagaaaaaaaattaatctccagagaacacctgggtcgcaatatccctgcgagagtggtggcaaatagctgaagtccctcagaaagtgccttataggactatggggagggatgaaggcagaacacaggctcatcaggcctgtgtcagagcacagacagaagcagtctcttagctggccttttcctcaaactactctgggtgcttttcctgactagggcatcaccactgtagtggaagggatattcatgcctgcttctgattcctaccagggcattatgagcttcctttcctgaaagcctcttgctttctctaagaactcttcctcttgttagcagtttaatcaaaatttgaattgaacctgacgctaaaatactcacttgcttatagaaatgtctttaacaaggagtaaaccaccagaactcacagactctgtctggcatacccaaagatacagtcagaaatcttatggaggctttggaggcataatactacagtatttcatattacacctagaaagaagagaaagaaaaagaagcagaaagaagaagacacacaactgaagatgtatggtaaggagaaaagagaaatgtaagaagagtcacaaaaggaaaaggttgtactcctagaaatgaaacttcaaaatgctggggctccccctcagagcccttggactgagtcagcacaactcataaagtgctaagacaatgctgttcagttggagttgaagtacatgggttcctttaaccaccctcgcctacctgatccccatgagagttttcacctcacttaccacctgctctgctaagcagatgtaattatcttcccagaagaaagcaggtgcccaggcttctttcatatcttaactacagaatctactgactaaggcaggtagaggggtgcagttagtacagacctgatggaatgcatttgaatacattttaagtattcctgggacatgagatttggacccgggattagcattccctgcctcttattctgtttgttttttccacatcaacacccaagagcaaggtaagtgacttcccaattgtccttatttggggactcttactatatgtgtaaggaatagtttacagccttcaagtaaaaaacattcagacaagtactttttcactgacaaaagctggatggataaggaatgcgtggactcttatctgtctataatggatgggagagcaccctcatagaggcagggggtaggggaagggatagggagttagtggaggggagactgggaagggggataacatttgaaatgcaaataaataaaataagcaataaaaataagaaaaaatgaaattttgttatttggaggaagatggatgaagcttcacagtatctcacatttgtgggaaattaagtgtgagtaggggggttaagttttgtaaatagaggaaagacgatgagggcagaaggaagggaaggaataggaggaggaggaggaagaaaaagtacaattatgatttaaaatgaaaaacaatgtctcatgttttctctcatgaaatacatataactcctacagatacacatgaatggataacatgaggaagggggagtactgtggaaagtaaatagacatggtaataagacgcccaagaaattaattagggtaagtaccaccaacataaagtaatacatatgaaaatgtcatcatgacacccagtcatttatataatgactaaaaaaaatagtaactcatttttaaaagatactcaagtctgagagttttccagaagatgtgttaacattcctaactgggagactctgagtaatatatgccttcctgagtacactctgaatcagtaaacaaggagtactcacttgacgaattcccacagctcttcatccagttttagcatcctgggatctcactaaaagctcagttctcaaggaccacagtgaaaggtttatgtatgaggacagtttacaacacaaaaataagaaccttttctatatgtcttgtctgtttcatagacaccctaaatgattacaaaagcagagacaattccagacacttgcacaaggggtactggaaaatctatgaaatcctccaattctgctcccatacaagatatgtgatcctttctagggattcacatttgaagaacacatgagaaaaggactatagaagaagaataagaaatggaagagatgactgaagagaggagtttgacaatctgagcaaattgctaaggatcaaaaccaaggaataaacccaaggaccttcccttgggtcctggcttctcaggtgcccaaagactcttttttcatcttcctttcaaacaactctgacaaagcagtgccatccatgtctgtcatgtggaggtcagggaggacagataagaaaagggaagttctttgcctgctttcggcttcaaaggatcctacgttaagaaacagagttaccattgctcacccacaatctctagaagtattagtgatgtttctcatttttctttaagcttcccgcactctatttagatttctctctgatgtcctttcagcatctcctgccccacccaaaaggggtaagcacaccagtggaaatcccctgagcaaactagcacatgctgtaccaaaatattatgtcttaactttgttcttttacatcttcacaactaaaggaaagagatacaatcaaaatgatggtccacttaaatgataaacaagagaatttaaagagacatgatacaattgttcaccatggagtgatagcccatgaaaggctgatgaggttggggttagtagatataatacatatgaatttctccttaaacattttcacatagctttgagaatttatcattgtagatttctagaaagcacattcaacttagtgtgcaaaacaggctgattttgcggtatgtttttctgatgaagctttcaaagcaagattacaagccagagtgtaaataattacctgattccccaaatcatttcttttgttgcttgggagaaaatttgaaattctccaaaagaggcccaaaatgcatggcagagatagaatatgctacctccaactgaattctttctctaacatttctttatggattgtagtcaagaacttgatgttataacagatgaaaatcacataacacctctaagatcccctcaacctgaggaggcattttcagagaacagcacaaataatacatctcctttcttttcttattagatcatctcattaagacatgttgagggaagttaagtcaagttgtagtcaaactctaaaactctcaggtactaatgctattcaacctctgggtggcattgatcatctactctaacttagtcattttatagactcaagtaactgattcttccagaaatctagctataacagaagttcataaaatcctatccactcagatgttttgaactccttctattataatcattcttactgcttctttacaaacagtgtgattatgaatcaaaatttaaaaaaaaactgtactctatggtctggatccagatttcttgattccttcaaagaactgaaaaggggccactcatctatctagttatgacaggaccctgataatgaacttaaagaaaataatccaactttatcaaaatctcagccattcttaacaaaaagcaccaattcatcttgaggccatgttaaaaacaaagtggattggcatacaagtttagccacagtctgaataatgactgcctccaacacctatcctacatgccttggagccaataaagtttatgtgaagcctttgttaaagaaaaattgataaccagtatgatgaaactctcttttaaatattctgagattgtacttatgtagctgtttagagatcagaagttttctaaagtcagatggtgtaagttttactatttatatatcatctctttgcccactcatctctactatatgtatgagaacagctgcagatagtacacaacaaatgggtaacattggactccaacaacgaattacttatgaaagaaggtaaaggatcaaattccattcctgagtcataatttgccaacacttgcatttaataatttctccgtgcctgtacttaatagttaagtacaggtgtatactagagatatatagaactcaaaggagaaaaatggctacatttgtacactgaaagattgagtgtaaaaaatatttttaaatgatcttttaatagcttatgaaagatgaaatctttattttgtacatttctttgtttttagaaactgtatatatgtattgaggatattgaaaccataaccaccctcctgtcttccctacctaccgcattccaacacctactctccttctcagtttcatgtcctctagttctttaattatccagactccatatccccattgctaggagtcgtagctagggtcaccctcatagactcctgggagttttcattgcccttgtttctagctagtcccagagatgcccatctcctgtaaccagaaaagacttccaatggaggaactgggacaccaacccactcacaaaatctttagctcatagtttgtcctacctacaagatgtgcgggcataaaagatgaaacagaattagagagaagggcaaaccaatgactggcccagcttgacacctatgccatgagagggagcccactccgacactcttaataatattctcctatacatgcagacaggagcctagcatagctatcatctgagaggtttcacctagcattgatggaaacaaatgcagtgacccacagccaaacgttaagtggaacttggggaatcctatggaagagagtgaggatggattgaagatgcccagaggggtcatggtcacattgagaaatactacggaatcaactaacctgggcacataggttttcatatagactaaactttcaaccagaaatcatgcacaagacaagcctagaccctctgcacatatgtaacagttgtgcagctgggtcttcatgtgggactcctaaaaccgaagccagggctgtctctgactacattgcctgcctttggaagcctttctgctaactgggctgccttttctagtctcgagagaagaagatgtgcctagtcttactgcagcttgatatgtcaaggctggttgatatccaagggaggcctccccttttctgtggagaaatggaagaatgttagagaaggttggagggaagggagaaagagggattgggagcaaaggatgggggggggggcgctgcagtcagaatttaggataaataaataacttaatcaattcttaaaatgatttaagaaaaggatccacagaacctacttagttcagctcttgtgctcatgagtgtataactgcccactagagcttgagcaacctaccatgggacacacttttaaagaaaactaactcttaatcgcctggtatttgtcaacctgccaggagggcctcagctagggatgtggcctcttgaacacctgctctgtccatattggaatgtggattggtgtgatctcatgccagtcttgtgtcacaaccatagcttctgtgaaattatgaacacaaagatcctattatttttataatagataatttcactgtatttctctttggctcctgcctcttctgatctttccttctctcctccatggtgttccctgagttcttgaggggagtgtttcatggctggtactataaatctgaccacgaacccgtgccagggaggtcttagagcataggggaaaacacaggactattgtttgtttaaaagacagagtatcaaactgtcttctagacatttgtccttatacccatagaatagtgcagccttgcctctcattagagaagctcttttctcacttctctctcagagagcagagaactgggcgtgaccattgagggttcagccctaagtgggacaactctatcctagcatcattattcctaaaacaagagcatccccaaccaactgaggagcatcgtaagtgtggattttggccttgtgatcctgttacattggaccctgagatcatctgaagcatcacttgaagtctaccaccttgctcaaaagtaagcagttaagttcaggagcttcagggaataccaagatgcaggaaaaaaaaaagtcacactctacctctccgttttctctacctctgcttacagcagcaatccttttgctcagacttcctgtttctggcacttgccttcttctgtgatgttcatagttccctgtctgtggtttagcaggcacagagctggtttgggtctccctctctctcattcacttgcacatacaagcgtgcttcttctctattctttctctctctctctctctctctctctctctctctctctctctctcagaatgatggctctgggtagagctttcgctatagttttctgcttaattcaagctgtttctggagaaagtggaaatgcccaggatggtgagtcatttctaactccttttttaaaggatttcagattacctgtagcatatatgatcaagttacacagttctctaacagggcaagcaagaatttagcactaattaggttgttttgtgggtattaatcaccaggacagagggaatgatgacaatactgcaaatggcttgtaactctcaagaactgtcaagaagcattgagtttcattcaaattctggctcataaatgtggatgtatgctggtaatttcaaaaaagaaacctcatatcagttctttgttggagctttttggatgatcgcttccaaaactgtattagactgaaaaatcaagccattgttgttttgactgtttatggagttctaaaaccctagatacccatgataaattaatggccagaaacgagaggtttgtgtattcaccaaaactgtatttctagtgtctagagtttagaagttactctataatgtatttcttcaacatactttagctttggcagattcatgttagattgctgatgaataattcagtagtatgctaaggaaggtgtcttctttgaaatacacagggttgcttttatattcagagaatccattatatggtcatcataattctcctcagaatccataaaatacttagaccttgacttcttaaaaataggcattttaattacaggactgtactcaaacgtctctggcagacacagcagctacatggaatgtgaatctccaatttgtttctacaaattaattaaactgttttcatacacacacacacacacacacacacacacaccattaaaaggggaatgtgtgtgtgtgtgtctttgtgtatgtgcgtgtgtgtgtgtgtgtgtgtgtgtgtgtgtgtgtgtgcatcctgcctctggttcctgagtgctaggattaaaggcagacaccaccatggctggcctatatgtgcattcctaaactgggtgcagtagtacatccctgtagtcctgaagcctaagaggctgagacagaaaaatcatctttgttccagaccagttaaagctacattgcataagcttgtatcaaatacatctgtattttctttatgcacagtatcaatacacatcagcctagctctgtagtttagctcttcagtcaaatgcctttagttgtgcatcctaagcttagatatttgtgtgactttactttgtaatcagcaaggatggaaaacccttgcatgttcttatgaagagaatcatcagaggagtcacactcttcagcatgacggagcatgagtcacttggtgagggagagtcattatctcatgttaaatgtgtgcaaatagctggcaggaagcacgagaaccatgctgctgtttggtacaatcctttgcccctatgcttccctcttggccatgctatttcttacaaaaaaaaaaaaaaagtaaaaattcttgctgttaaacaggattttcacttcacctttttaaattttgaaatgtttttagattgatgatcataaccacccatatgcgtcacataggcatgtcacgatacctcccactttgtgctggcagcaatctactagtcaattttctagtaactaaaggatagtcaaatcaagcaaagggaaccgcaaaagccctgacagttcaagctcttcatcaagtaatcactgtcttctaaatgacactgccttacttagaatatgtattccaaatgctttaaatttctatacctagaatttttacttaatgcttagatgcttcctattgaacactgtgaccattgttccacataatgtcaaaaccacagtaagaataaaagcttccattgatatactacaattttttttcaaaaaaactccaaatgctgcatgtatatttgcataattataattcacatattgcctttcatactgatttctccaagactcctgggagagctctcacccttactgagaacttactgtaatgtaaatgaaacctctgtgcaaatccatccagtggcttctataatgtgtgtgtgcatatgaatatgggctttgagtgtctgtgtatgcagtaagagagcccagctacaaagttagaacagcaaagatcagtatgcatatccactctcagctaagagctctttagctcacagcagatagaatattctcccacaatggcatgtgactttcccccactgtgggttacagagcaattgtgccccagtagcaacatctgctaaagggtcaatggacaggtcattcagagacaactgctttgattgcggaaaacatggcgtgatcagctttttgcatattgtgtgagatagcttgagacatactttgtcagactgggtggctgaagtgtatagaggtccactcttcagctggtgtctgtcatctgcttaaagtatgctctctttgtctcctgtcataggtggaaatgttaggtaataaagatgaaccacaggatacctaaatccaaacagtaagtcatatctgttacagagagttggttacaggcacaagcaaagcacaagacagtatgagagctgagagctgtcatgtagggacaggcaacaacttctaccatacatcaagaaacttgatgatgggcctagtcggccatcactggaaagagaggcccattggacttgcaaactttataggccccagtacaggggaataccagggccaaaaagggggagtgggtgggcaggggagtgggggtgggtggatatgggggacttttggtatagcattggaaatgtaaatgagttaaatacctaataaaaaatggaaaaaaaaaaaaaaaaaaaagaaacttgatgatgttccaactgtgaaatgctaggctcttggaatgcctaggaagttaatttcccatagctgggaacagtcaccccagtctatgtttaggtgagctctgagatctgttctttactactgtcacttacctggttggccttttattaacccattttaattaatctttattaaaacagacctttggggtgtattagttaaagaggatgcaattgaaactgcatatagctgctaagccacccatctgaggccatggttagtacatcctgtttccatatgagaaccagaaaagtataatgtctctattttgggtgagattaaatacctagaagctgtcagaggctctctgcactccaccatcatgatataaacctttgataactctagaagattttccttgtccttattgaaatgcatttcctggaagatttttctgaatttttctgctaatatatatacacacatatatataaaacaccatatatatgtaaaaccatatatatataaaagatagatttttgtatacatgtatatgtgcacactttatgtatacatatgtatatattttatgtacatatacacacacaaatacctatttaattatgggctctacaagtcagcttaggaaatcaaataacatctttgacaaattgcagtcaccaaaaatggctacacatacaaaaaatttccatttcccacttgcttctagaatattactgatatgtgtagaatacagtagctgaaacaatctaaccatgtaggctaaaacctttcacccttggagttttctgatctatagttgcctcagtaggtcacttaagatgctctctgccacagaatggagtcatcaatattactgttaagttacaatgtccttttaggagacaataagcaatcccataaaaatgtgcacttggaaccagaatcattattgtcacctttcatttgaaaaggaacttggaaaagaacaaatgaagaccagcagagaaaaccaacattagattaggtggcatacaaatgaaatacaagatcccttatctgaaatatgtcaacacttcagtgtaaaaagataatttcaacattttaaagtctcactggggatttgttcattaacatttagcaccttctatatatgcgaggcattgccttccctgaacatgtaagataatttggctgaagtggagaatataatctcacataaatactttctaaatacagttttaaagtgtagcaaaggagctccaatataaacaaggaaacgggtttgtctatgccccttataattttccaacatactagtccaatgtagaactgtttaaatatacctggaacttgttcctccactatgatgatttctttttgttagaacactttgtaatctgtatgtgcacatcgggtttggcatatgtgtttcaggtatgtgtatttgtgtgtgtgtgagagagagacagagacagagagacagaggcagaggcagagacagaaagacagagagagcacattgaaactttttttctgtccttagaatatcttcctttagataaattatatataggtatataaatatatcgatatatattctctccttcatgtctgccactcaagtgacattttattaagggaatcagattttcagctgatacagtcatttgccttttctccttaacagctgtgttttgttcttctcaggagacctagaagatgcagacgcggacgatcactccttctggtgccacagccagttggaagtggatggaagtcaacatttattgacttgtgcttttaatgactcagacatcaacacagctaatctggaatttcaaatatggtgaggaagatagtttccatggtgcttaggaatccatctcctgtctctctctctcgctctctctgtgttccttccgggacttgcaaaggaaggagtgtctgtcctaagtatcaaactctaaaatttcctaggttctcaaaactttctgaaatactttgtcctttgccagaaattaaagtgaggcaactctcaattcattttttagttctcagaggcatatacaaatggtggtttgatcttggaaattctacatccctccatattcacagcaatctaaataaacacttcttctcctagaacactcccttaaggcagtgctctattttaaaattccattatgcagcgtaattacttgccttccagtcccaatgccaatgcttaataaccttttgacttgcagcaagttatgtaacatgaattctttagtttcttcatttaaaaaataattgaatgactagatctcacaggaaggttatggtgattaaacaattaaacaattaaatatatataaagagctcaaatcaacatccaatatttaattagtaatggagaaaagataattctgtgaatgtatgtataaaaatcacccacactgttgaaacagttgaattccagactatctagtcaatggaaaatttccagtaatctataggaccaagttgattcttgttttcatatggccctggaggaaatcaaagtgcaaagaaagctttaggtctgaaggttgataaagaactcagggagttgtatcttcttcctcccccaccagccatcgcttgttgccaagggttattatctctggtgacttgaagaaaaaatactctaatatgaaattctggcttgtggctatttccaaattcatatcagatgacctcattttttggtaagtttccatataaggaaagtatgtcgaggtctgcagtagtaaaagaggacttctgaagttccatgagcgctaaggaaatcctttgccgcctacaacccagataagctgtagattctcactcttctgaatctctagcagtttcctgaagctatacacaaagttttcctgaagtcactggaggaacaacgtcttggagttgaatgtcacagaataccctcagtctgtctttgttattgtatttttgtagcacactttctatggagaacaaggacacaaatatctaagatctagagatatgcctgagtcagtaaatgtcttgctatgcaagctggtggacctgagctgagctgagctgcctagaatctatgtaaaagctcagtgttgtgtctgccaccccacccccgagttgtgctgcagacaggggttatgaggatagatggatgtgtgagctttactagctagtcacgctagtccagccaatgagttccaggttcattgagagacactgtttcagaagcatagtgtgaatgacagaggaaaacccaagacattggcccacccaatgtgtgtgaacacatgaacacccacaagcatatgtatgtgcttacacatgtgcgcgcgcacacacacgcacacacacacacacacacacacacacacacacacacacacacaatggacatacaaacataccccacaatcaaaccaaaacaaaagacagatgttgagaatcattcctacaacttgataaataagttaattaactcatctaaacaatgttctcagttcttatggaaaaaaaaaaataccccttcacacagaggtttgactccgggttttcccacccggttcttagtgagctgtggtgagcactgttgtttcacttgaccaagccacagctgacctttgtgtccactttcgctcacatattcaatcatgttcttgcccactgtaacaaacttccctttagtgttttcattttcttttacatatactagtctctccagagcttcttcacattgttttccaggtggacagatatttgtttagaaagcctgatttaataggtgtgtgtgtgtgtgtgtgtgtgtgtgtgtgtgtgtgtgtgtgcacgcctgtacacacgtcttaaggtatacaatgtggaagaaaaggttgacatcaaatagctcaaaaagatttctaaatcactaacatttctgtgaggcatgcacactttcagtgggacatgtatgaaccttctaggttgagaagatgttaatgaaagagttccgaatttgtgtgtttcttcttctaaagggtactagcttttgtagaacatttgttgtctcttaatataaatgtatgaagtagaagttgggatttgctgaatttgtttatacaggtgattactggtagatgctaggacccttctctcagaatgtggtaaatttaacatctgtcctagatctggacaccaaactttggacaagaaatggactgtttggtttttgtttgtccatttgtttgtttgtttgtttgttttatttttcagtgaactgatctttggggagggaccaggtcaacaaagatcacagatatgaattactagtataccaatggactagttcacagtaggagataaaattattatgaatatatgaatactcattatgggctctggtcctgtaggaattagtggggaaatagtgaagagggtggaaaagtccagcagattacacaatagaataatccacaattatctaggggaaagtcctaccttttcttcactgaaattctagtcagttttctggtgcattagacaacaaagcagaaactctgaaagaggtacctgggatggaattccaatactaaagctaactagcccagtgaccagggagatattcagaccagcatcacagcaactgacttacactggattacatctggttaatgcctggcatgtgggaggtacctgtaaatggcacttgactccttcagtatgaacatttccacataaaataaatataggggaaaaagcaggggcaactatctgctacttttactaccaccaattggacaatctctcagtgcaattcacataaaaatattatttatcatcattcaaaagtcagatatgtcttttgggggggagctcattcaatttctatcactttccacaaaagcagtcatactctgttccacgttttctgggccctgatattactgccacatactacctacaactttgaatatctcactatttttctccatgactgtcacctttacaggccagctgatgttataccccttagcagtgatatctatcaagtattgttaagtattcagtcctctggacagtaaattatactatctctctaaattgttcagtattttcaagccatatcctgtctttcagggccatttttgttgttttgttttgtttgattgattgattgattgattgatcgatcgatcgattgatcgatggatagattttgttatattttgtttttctgccattttttcccttcagtctgaacatctgtttatataggtaagacaaatgcatctctcatactaaattgtacaagactggagaagaaagagaaaaatggaattaaaatttaggttaaatgatctttagccatcactctctacattcagaaccagatttgaaaatgtgacttagggccagtgtcccaagtcatggcatacaagatcagaatcatcaactatatatgtattacttgagtaataactgtgatcttccattgtcacacatattctagaacatctctagtcaatataaatataatgcagtccataaatctatgagcacattggtcattttaaatatttttaaattatatttttaataaatttagtgtttgtgtttgtgtatatgcatgtatatacacaaatgtgcatgcattgatgcacacgtatgtacgtgtgtatgtgtgtgtgtgtgtgtgcagaatacaggtgtcaccaattctctctttccattataggagttctgtagattaatccagagtcttacccactgagttatctggcaagcctcatctagcagcacatttttttcaaaaaatataacaaaatgaagttaattataacatgtgttatttaatttgatacactcaaaaattatttcaatatgtgctcaatataaatagtatactcagatactttatgctctttttatagaacatgttctaagggtacagtacatatacatttagaccatattgtaatttggactagccatatttcaaatgttttacaaatacatacaggagaagggctattgtgttggatagtagagattcaaaccatcactaagtcagccatctctaagacagttaaccaaataaatgtttgtaactgaactacatactcccactggtgctgataatgagtatcctcccactgtgtaagtaaagtcagtaacacaagcgaaagttggccattgtagtcagcttgctttactttaggtgccaacgtgacatataactgaatagtatactcatttacttaaaagatgttttaaatttaagtattggcataaagcccactagcctctgttctctctacattgcacaggtaccttgagctcagaaattggtatttcccccaatgttctctgtcacttctgttctaactcagcaaatcctggcagtatttctattaaacggttgttggtgacagacttctgagcttttcattcatctcatatctgtccacttgtatgtagttactatgttgcttttcagtttttactattttctgaacgatacatttcagggaggacattgcattcaatccacacacagagattctgagggtgtgggcttttgaacaactctctatcctgtcagtgggaagggaaggagacggggggggggggggaatagagggaggatctgcatgaggggttactaggagagagggaggctgatattgggatgtaaggtgaataaatgaatttaataaatataaaaaattaaattatatatgccaaaaataaacttacaatttcttcccttatctctagttttaataattgcatctggttttgacccatgtctaactttgccaaagctatgacgatacctttgtcttcctgtacaaagataggacaagagctatctaataaggattgaaaatgtgtaccatattcattcagtgatttgctactcagtagttataaagatgggatataagaaaataagcatcatctagaatgtaactcctaggcatgtgaccaagcggatgaaatcaagtatgaaagaatagtaatggtattgcattgctgacaaccactaccagctggaaaaactaagatgtggtagaagggagaattctggttcttccttaggaatcaggttaactgtcacacgctcaaaaggcaactgttcagtgtgaaagaaaattttgtaatctggttagttaataaacagtcacaacttggaaaatcttttaaaaaaagaaaaaataaatatcctataggtagaacttgactgatgtttgcatgtcatacacatttctcaaaaaccattggagatggacatattttgctacatgcaattccctccttcacctttaaaccctgcagtgaacaaagaagaaagtaggcaaggttaagtgagtaatgggggaaaactaaagaaataatgaagtcatgcattcttgctataaaaataaatgatacaggataaaaggaaaagtactagtttattctcttttcacaagttttaagtttaatgcccttccttttgaaatgtgtccttgtgaacttgttgcctgcatgctcttttttcttcaagcccagctaagtcatcctgaaaagaggaaaaactgggatcagttagaagtagacatcttgacagaatgcctctattcaagttgcttatacaaaatgaattcttcctactaatcagatacatgtgagtgtgtgagagtgtctgtgcacatttgtgtgtctatctgtgtgtctgtatgtgtgagagtaaaagacagtaattatgtacgtatctgtctctctgcctctgatgcccatccccgtgtgtgtgtgtgtgtgtgtgtgtgtatgtgtgtgcacatgtgtgtgcatgtatgagcacatgtgtgataagtcttgggaacgggtttggtgatttctttggtgaattgcgtgaatgtgcttcttttggtatatgttcaagacttggttactataaaaattgaaaatattatcttttacattattttcctatttttataggttaacctttagattttagatatatataaaattgtgtagaattaaggataatattaatacactatggtattcagagtcacctgtgttcattctattttttcagtgatgttttggtttttctgtattttcaaaatattgataaagttttgattagtatataaatctgttaggggaaaagctctaatttatcaataacaaatttgctagcacatgaacatagctcccatttatgtaaatttcttcaaatacctctttgaaatgttttgtaatttccagtacaaaggccttgaatatcctttataaatttcagttctaagtatttttatcctctactactatcacaaaggaattattatttttaaagttcattttctaattttgtgatgctatccatagaaatacagctaggggttttctggtagctttgatgaattcaattatttcctataattatgttggcagtctttataaatgtctatgtaaacagatagggttttttttctggaaataaatgtgctttctacttttcaactatgcttatacttgcatttgcttctcttctcttctgaattgaggagaacctcagtgtgctgcagtatatgagtgtacaaagagaactgtctcccttgccctgatctttacgttatgatttatattaaatttttataattgcatttgaataagtgtctttattctgtttcttgttgtttgggggagttttaatcatgaaataatatgtgattctatcaaaaattctatttctatgaaagatgagtaactttctagtgttttattctgttaatgtaaattatgccaatagatgattgaatgttgagccagctttgttttcttggtactcaccacacctgacataatacagtatgattattttgaagaccataataatacattttttgaaattattactctttaatcttttttatagtccagtcattatccccccctccggtccaccctctgacagttcctcatcccattcctccccagacctccccattccttggggcctcaagtttcttcagggttgggtcagaccaggccgttctctgtttatatacacatttttaagacactgttttatgtcttatgctggctcagacttactaagtggatgaggatgacctcaaacttctagtgttcttccctccatattttgatcattgtgattacaggtatattctgccataccagatttatgtagggctttgaggaaactaggtaagtattctacaagggagtcatatccccagtcctatgcatacagtcttgagggatggttttctttccagcattttgtaggtttgggtaccaattttaaactggcttcacagaataatacagatcatctctatttggggaagaaattcaatgatgctggtactgtatctttcttaaccatttggtagaactcagcatcctgaagtcctcaagcatgtagaattaactgtgagggaagatgttaatatccatgtgacttatattgtgacttagatagtttctatgaggttaagttttaagaatgttttcactttaaaaaatttacattcactctcacaaattgacgtatttcctatagttttaatatctatatgatatacaattgtgtctcctctgacatttcaagtattgttaacttataattttatacccatagtgtcatagaagttctatgtaagctgtgctggactcaaacccacagcaatccttatacttagactctcaaatgttaaggttatactcatggtccaccacacagaactttgcttccttttcttgacctattgtgttcagtttcattagccaaagtccgtatgaccctaggcatggtaatacatgctttcagcactatgttggatctctgtgagttcagggccagtctggtctacgtgatgaatttgagggtatatataaagaattctgtctcaaacaacaaaacacaacacaaaggctctatggaaacaccttgatttatttattaaatatatgtagttgcatatatacctcttcaaccaatttagcatttccgttcatcttatttgaagggatactatcaacatttctcacagttatcatacttttcatttgttcccaagagacgttgattacatttttacctaaacaaagtatttgcttctgatcaattctaaaactacatagatcttgctcttaatttccacaagcatgctttcaccacttcagacttatttgcacataataattgtgatagaacagaaaactgtgttattttaattcactctcgttttcctcctcaccattaacttgctgacttatgtacctgtagacactaaaattgaattcatacaactaaaggcacaatgttattttaattgtatacagaaaatcctacctaaatgaagacataactttttgtttctacagtggggctcttttacgagtgaaatgcctaactcttaacaagctgcaagatatatattttataaagacatcagaattcttactgattggtagcagcaatatatgtgtgaagcttggacaaaagaatttaacttgcaaaaatatggctataaacacaataggtaagaagttgtatatgatggtgtggtctctatggtttggatagctgcataaacgtgtctttgctttcagaatgataaaaatatgcaagtcataaaaacactttgtaataaacatgagcaactatttttgctcatttttaagaaatgaaaatctgatgttggaatcatgagttccttctgtgagaaaatatgctgagactattccaactcagctatgaaagagtgtctgacatcggtatgaggaatattgctaaagcaggccatctacctcagactcacatgtgctttctttttgtcattcattcttctgaaggtcttgaagtcttttctccatattcacatcatattccaaatgtgtatagctcattaacaaatcatttaaaaatatgctttccatgtttttcaaagttctacaagtgaaagaaaacttatgggtgggagataaatggatggatatttaagtaaatgataaatagattatatgtaggtagataaatcaatggatgatagatagatagatagatagatagatagatagatagatagatagatagatacatagatacatagatacatagatacatagatacatagatgggagacagattaactttaagaactgattcatatgattgaaacagtggtatgtttaaaatctttaggataagctagggggtataaatgcaggttaagtgtgaatgtttcagaactgagtccaagttcttaatgaaagaatgtattgcattcttgaatcatacctgtttctaataggaatttctacctttaaactaaaggtcttttactgatcagataatgcctactgattatggaaggtgtcaccccaaatctactcacatacattttaatcgtatcttatcatatctttttttttttttgtttttgtttttgtttttcgagacagggtttctctgtgtagccctggctgtcctggaacttactttgtagaccaggctggcctcaaactcagaaatttgcctgcctctgcctcccgaatgctggaattaaaggcgtgtgccaccaagtccagcttaatcgtatctttaaaatatcatttgattattgttcaactttttaaaagtaaatactatagcatagccattatgacctataatataattatatttccaatgagattaagtgaggaatgaaacagcataattgatttgacctagaatacacataattatattctgttaaacataagtagtaaaagcagttatattttaggttaaattataatttgaattaatgcaatgacatgttaactatttgtatttttctgcctttgggaatttacaagtgaagtttatatgagaaagcattaagaataatcacataaatgcaagtttgctgattttacaggctataaagtccctcccttatcaatgtctctttcactactctaaaagaaaagacaacagagctattctcactgaatatgagatacagtgagaaagttacttcatttgtttaatgattatggtaaagaaaaaatagaagttccatgtctaaacaatatcttagggaaagagcagaagtcacagaaatgaaatattcaacaaatggctttacatgttgaccacataatatcagcatgagctaggctgtcatgaaaggcagatgaggtaaggattccaatgtacaagatctctgggttttgagcataaacacggtggtgtttactcatttggagtaattatggatcagtgccgaatgtgtgcactacacaaaggtaccatatttaaatgttcatcgttcatagtgcagaggtttatttcttggagagtgagcagagagggtaccagttcttgatcctctaagaaaacactgcaacattgggagaacatctgttctcttgcttacattaggccatctaagcacacaaacttctgtaatcatgggaacacatagagcacacccacaggatctggagatagccaccccatccataggcccagctataccaaaatacctagtgctcatggaggaccatgtagcatcttccacatcagaccttaagactaccctcttatgtgaggggcaatgaggggaacacagatccctgtgaaaatatggtgtgggtccctcaggggtcctagaaagtacctgcactcctgagcaagtgggattaaaataagaagaatacttctcataggattatgtcctcctagttcttcaggagacatctcattcactgaattatcctttccacaaatttaaactaaatgttcctgattaatacctagaaccagaatcctagtcacctgcaactttctctcccacttccatttcttcagggacccctagcctataaggctggaggcctactttcctgccttcctgatttgttttaggcacattgataaaactgtctgggaccaaagctggatattacagcctggtacagatgttttcttagagaataaatacttttctctgggtttgggctgaatgatgtgacagttttctccatccaggaatgtatcttccaggacaaaatgcttctaaacacaactctgtgagacaggcagaggcctaggacacaaattggtttatttaactaaaagtgacaaaggaggacgtctggaggccactctggaatttgttagtcagggctaccatgaagactctacactcatttgtatctgaggtgaggtgcagaggtcccagatatatatatatccttgcaattctttacttaggagcccattagtaacacatcccctggtattccgatgtatataagtgatgatatttattttatgactatttaggacttcctccacatggtgacccaaccttctttcccataggactttagtatatacaaagataccaagataaggattatacatgggaggatttggtgccaagactggaactggtacctttctatctactcacaacagaaggctactccagccacaggaagggtctgacaatggtgtctggatgagaatcaaggagaaagatttggctttgttaatgaccagctccgaagatagaaagctctagggggatgggtttcagagaagaaggactttaaaacgtgtagttatcagcaattaatgaaaaggggttatgaatttgatgaaagagaacaaggaggctatctaggaagatttgaagggaggccaggaaagggggaaatgacataattacataatttttaaatgcacttatgtcctttttaaccccatacacagacttcatttcatttctttcttcctttctttttcttttctttctttctttttttatttcttttttgacagttaaagccgaggctccctctgacctgaaagtcgtttatcgcaaagaagcaaatgattttttggtgacatttaatgcacctcacttgaaaaagaaatatttaaaaaaagtaaagcatgatgtggcctaccgcccagcaaggggtgaaagcaactggacggtaatgtaaatcaatcacgttcacaaaataagtatcatcttgttctgttctcagaacttagccttcacttagagaggtcccctgggtcctacaccctcaggaccccaaatctcctgcatctttcttggctcctcttcattaaatttgctttagtttatctttatggtttgaacttagataagaatgtatgctcagataaacctgatccttgctctgcaaagcctccagtgtatgggataatcaggaagaaaagtggttctgcgtagcataaccaagaagtagccatgatttttccctaggacttttggggacaacaggaggtcagcagaagaaatcgtggaaggtttttctgtcactgttttttacgttaatgtctaagcattcagttgcagaaggaacggttagcttttctgctctgcgttttctggaggttaagtgaactccctcatggtctgctgaggttaagatgatcttgctggtcttaccatctctttgggagagaaacagaggatcctgggcacttgggattctcttagtctgccagatcaatctcagccctccctgtttcaaatagataaatagaagatggcttctctttctgaagaacaaaagaatgctcacatatgcccgatgccccctttactcagcctgggtcatcgttcttactttgcagtgtgctgaggcatgctacttacagatgtgcatttccatccaagccatctgctgtctttctctacctactccacagccacacacaaactggatggccttcatcctaccttctcccatccattgtctgactatgccaccagtggaaaagcaacattagaagaagaaagaagggttatgaatagatggttctaagataatcagcttactgtctgttaaaaaaagtaaataaaaatgtctagactctactggaggctgatttatgtcaatatacacaaatacaattgtaagtcaaataaaaattagtattaaactaccacagaactgctaacaaattgtctgtctatgtaaaatcattagttcatcattaagatagagacaaacattccaacaggtgaatgagccaaaaacttagaaaactgtcataactataaaacatataaattcagttaacatagtcaaatagatataaataacaatgggatactaattttgtctataagattaatataatatctttttcttagaaacaatagtgttggaaaaatcatgactttatgattatgtgtggtgtcaaatggcatctttctggaaggacatgactagtgttcactgcctaccctttgtttccctgtggtgcatggaaagagatagaaagaaaaaggagatgctggaacagaggagatagctgtgaacctaggagggggtgaaacccaccaaagtgagaaactaattcagctgagtacaaacccgtctaatcagtgttctctgacctcacctggtatcatttagagcctgcccccgattcggctgctgaacctctatagagctcaactccttcatttaagacatgaaagaacttccagaggctaccaacatgactgaaagccaacatgtccttttacttctaataacataacttctttttcaccctagcatgtatctttattccacacaagaacaacaatcccacagagaaaactacgaccaaaagcaatgtatgaaatcaaagtccgatccattccccataacgattacttcaaaggcttctggagcgagtggagtccaagttctaccttcgaaactccagaacccaagaatcaaggttggcaaagactgtccaagccctgtaccttccacaagacttcatattctgaagtgtagcagagagagggggaagaaatcagtgtaaataacccacaggtcaggagccctcttctactttctttgaagaatttttctgcctgccacctttgccatttttctgggaggagagcagtggcagctgagccatagtgcctgataatggataaagattgtcctgatgtcactgtctcagatgctcaggaatctactaatgaatctgcatgaatttcttacacactactctttccacctttgtcaggggtcatggctgatctctctgtgatccctctaggtaataaatatctttactactagaaaggaagtgggtcagtttggctatccattacatctcttttcccagaacaatgaagatgctatgggaaatactaacacccagagaagccagagagcatgcttcaggacagtacccaaagcaacttacctaaatcttctatttgaggggaatggaggttttccctgctgtacctgtgccctactttcattctggaattttctgcagcttcggggtgaacatttatctctttttctcttatttagactttttcccccttggatatgggtggttggataaaggtttctgggccatcatgaaaggtcatctttacatttcaagtagctgatgttcttcccactgtcaccgagatcagctcaactctttctctctatcaaagaactgtttctaagaaacaataagtgagacatgttattaagtaaaatcaaactaccctaaatatatacccacactttatgcttactgaatgctaaccgtgatctctccttatattccaggaggatgggatcctgtcttgccaagtgtcaccattctgagtttgttctctgtgtttttgttggtcatcttagcccatgtgctatggaaaaaaaggtgattttctttagtaaacaagagggttatttgtggagccccagaaaagcaggactcaggtaccatctagaaaagtttaaaataacagacttgacatttcaagaattatagtagcaaatatatgccctcctatttttagatcccagtcaatttaccatagttgatttcagaagaggcaaaaatatacaaactagacataagacaaacaatattgcacaaatattaatagtgtgtgtgtgtctgtacacatgtgcatctgtgcattgcatgtgtttgtgtatctgtgtctgtgtatatacacatgtgtgtgtgtgtgtgtgcgtgcgtgtgtgtatatgtgtgtgtgtgtgtgtgtatgtgtgtatgtgtgctgggtctgtctgtttgtttatctgtacatatatggttgtgttcatgtgtgtatacatgcaaatgtgtgctggcctacaggcagccaaactcaacacatattattttattcaattatcttccaccttgtctcttgatgcagggtcttccactaaacatgaaccttaccacccctgtcagattaattggtcagtaaactctgagtatctgtctgcctccaccactccacatatcatagagttacagatacatgttatcatacattgctatccaaactcagttcttcaaaattgtatgacaagaggtttatttattggattatttccctaggccatgacgcccccccccaaaaaaagaattctttaagaagtgttttccaaatattttttccacagcctcctaaaggacttagaggtgattacccatgctaacatggagtctatttgatctcatgactttctgcacacaaattcacatgatttttgtattttgctctgtggtagaaccatgccctgtgaattactcagtgttctaggaagttgccctcggcaattttgtattcctaggaccaaaagtgctctaatttgaaaaacgctaccataaaataattttcttgaatagcttagaacgtattcccaatttccactggaattaaagtaaaacctttacttccagtaaagacagtggataagatgacaataccaacagtgagcataaaagaccaggtctcattgtagctccatataaacaccaatactgcctccctgcaaacctcactcttcgctttagggtactttgcaacataattacattgtctcattcacaatagatcgttagcaaggagctctgttctatccactccttaaaccaagagcatgatactgtcagagaaaataaggtgtttgtccagtaacagaaatgttttcacaatctacctcaaataaggtgaaagagttgtttgtgtgccttctccttctgccgtttgtttcaagtatgaatgttctctggttttaggattaaacctgtcgtatggcctagtctccccgatcataagaaaactctggaacaactatgtaagaagccaaaaacggtaattgcttgaggtggggaaagaaacaccataatgttgaaatcttagtctaagaatgattaagactgacactcaacttacggtcttttatatatcacataaatgaaagtccttttaagactctgaagaataaagccaagatatgccacagggcagggggttggggaaaaatcaatatttacttcaaagttggagtatcacagctcagtcagaagtgaagccaactgtcattttttcacatcgtgtgtcaattttacaagaaagtttcgtaaacgttttagtttcctgaatcaaatgtatagcagcgcctctttgccacgcctctaacgcttctgcctttctctgcagagtctgaatgtgagtttcaatcccgaaagtttcctggactgccagattcatgaggtgaaaggcgttgaagccagggacgaggtggaaagttttctgcccaatgatcttcctgcacagccagaggagttggagacacagggacacagagccgctgtacacagtgcaaaccgctcgcctgagacttcagtcagcccaccagaaacagttagaagagagtcacccttaagatgcctggctagaaatctgagtacctgcaatgcccctccactcctttcctctaggtcccctgactacagagatggtgacagaaataggcctcctgtgtatcaagacttgctgccaaactctggaaacacaaatgtccctgtccctgtccctcaaccattgcctttccagtcgggaatcctgataccagtttctcagagacagcccatctccacttcctcagtactgaatcaagaagaagcgtatgtcaccatgtctagtttttaccaaaacaaatgaattataagaaaacccttccatcgacaaccaaatgatcactgagatggaaagtctggaatgcttgctctcccccgtagctcacagaagagaaagtcaacgtgaccttgctacacatcttcagcattctaagaaatcattttgctcttctagctcagaagcatttgcacaaagcaggaagaatctgttttccctgttgttggattagtcataagagtccatatgacccaattaaaattgcaaaactcagttaagtgaagaaagaaagatagacaaaagaagatagaaggatgtggtgaatgcaggaagaagaaaatgaaagatgtgagtggtgggtctatcattcaaattgactatttatccagcactataccactcttctcatttcttcctcacaataatattacaatgtgggcttatccattataacttttattttctttgtcatagatgctgaagttgaaagtagagattttaagtgatatccaaatttttctttcagctacagatgaggcacacattccaacttcaaccctctcttgccatgaacctgtcctattgttgagtgtcaaacatcaccactaagtggatggttatgtagtccattatccaaactgagtcgttttggaaagaaaaagttagacataattaacagtaagcataaactgtatatgtctaagagagatgtggatggatggtcattttacttaaagtggctatagggatgaacatgaaggacaaagtacatttatgggtgtggcataccatgaccatgtgtcaaaggaagtgggaaaaagaaaaaaaaagcaccaagatcatttgattttgttttgttgttttgtttgaaaacaaactcaagaagcaatgagttagaagccgagaagttccagagtcagttatcaagaccatgattttcctgctgctattatccattggcttctctgtgacattgtaggaggaactatggccaatctacaggagttcaacatttaacagtgaatggagtcctcctatgtgagtcctcctatgtgtggagacaccattaagaactaccccaagttctacatctctggatattgcctgaactacagaaaaagggggctgcgcacaccacaatgagtgccctacctgaaactatgctcacagaaacacaaagaagatgggtaagttattcaaattcaaatgttgatttatgactgcaagtcacaattttgaatccctgctgtgtataaccaatctcctgaagaaaacaacaaataactgaaagatactgtggttgggtgccttagcattaaaattctgtttaagtgttgacattgtttatttggattggagtgtctgtccggtcatgtattgtatccatgcattatattcagataaccacaacagctgctaatgcttgattatattctcagggactgcatgcaatgtaacattactggttggttctgccaattttcctcttggtatttataaaggaaaaccaaaactcttggtcagagacaatatgcaaaacagagatgtcaagtactatgtccaaatactgtgaaatataatgagaaataggtaacaaatttatcaatcaactatgtttggatccagggaatctcaagttattcaattcattctctgtaagcctttgtctctctcttcatccagacttttgccttcaaatacaagcatgcgctattttctggaattgatacagcactgttcattttgtgtgtgtgtgtgtgtatgtgtgtgtgtgtgtgtgtgtgtgtgtgtgtgtgtgtgtatgtgagagagagagagagagagagagagagagagagagagagagagagagctcagcagtttttctctggtgttctttaatacatccaccattcactacagtgaagatctctgggttgactgtacactttttaaaatgaattagtagtattctctaatgatgttacacagagaaatgtatggtgtgtgttaccatttcatgttcaactaaatgctaaggtactctgtggctaaaatactctctgtaactgtggcaactacatgtaaataaatgggctctacagttcagcacagacttcttgagctactgaaaatattcttagaccatttaaaaggttaagattgtcagaaagatagttttaaattaattcaataatgaactaatagccatttattgagaagccataatgccttacttaaacactatgctggctactaaacaatggaacgagatactccaagctcacagttttatgcagaaaaaaaaaacagactaatattaaaatgtcacattcatgtttcatgccaaatatcagtcaggattcttagtatttagcaaagtaagtttatttgaagcagaaagagagtttcctaaaaatattaaatggttcacagaacagctgggagggtgaaagccagttttgcaggtcacagtgtctccctgtatctctgagactgatgagtctacagtctgaaaatagtccccttcacttgggtcccctgctcctgggaagtcttagcaatgacacccagtgacttcacactatagactgccggagtatgacagagctacagactgtggatgacagcagcaagctttgcccttgtgtgggccatagagatatataagagaaccactagtatttaagtatacagtaagaggcaagcattgctataggagtagggatgggttcccaatatacaatgaagattccactgttaggacagaagaaaggaaaaaaaacaggtatcaaggacagagaaatgacacggcagctatgagcactggctgttcttcagactcagaggacccaagttcaattcccagtattacaattatgattcagcactatctgtaacttctttttgcaggaatgcaacaccctattctggcctctctggacaccaggagtgcatgtgatacacagatgtagatgcaaataaaacacccacacatggataaaattataacttgtaaaatgattttaaaaataggtaaagactatatggaagaagatataagcaagggcaacatgaaggtcacatttcatatggtaactcaaggcactggagtgtaccaagtagctgagcctcgagagggctgaggcttttatcaatataggaaaagtgatccatggaggtgtgagcaaaagcattcagaggaatgttcagcatagcaacttgtaaaacaccaagaaggaagataaatcacatttccctaaaataacataactcatcttgaatgtttactttaaacatgtctatacattctgttgtatgttggtcagtttgggctacttaaccaatgcactgtgatacaggtaacttaaaacattagttgcatatgtagcagaggatgccctagtcggccatcaatgggagaagaggcccttggtattgcgaagatcatatgccccagtacaggtgaatgccagggccaggaagtgggagtgggtgggttgggaagcagggcatggggagagtataggcttttggatatcatttgaaatgtaaatgaagaaaatgtctatacctctcctgggcatatatccagaagatgttccagccagtaagaaggacacatgctccactatgttcatagcagccttatttataatagccagaagctggaaataacccagatgcccctcaacagaggaatagatacagaaaatgtggtacatttacacaatggagtactactcagctattaaaaagaatgaatttatgaaattcctaggcaaatggattgacctggagggcatcatcctgagtgaggtaacccaatcacaaaagaactctcatgatatgtgctcactgataagtggatattagcccagaaacttagaatatccaagatacaagatacaatttgcaaaacaacatgaaactcaagaagaacaaagaccaaagtgtggacactttgccccttctgagaattgagaacaaaacacccatggaaggagttacagagacaaagtttggagctgagatgaaaggatggaccatctagagactgccatacccggggatttatcccataatcagcctccaaacgctgacaccattgcatacactagcaagattttgctgaaaggaccctgatatagctgtctcttgtgaagctatgccagagcctagcaaacacagaagtggaggctcacagtcagctagtggatgaatcacagggcccccaatggaggagctagagaaagtacccaaggagctaaagggatctgcaaccctataggtggaacaacaatatgaactaaccaatacccctggacctcttgtttctagttgcatatgtatcagaagatggcttagtcagacatcagtggaaagagaagcccattggtcttgcaaactttatctgcctcagtacaggggaacaccagggccaagaagtgggagtcgggggtaggagagtggggtgggggggggaggttgtgcggaacttttgggatagcattgcaaatgtaaatgaagaaaatacctaataataataataataataataaaatttcttaaaaacaaaaacaaaaacagaaagttgcctccggtccgccatctgtaccagggacctgatgctgttccacagctcactgtgtacaggtcccaccaggagagagctgatctctcaggagtgctgacacagtcttatatacccactggagggacaagtcccagtcagagacagcaagaccatctaacagcagagacaacaggatggcaagaaggcaaagacaagaatcttatcaacagaaaccaaggctacttggcataatcaaaactcagttctcccaccacagtaagtcctggatatcccaacacactggaaaagcaagatgtggatttaaattcatatcttgtgaagctcatagaggattttaagaagaacataaatcttacacgcgttcacgaccggccagggaagacgcaacaaaccggaatcttctgcggcaaagctttattgcttacatcttcaggagccagagagcaagagagcaagagctctattgcttacatctttaggagccagagcgcaagagagcaagagtgtaagagagcaaaagcaagagagagaatggcgaaaccccgtcccttttaaggagaattatcctccgcctaggacgtgtcactccctgattggctgcagccaatcggccgagttgtcatcacagggaaggcagagcacatggggtggagaactacccttggcacatgcgcagattatttgtttaccacttagaacacaggatgtcagcgccatcttgtaacggctaatgtgagggcggctccccacagatcccccttttcttttaataagagcaataggccacccatattaatgagagtggagatagaggtcaaatccccagtgtgcaggtaaaggagctgtacacataacctcctctcaggctcatcacccagaggggtcctggtctggtcccgtgtcgttttgcctggggagaaggacacttgaacactcaaccttcttgaaagatgacatgtctccctagaataggctcatatatgccgcagagcccttctactgcagtgcttagccatgcaactctctcgggctgttgaagcacactcactctagcccgtgcaatgagactagcctcgtggggtgcaagagctgaatggccagcgacctattgcttaagcatagatatatcaggggaagcaccatgttctagtactgtaagtgcctgggcaataaccaccttgtctctcctagtttgggccttaagcttacagaccaaccaaagaagcaacactaatccacagcaaagtgtatctccaaataatcccacccatacccattctttaaagaaggaaaatgctgaggagatccaattgggtaatcctttggtcagggacaggtccaagcgcgtggagttgacctgaagtctcaattcccaaagagtctgttcaaattcagccgtccaattctgtaacatatactgagaaagactttttgacaaattagctgccctagtaaatttctcatactgaatggaagtaacggacaatcccggaaacttttgttcacatcccagctgagctatttgccataatacatctagttgttcctggacaagatctatgcattgattaaccagcatgagacctccctgtatcttgacattagctgaggcctgtttatctatgactgtggtcaccgaggctgacaatgtgttaatggtgtcagtcgtctggacctgtccagacagagccaaggctgtctgaatcaaggccaaacccagttccttgttactggggaaaaagcaggggaatacttgagcattatacatcaccggcattgggagtggaaatgtcgacattatcccccaatgctgctctctctttgttattgtcgccctggacatcaccaagacgagggacatcagtattcccttggtcagtctggatttttcgagtgactctttctggtatccaaaatgggttgtcttcattctgtggaaaaacacaaacagctcccctggatcttatcaaaataggatccgggccataccatttattatcaaggacatttttccatttaaccatctcattgggcctatctggctctgaacaatgacgttcagccgcagtatggccatgagcatcaagatttaaaaaattgagtgtaaagagtgccatagacacagacactcttggtactcggggtagagcctcgactccccttttctgttttaatagataggatttgagggtgcgatgcgcacgctcaacaataccctgtccttgagggttgtatggaagtccagtcaggtgggtcacgtccatctgacggcagaactgctggaatttttgagatgtataagctggtccattatcagtcttaaggagtttgggtttcccccaagcactccatgcctcaaggcaatgttgaatcacatgtgaggccttttcacctgttaaaggtgtggcaaacattacaccagagcaggtgtcaatagaaacatgtaaatattgatttctcccaaaggaggaaatatgcgtgacatccatttgtcagacctgtaatggcctgacgccacgagggtttacccctacatgagtagataaaatttgacaacaatctaaaggcattattaagtaatcagaatcattttcagtagaaccaatccctctggcagctcgaggaatactagaggaaggaaaaacagccatgtaggcttgccaaaattattagttgagctattctgtccccttgtgatatagaaaagacaacttgaggacaagaacagagaacctgaagttcccctttataatcctgatctacaactccagggtggacaataagaccttgtaggctgcaagagcctgcctctgtcattctggccacaaaatctgagaaggactcctgaggtccctggacgatctttgttagttgtccagtggcttcacctgctcgggagagtgccttccaggccctaatagccttttcatctgattcagaactactaagaactggctccttgagctcatctagtgatgagtataggctgcttctcctagagacctccgctaattgatctttttgcttttcttttttcttttccttccttctaatctctccccaggtattcttacctgacctaaacttttcctcgggttcaagacccgtggaaaggcctgtatacttattttgtgtaccatatttcctctttgctcctactctctctccccgctttacttctgatagattgccctgaatttcatccagaattttcagccctgccttaactgcttgataacatgtgaaaaggaacaaaaaggctcctaacactagaaaaagttcaaggccaaacataccttgtaaagctatttcccactttacttctgatagactgtcttgaatttcgttagaaagttcaaggccagacgtaccttgtaaagctatttcccactttacttctgataggctgtcttgaatttcgttagaaagttcaaggccagacttaccttgtaaagctatacttacgggtaccctgttccccagctgaagagttctgaattcacgcagttgaatccttctcaacagtctgttttacgggaacacttcattaccaccgttccccagctgaggagttctgaatccaggccgaatccttctcaacagtctgttttacgggaacacttcattaccatgacctgcagttctggttccggaatgagggatcttccttgcgccggtgatggtaactgtcccgggttttctcgtcccgggtcttctcgtcccgggtctcagcaccaactcttacacacgttctcgcgaccggccaggaagaacgcagcaaaccagaatcttctgcggcaaagctttattgcttacatcttcaggagccagagagcaagagagcaagagctctattgcttacatctttaggagccagagcgcaagagagcaagagtgtaagagtgtaaaagcaagagagagaatggcgaaaccccgtcccttttaaggagaattatcctccgcctaggacgtgtcactccctgattggctgcagcccatcggccgagttgtcatcacggggaaggcagagcacatggggtggagaactacccttggcacatgcgcagattatttgtttaccacttagaacacaggatgtcagcgccatcttgtaacggctaatgtgagggcggctccccacacataaagaaatacaggaaaacacaggcaaacagctagaagcacttaaagaggaaacacaaaaatcccccaaagaattaaggggaaatacaaacaaacaggtgaagtaattgaacaaagccatccaagatctaaaaatggaaatagaaacaataaagaaatcaaaaagggagacagctctggagatagaaaacctaggaaagagatcgggagtcatagatgcaagcatcaccaacagaatacaagagatagaagaatcacagttgcagaagataccatagaaaacattgacacaacagtcaaagaaaatgcaaaatgcaaatagatcctaccccaaacttccaggaaatccagtacacaatgagaagaccaaacctaaggttaatatttatggaagagagcaaagattcccaacttaaagggccagtaaatatcttcgacaaaattatagaagaaaacttccctaacctaaagagattcccatgaacatacaagaagcctacagaacaccaaatatattggaccagaaaagaaattcctcccatcacataataatcaaaacaccaaatacataaacaaagaaagaatattaaaagcagtaggggaaaattttcaagtaacacataaagtctgacctattagaattataccagctttcccgccagagactatgaaagccagaagatcctaggcagatgtcatacagaccttaagagaacacaaatgctggcccaggcttctatactcagtaaaactctcagttagcatagctggggaaacaaagatattccatgacaaaaacaaatttacacagtatctctccacaaatctagcccttcaaaataaaatagatggaaaactccaacacaaggagagaaactacaccctagggaaaaaaaaacaagaaaataatcttgttttactcagcaattaaaaagaatgaatttatgaaattcttaggcaaatggatgtatctggagggcatcatcctgagtgaggtaacccaatcacaaaagaacatacaagatataaactcactgataagcagatattagcccagaaacttagaatatccaagatataatttgcaaaacacgtgaaactcaagaagaaggaagaccaaattgtggatacttggttccttcttagaatggggaacaaaatacccatggaaggaattacagagacaaagttcagagctcacacagaagaaaggaccatccagagactgccccaccatggggatccatcccatatactaccaccaaacccagacactattgcatatggcagaaagattttgctgacaggaccctgacatagctctctcttgtgaggctatgccagtgcctgaaaatacaaaagtggatgctcacagtcatctattggatggaacacagggcccctaatgaaggagctagagaaagtaccaaaggatctaaaggggtctgtaaccctataggaggagcaatagtatgaactaaccagtaccccccaaatctgtgtctctagttgcatatgtagcagagaatagcttagtaggccatcaatggaaggagaggcccttggtcttgcaaagatcatatgccccagtacagggaaatgccagggccaggaagcgggagtgggtgggttggggaacagggccaggggagggtatagggagctttggggatagcatttgaaatgtaaatgaagaaaatatttaataaaaaaatgtatgtcaaaaaaaaaaaaaaagaaaagcctaaaagaagatagctgcaagaagagaatcccaactctaacaacaaaaatgacaggaagcagcagtcactttaacgtaatagctctttaacgtcagtggactcaattccccaataaaaagacatagactaacagaatggatatgtaaacatgactcagcattttgctgcatacaggaagccaacttcagtgacaaagacagacactacctcagagtaaaaatgtggaaaaaattctgcaggcaaatggccccaagaaataagctagagtagccattctaatatcaaataaaattgactttcaacctaaagttatcaaaaaagataaggaaggacaattcatactggtcaaaggaaaaatctaccaataactctcaattctgaacatctatgctactagtgcaaaggcacccacattcataaaagaaactttactatagctcaaagcacatgttgtacctctcacaataatagtgtgagacttcagcattgtactctcagcaatggacagatcatggaaacagaaactaaacagagacacagtgaaactaacagaatttatgaaccaaatggttttaaccgatatctatagaatatttcatcctaaagcaaaagaatataccttcttctcaacagctcatgctaccttatccaaaattgaccataaaatttataatgaaacaggtctcaacagattcaagaagattgaaataatcccatgcatcctatcaggtcatcacagactaagactggtcatcaacaacaacataaacaatagaaagaccacatacatgtggaagctgaacaacactctactcaatgataacttggtaaaggaagaaataaagagactttttagagtttaatgaaaatgaagccacaacatacccaaatttatgagacacaatgaaagcagtgctaagaggaaaactcatagctctgagtgcctctcaaaagaagctagagcaagtatacagtagcagcttgacagcatatctgagagctctagaacaaaaagaagcaaatatacccaagaggagttgaaggcagaaaataatcaaactgagggctgaagtcaaccaagtagaaacaaaaagaactatacaaagaatcaaacaaaccaggagctggttccttgagaaaaacaagatagataaacccttagtcagactaaccagagggcacaaagacattatccaaatttacaaaatcagaaaatgaaagggagacataagaacagaaaccagaaatggaggaaatcc

SEQ ID NO: 62 - DNA, 3123 bp, Mus musculus
tctctctctctctctctctctctctctctctctctctctctctcagaatgatggctctgggtagagctttcgctatagttttctgcttaattcaagctgtttctggagaaagtggaaatgcccaggatggagacctagaagatgcagacgcggacgatcactccttctggtgccacagccagttggaagtggatggaagtcaacatttattgacttgtgcttttaatgactcagacatcaacacagctaatctggaatttcaaatatgtggggctcttttacgagtgaaatgcctaactcttaacaagctgcaagatatatattttataaagacatcagaattcttactgattggtagcagcaatatatgtgtgaagcttggacaaaagaatttaacttgcaaaaatatggctataaacacaatagttaaagccgaggctccctctgacctgaaagtcgtttatcgcaaagaagcaaatgattttttggtgacatttaatgcacctcacttgaaaaagaaatatttaaaaaaagtaaagcatgatgtggcctaccgcccagcaaggggtgaaagcaactggacgcatgtatctttattccacacaagaacaacaatcccacagagaaaactacgaccaaaagcaatgtatgaaatcaaagtccgatccattccccataacgattacttcaaaggcttctggagcgagtggagtccaagttctaccttcgaaactccagaacccaagaatcaaggaggatgggatcctgtcttgccaagtgtcaccattctgagtttgttctctgtgtttttgttggtcatcttagcccatgtgctatggaaaaaaaggattaaacctgtcgtatggcctagtctccccgatcataagaaaactctggaacaactatgtaagaagccaaaaacgagtctgaatgtgagtttcaatcccgaaagtttcctggactgccagattcatgaggtgaaaggcgttgaagccagggacgaggtggaaagttttctgcccaatgatcttcctgcacagccagaggagttggagacacagggacacagagccgctgtacacagtgcaaaccgctcgcctgagacttcagtcagcccaccagaaacagttagaagagagtcacccttaagatgcctggctagaaatctgagtacctgcaatgcccctccactcctttcctctaggtcccctgactacagagatggtgacagaaataggcctcctgtgtatcaagacttgctgccaaactctggaaacacaaatgtccctgtccctgtccctcaaccattgcctttccagtcgggaatcctgataccagtttctcagagacagcccatctccacttcctcagtactgaatcaagaagaagcgtatgtcaccatgtctagtttttaccaaaacaaatgaattataagaaaacccttccatcgacaaccaaatgatcactgagatggaaagtctggaatgcttgctctcccccgtagctcacagaagagaaagtcaacgtgaccttgctacacatcttcagcattctaagaaatcattttgctcttctagctcagaagcatttgcacaaagcaggaagaatctgttttccctgttgttggattagtcataagagtccatatgacccaattaaaattgcaaaactcagttaagtgaagaaagaaagatagacaaaagaagatagaaggatgtggtgaatgcaggaagaagaaaatgaaagatgtgagtggtgggtctatcattcaaattgactatttatccagcactataccactcttctcatttcttcctcacaataatattacaatgtgggcttatccattataacttttattttctttgtcatagatgctgaagttgaaagtagagattttaagtgatatccaaatttttctttcagctacagatgaggcacacattccaacttcaaccctctcttgccatgaacctgtcctattgttgagtgtcaaacatcaccactaagtggatggttatgtagtccattatccaaactgagtcgttttggaaagaaaaagttagacataattaacagtaagcataaactgtatatgtctaagagagatgtggatggatggtcattttacttaaagtggctatagggatgaacatgaaggacaaagtacatttatgggtgtggcataccatgaccatgtgtcaaaggaagtgggaaaaagaaaaaaaaagcaccaagatcatttgattttgttttgttgttttgtttgaaaacaaactcaagaagcaatgagttagaagccgagaagttccagagtcagttatcaagaccatgattttcctgctgctattatccattggcttctctgtgacattgtaggaggaactatggccaatctacaggagttcaacatttaacagtgaatggagtcctcctatgtgagtcctcctatgtgtggagacaccattaagaactaccccaagttctacatctctggatattgcctgaactacagaaaaagggggctgcgcacaccacaatgagtgccctacctgaaactatgctcacagaaacacaaagaagatgggtaagttattcaaattcaaatgttgatttatgactgcaagtcacaattttgaatccctgctgtgtataaccaatctcctgaagaaaacaacaaataactgaaagatactgtggttgggtgccttagcattaaaattctgtttaagtgttgacattgtttatttggattggagtgtctgtccggtcatgtattgtatccatgcattatattcagataaccacaacagctgctaatgcttgattatattctcagggactgcatgcaatgtaacattactggttggttctgccaattttcctcttggtatttataaaggaaaaccaaaactcttggtcagagacaatatgcaaaacagagatgtcaagtactatgtccaaatactgtgaaatataatgagaaataggtaacaaatttatcaatcaactatgtttggatccagggaatctcaagttattcaattcattctctgtaagcctttgtctctctcttcatccagacttttgccttcaaatacaagcatgcgctattttctggaa

SEQ ID NO: 63 - protein, 474 aa, Mus musculus
SLSLSLSLSLSLSLRMMALGRAFAIVFCLIQAVSGESGNAQDGDLEDADADDHSFWCHSQLEVDGSQHLLTCAFNDSDINTANLEFQICGALLRVKCLTLNKLQDIYFIKTSEFLLIGSSNICVKLGQKNLTCKNMAINTIVKAEAPSDLKVVYRKEANDFLVTFNAPHLKKKYLKKVKHDVAYRPARGESNWTHVSLFHTRTTIPQRKLRPKAMYEIKVRSIPHNDYFKGFWSEWSPSSTFETPEPKNQGGWDPVLPSVTILSLFSVFLLVILAHVLWKKRIKPVVWPSLPDHKKTLEQLCKKPKTSLNVSFNPESFLDCQIHEVKGVEARDEVESFLPNDLPAQPEELETQGHRAAVHSANRSPETSVSPPETVRRESPLRCLARNLSTCNAPPLLSSRSPDYRDGDRNRPPVYQDLLPNSGNTNVPVPVPQPLPFQSGILIPVSQRQPISTSSVLNQEEAYVTMSSFYQNK

SEQ ID NO: 64 - DNA, 39797 bp, Homo sapiens
gaaaataggtttaatagactcacagttcagcatggctaggatgcctcaggaaacttacagtcatggtggaatgggaagcaaacatgtcctttttctatggcagcagcaaggagaattgctgagcaaaagggggaaagtcccttataaaaccatcagatctcgttagaactcattatcaagagaacagcatggaggtcagcatccctgtgattaaatatcctcccactgggtccctcccatgacatttggggattatgggaactaccattcaagatgagatttgggtggggacacagccaaagcatgtaagtgtccaaactgagacagttgaggtgcttcctttatccctcagttgggcttgatcaacctgcaaaaaaaattccttaggaatttcccaaattgaaaggagccaatcccactgtctgctacccacaaaagacactcacttgcctggacacacatacaacatacagttacaaacaagtccccaagagttttcatactgaaacagtcagtgtgcgtccctctcttagtcagttgggtttgttcaacctataaatggaaatgcctttaaaaatgtccctgagtgaatggagcagatcctgctgtctggatccacaaaggacattcatctatccagatgcagatgtcatatttcaagggctgtatttcctaggcaatcaggaacatggttggggccagcaacagcaaagcctgagaaaaatgagaagttatcaccagccaaaattgagcagacagctgcttaggaaggcttctgagactgctgacacacagcagcccagccatgagcaacatggtcatggtcagggaactaaaatctgttaccaaaacaccaggggttcagttgaggtcctgctgctcatcacacagaaagccaattactgagacaatttttgccaaggaagaaggctttaattgggtgctgcaactgaggagatgggagataagtctcaagtccatctccctgactgactaaaattagagggctatgcagcagggaagaaatgtaactatgtatgggaaaacaggagctcaggagggctaaggaagcaatcataatgaatgaggggccattatctcctgagtttcacgtctttgatgccttttgagaggactaaactcattgtctggctctgcttcagaagaaaagtatcaatttctatgtttataaaaagaaataataactgattatggcagatgtcccagactttttggcaccagggactagtttcgtggaagacaatttttccacaaagtgggagcaggggatgaaattgggttgaaactgttccacttcagatcatcaggcattagttagattctcataggaagcacgcaacctagatcccttgcatgtgcagttcacaatagggttcacactcctataagaatctaatgctgccaccgatctgacaggggtcagggctcaggcagtaatgctcactcgcctgctactcacctcctgctgtgtgtcctggctcctaacaggccacagagcagtaccagtctgtggcccagggactggggacccctggtctatgggactattggatctgtttcaatcaaagcacacaacaaagggataggaaggaaattccttaacctgataaaggacatctaagaaaaccccgtagctaagggcatgtttaatggcaaaaaaaacctgaatactttgtccgtgaaatcaggaaaaagactgacaaattctattctacattgtcctggagagtctaaccaggacaattagccaagtgaaagaagtaaaaagcctccagactggaagaaagaagtaaaactatcaccatatgcataaacatgattctagatatagaaaattgtctacattcacaagaatccacaaggaaaaaagaaacccacaagaaaaaatctattagaacaaataaattagttcagaaaaattgtaggatataagataaatatactaaaagcaattgtatttttatagcaagcaactgacagtatgaaaaggaattaagaagacaaatccatttgtaataacattcaaaagaaaaataaatacttaggattacatttaacaaaagaagtgagaactatgaaacactattgaaaacaatgttttaaaactttaagaatggaaaaatattctgtgctaatgaattaggaggtttgatattataaacggcaatgctctcaaaattgaccttcagatttaatggagttctgtcaaattccagcagcctttttttataaattagtaaattaatcctaaaatttatatgaaaatgcaagagacctaaaatatgtaaaacaatcttgaaaaaaaaggaaaaataaaattggagatcttaatttcccaatttcaaaactaaccataaagttatagtaataaggacagtgtagtgccgcaagaagagtagatatatagatgaatggaatagaattacgaatctaaaaaaaataaccgtgtataatgtggttaattgatttcaggcaagagtggcaagacagctgaaaggagaaagagcagtcttttcaacaagtagcttttccatcaactggatatacacatccaaaagaattaagttcctatataattttttttttgagatggagtatcactccgtagcccatgctggagtgcagtggtatgatctcctctcactgctacctccacctcctgagttgaagcaattctcctgtctcagcctcatgagtagctaggactacaggcacccaccagtacgcctggctaatttttgtatttttagtagagacagggtttcaccatgttggccaggctggtcttgaactcctgacctcaagtgatctgcctgccttggcctcccaaactgctgggattacaggcgtgagccactgcacccaacccagttctatataatttgtacatgatgatattctttctagagaagtcgtgaggagaaccttgggactgctggtgtgcttcgggtctccagcaataagatttttcagtaggaaagccaaaggctgccaccttccaggcctcgaacgagggtacagctggtgagaaggtgatggaaggggatggagcagctgcacagccaggcagttgttcttaacatctttgaggtcacagacacacgataacaaggaaaagctacaaatatctctagaaaaatggagagcaagttttgcacactatcgtgaggggtttcctgcccctcccaccccaatctatgtttgagacccaagttagagcacagatggatgtgccagtaagaacaatgctctgatctggtctggcttctccagcaacagagcttcaggtaattgctaagtcctgaagaagaaatatacacctttggccattcatatggggctggaaatttaaaaaaagaaaatctcttctcttattctcaccacaaatttgtacctgaggggctgaaggaaccaacatgagagtgctgagtgaggagaatggcaacctccctctgcttaaatctgttttgtgttgtggttctctgcatggaattttgtttggaaagtaaatgaattctactgcttaaaaagctctgaattccaatgaatagggcacgcatttagaatcgcacttgggtcccaattctattcctgcaagtgcctctcacctacactatcctaacctgcaaaatgggagaatgacattactttagagagttactctgtgacggaagaacatggttcagtgcctgtcacacagatatttggtgcatgtgagttttcttcactatctgctttaatcaagaagatagcaaatatggcaagtgatatcagaaaatatttaaccatgtttctccttcccccattaaattcaccctttgtccctctcccaccagttacccattgctccaagcaaaaattgtcgtcctagaatacagactttaaattcctgcccttggtctttgagatgcatgcgtttgcatgaccactaaatatacaactcttgcagaagctgctgcttctcttaacatccattctctccttctttctttaactaatagtacctccaattttagttgggcatatagcaaacctctcttcagactgtattacccttcatctcttgcagctaaagtgcccacagtgactactttctggccacaatgttatgagcagaagtaactttcagatcatgtccttaaaagggaaccccgtcactttctcctttttgtctactctcccagagaggaaatgggatcatggtgctggtaagctaacctcaaatcaatacgtagacaagagcagccacctaggaaatgaaatatagaccgggttcctaattgtgtgagctcacggagctgcctgcctgctgtggataatccactaattgagagagcaataaatttgcatccttgctagagccgctatgtttgtgggtctccctgttttggcagcatagctcaactaacacatataacaaaaaaaaaatcctttattaaattccaaagtttcctaagaccgatgataaagtgaaagcaaaagttggcagtacattaccattttcttggaaagcctctggaaagaatgattgtatcttaatcacttagcccaggggtatgcagtgtgaccaaagacagagcccttgttcctgcttttttaggaacacctgctgattctctgtgacaattccatgagcagtataactgagggtcgcttttaaggttgactttacttttttttttcttgagacagggtctcactccgtcacccaggctggagtgcagtggtgccatctctgctcactgcagcctcaaccttccaggctcaggtgatcctcccacctcagcctcctgagtagcttacaggtgcacaccatcacacctgattaattttttgtatttttggtagagacagggtttcaccatattgcccaggctgggactttgcatattaagcttgggaaattttaggctagcagagttgttcttggggactccatttgcacagaggactgggttctaagagagcagaggaagcttcagagtagaattgaggactcttgccagttctcccagtggtccagatttggaaacgacctgcagggtgtggccaccaactgtggtccctcaggaaccactctgcaggaatggagcttaccctgaggcaagtactgtgtgcaggggcacgggccagaacccagaatggggttgcttgatccagacttttctcagaaacacactggggcactgtgtccgacagtggagtgggcagccggagctgctgtgaactgtttgtccactgggaaggccagagagggagacactgagctgcagggacaccacactggctcccgctgcccaaaggggcactgtgactcagcctttgccagaaggcataccactctcaccactcttcccagggtcagccctcttgttcactgttttatcaaaatgtgggcatgtactgaaattgaaataccactcactttctggcagaaatgtcgtcagcaaagagtgaaatgttggtactcaaagtttccatttttattgcatccagagacagaggctaaaatctcataaaggtgaaaatagtatgacatttcaaactctgcccagaaagaagacaaatggcagcaagacatgaggctgaagacgtgggggaaggaggaaagggaaatgaaagaagagccacaacaaggaaaatgtcatgctcctggaaatgaaacttcaagatgctgggactccccctcagaatcgtagggactgactcagcacatgtttatcaaatgctagagactattcatttaggaccagagtggcattagctttcctacagccatcctcacctgcttgacacccttggatgttgggtttttttgtttgtttgtttgtttgtttgttgttttttttttccacagctcttgtggtccccagcctctctcttgagcagggctggctttttttttttaataagatagctggtgcccaagattgttttccaccttaaggataaaacctgttaagaaaggtaagttgacagtaggtgggggcaggtcatacagattttatgacacatagaatgtgttttcagtatttttcaaacatcagattttacccaggatattactgttgcaacatttactgcctgttattattgctgtttcacttattgtccttcaatatatagtcccaaggtgagtgacttttaaatcatcctcatttaggacaaattgctaaaggcttaaggactattttataagcttcatctaaaaactgagtcagaggaatgcttttgtccttgaaacattttgtttcccagggttctcatgatacactggtatctgtccaactaaattcataatttctgtagagaatagagtcaaaatttctgttcctaatagatggatccagatagtaaacactagtaataagacaagatgctcagcctgaattttcccaggaaaacctttgtctttactaatcagaaaaaaaaaaaaaaaggaagatctgggctagatttttatccagttaacaaacaacaaacaaccaaataatggatacacccctctaacattttaggatctcaatctcgttaaaagataagttctcttaacttgctaggactctaccggttatataggaacaccacagaacttattgcaatctgaagataaaagaaagtcttttttgtgttttgcctgttgggcaaatagcctgaacaattacaaaaaaggaagaaaaggagacttggccaactggtgtcaggagtcttaacaaggtcagtgtgttctgcttgtgtatgagaaagaatcaaatggctttttttttttttttttttttgaggcagactgtcactctgtcacccaggctacagtggagtggtgcaatctcagttcactgcgcaatctcggttcactgcagccctgagtagccaagactacaggcgggccccaccacacctgactaagttttctattttctgcagagacagagtctcactatgtttactagggctggtcttgaactcctgagctcaagtgatctgcccacctcagcttcccaaggtgttgggattacaggcatgagccactgcacccagctggctttcctttttaatgattcactacatcatacaaactcatcaaactgaaggaagacaaagtacaaaagagagacgagaaaatgtagccatgaaaggaagtgatgggtgaagaggaggagaagaaatatggccaagtcagttgccatgccaaactgcttgcttctaccacagtccaatgcttccctcctgatttcacatttggagacttgagtgtccccaaatagtgttcctcatcctcttttcttctttctgtgcttgtctcacaaaagtaatgacaaagtaatatagtaaatgtttgttacctgggggatagggtgaactaggtggttcttcctcagcttttctaagtctccaaaggactaacaagacctgagtgaggaaagagagaaggcactgttgttcccccacaatctctagaaggactggtgacgcatgtcatttttctttgagctccccacactttaggcttctctctgaggtcttttcagcatctcctgccccacccaagagtaagcacccctgtggaaatccccagaacaaaccagcacatgctgtaccaaaatattgtgtcttggctttgttcttttacatcttcacaactaaaggaaagagatacaatcaaaatgatagtccacttaaatgataaacaagagaatttaaagagacataacccagttactcacccatgaagtgacaatctgttagcagtttaggagatttgcattggtagatagatataatttgggatttctccttgaacattagcttaattcatgggaatctgtaattatagctttcttgaaagggtatttagctcagtgtacaaaacataccaatttttgtgaatcaggcttacaattttctaaccaagctttcaaaacaagattagaaatgagggcataaattattatcgatgcacaaaattgtcactctttatttggcttggaagggttttgaaatgcccagagaaggccctgacaaatggagaagatggaatatgtccccttcagttggattcttgctccgaagtattccttgagcctatactccaaagtgtggcattataactggtgcagacggagtctgtcttaaaactgaaaaggaggatccagagactggtacaaatgtcccacctcctttttttcttacttcgttattgtcaaataattgtaatgatgggacaagctaaatcatgagtcttttaaagtctcttcgatttgctttacacctggggggttgttgcttgtctctgctaattttagccatttcacaggcccatgggagcaattctacctaatgacagtgaatccaacagaagttcataactcactgatcacttagtttctctgcactcctcaccttataactgcagtcttgtggcatttttccaaaagagagccactgtgaatcaagcatagagttttatggcctgaatccaggttagattatttttttcaagaaaaagaaaaaaaaatctaacagttaccaagaagcagtcaggctttacaaatatcaccactttaaccatgaggccatattaggaaggcttttgactggcattcaggtttgggggagtctgaattttctatgccatggtctcagatttctgccccatatacctaggcactaatttagttcatatgtactatgtgtacctgaaaagttgtgtggcaatcaaattttcacaaatagaatcctgttttaaatacactaagaaagtacctactttatcctttaaacaagaggtcagcagactttttctacaaagggtcagatagtaaagattttacaccttttgtacaatacaatctctatctcatctacttagctctgccattgttgcataaaagcagctgtagatgatacacaaatgggtgaggctgtattccaatgaaacgttatttgcaaaaacaggtggtagattaaatttggtcccaaggcttacttgggaaaaaaaaagatcttttgaaaaagaaaaaataaatgaataattttttaaaaaattgttccctaggtcatagtttgccagcccctgccctaaacaaataattcttgaatgcctactgtggtgtgtaagatatgagtaaataccagggatacacagagaacaaaagagaaaaactgctattcttgtgaaacttggaagttggaggtaagctatttaaaataaacccacaataaagtacttcacatagtgcagactgtttctttaaatcaaaactcactccaaacaaccaattgattcactttgtaagtttgaatttttgtcttcagattcttttaaagtgggcccttagtcaggagcggtggctcatgcctgtagtcctagcactttgggaggctgaggcaggcagatcacttgaggtcaggagttcgagacaagcctggccaacatggcgaaaccccgtctccactgaaaacacaaaaattaggctggcatagtggcatttgcctgtagtcctagctactcaggaggctgaggcaggagaattgcttgaacctgggaggtggaaattgcagtgagccgagatcatgctattgtactccagcctgggcaacaaagcaagactctgtctcaaaaaaataaaaattaaaaaaataaagtagcctctagcctaagatagcttgagcctaggtgtgaatctactgccttactctgatgtaagcacagtaagtgtgggggctgcagggaatatccaggaggaacaataatttcagaggctctgtctcttcatgtccttgacctctgcttacagcagcaatacttttactcagacttcctgtttctggaacttgccttcttttttgctgtgtttatacttcccttgtctgtggttagataagtataaagccctagatctaagcttctctgtcttcctccctccctcccttcctcttactctcattcatttcatacacactggctcacacatctactctctctctctatctctctcagaatgacaattctaggtacaacttttggcatggttttttctttacttcaagtcgtttctggagaaagtggctatgctcaaaatggtgagtcatttctaagttttcttatggattttggattatctgtagcatggtttcaggttattcagttccctaacagacctgagtcaggcactgggtttgaatgcagtttgagaatttcccacatattcagtcattttttttaatgttctaaccaccatgacagggggcaggggatcaatactatgggtggtttataagacctcagtattctcaagaaggaatgcatttcactcccaagtgtagatcttaaatgttgaatgattactctgctcttacaaaaagaatgctcatgtagatgctatgactgtacttgtaggaaaatgtccaaagtaattttaccttgtcaggagatcaaactggattcattttgtttgactttttaagaaatcctgaaagcataactttcaggataaggtaatgtacagaagagaagcaatagctttgtcttcagtgaccagtgctatatcctcagcacctaaatcagtggctagaatatagtagacatccaataacttttgaaagtgttttcaaaatactttagttttgagagatttatgtgagattttaagtaaataactgactagagaaagatctaaatgagtttactcattgaaatacactgaattgcctccacaccaacaaattggccatatgtaataattctttttgggatctaaaaaacttagtaccgagaagccaaccctgcccatacataaacacattgtaattataacaaaactaggcagaagcttctaacagcagcaggaggcatgtgggaatttagaccatcaacttgctcctgcaaattaagccctttctctttaagagttaaaaactatttggctatagacaatatcaaacacatcagcctaatgactcagcttatgcattttgagtcatgtaattacgaaggatggaaatccctagaattttctcattaagggaattgtcagagagtttgacattttttacagtatatgactcactttatgggggatgattattattctatgctaaactttgccttggatttccacaaagactgatgggaggcaggaaacataaatcttactctctttcatgtcatctatactcactagttcaccctggtgatcatactatttttaaaatatataagaatgctagttgaaagctgggttttcactccaactttttaagtttcagattttttagaagatgtataattaccctattcacatgattacgtcaaaatacttcccagtttggggtataggaattcacattcagttgctgcttgttgaaagttgtcaattttctgatcatcacaaggatgatcaagagaagaaagggatactttttaaaaatccaaatcatttacactattaatcaactaactccattcagtaggaagaagacttctagatgacactggcttgcctatgatacatattccacacaatttaaatttttatggataaatatgtctagatacctatttaaatatgaataatattaattattgagcatttaaagaataatagattaactcattattcaaaagctctatgtaatttcaaaaccatagtaattataacaccgtcaattgacataaactttttaaagagaagctcaaatgtttcatgtatattttcagaattagaattcttattttaccttttcattacttatttctcagaaaatattatactcatagctaatccctattaaatccttactgtgttctaagctacctctttgtaaatatccattcagtgattgctcatagcacgagtttacatattagaacacatgtcttagagaagttgcctacctgacagaggaccacaggtagagtatccagaatttaaacgcacatctgtccagctctaacaccacaggtcttaaccactgtgtacattaactactcttagccaagaatttttcagctcacgtcatgtagaatattctttttgtaaaatgccatcacattttataagtcattgaagggaatttttcttggttacaaagcaactctgccccataatatctactgaaaagccagtgagctgcttcctaaaacacagccattttaggtgcaggaaacagtgtataaatggctcattgtatattgtatgctttgccagactgagtggcagtgggagtcctttgttatgtgggtgctgacatctgctagagtgtgctgtctctattgaagaatcgtgaagacaaagccgacccacaggatgtctgaatccaaataataatacatgttctgtgtatagaattggtggaagagaaaatgtcaggacagtgtgaggactgccatgtaaggtcagaaccactgcatttagaaagctaccactgcacagggaagaaatctaagtctacaaaattagtgggctgtctctcattatttcgtgctgtcatcagaaggagggccataccctgctgaaactacataaagagcttttgctggtggcagaactgtgaactggatggattctgggaatggccagaaaaacaaatgcctgtggttgtgagcagtgcccacacccatggtctagctagggctgtttgagatttgttgctttgactgaaccaacctgtcattcaactggttggtccattcacagtcagctttattaactttcccattttccctactgagttatttaagtaaagaaagtgctattcggacagcccttggtctctgggacaatcaactgggatttgattttagtatattctgtctccagtgtaaagccttggaagcatctaatttctagtactgatgaaccaaaaatacatggaagcagtcctaggctcacacttgagcactctgagaatggctttgcttactccagattttctcaggtcccagtgggtgtatattttctgacatatttattccagcctcactttcctatcatgtaaaacatacatacaaaatgtagatttcattatagggtctacaaaacagcttaagaaaccaaatactatgtgtgacagatcacactttccaaaagtaatagcaaaaaaaaaaaaaaatctggttccccactttcttccagcatcctgctagaatctatcagatactgcgtctatagaagaatctataagaacagaagcagtatgtacaacattcacaggaagtttcaccaaatcggagtcctgccagatctaattttttttccctaatcacgtttgtctcagtcagtagcttaagacaatggaaataatcagtgccacttttaattgggatgcctttttaggcaagggaaagtgacctcttaaaaaagcaaaattctgactgcaagatagctatcattgtccttcatttaagacaaaaaaaatactagggagggaataaattatgatttgtaataaagtgaaaagtgagattaggtagcatggggataatggaaataaagtgtctcttctttgaaataatatgaacaatcaatgtaacaaatgtagcagaaaaaactccagtttaaatacagaaaagaatgtgttcaatgcctctggttctttaactcagaaatatttggaggttacttactcattatgatggattttttttttctattggaaaactctgttagcattgagcgtttttgttttttgttttttgttggttggttggttttgaagcatttttcttgtctttgcccttgggcttttcttccttgaatactacataatccattactatttcatgtctgccacagagtctgctattttattaaggtcatgccatatttcaaaaggatgcatttatttgtttcattaacagctgcatgtttgttcctccccaggagacttggaagatgcagaactggatgactactcattctcatgctatagccagttggaagtgaatggatcgcagcactcactgacctgtgcttttgaggacccagatgtcaacatcaccaatctggaatttgaaatatggtgagggatggtggttttaatggttgcttagacatcctctgtctctcttttcatatgctctttttagtagccacaaaagaaagaatatgtggcctaattaacaaatgttaacatctaaggaattcccaaaggcctcctgaaactccttgtccttcaccaaaaacactcatacaaagctcctctcacggttcagctttcagaccctgagactcagtcaaatgatgctctggatcttggggatcccacatccctcccaacttcatatcagaatttaaatcctgcgtctcctacaacacttctcaccaaaaatctgtttgcccaacacgagacaatccagtgtcttcaagttgcatctgagagttaaactgccttgtttccaatcccaataccagtgcttactagttttttgacctagagaaagttatgtaatgtatctatgcctcagtttcctcacctgtaaaatgagataacctgcctcacaggaaggctgtgatggttaaataatttcatcatataaatcattccaaatagtcggccagtgaataacgagtaatggggaagcaacattaaattataattctgtgaatattgacctaacttctaccatcttgacacaatttgacttcagatgatcctctcaatgtaaattttccaaaaatccacaggaataagttggcattttgtttcacaaggtctcacagaaaagacaaaggaaaagagtcttggtttgaaagtttactaaaggtctcagggaactttatcttctccttctccttcatccataagtcatctcttgttgccaagggttactatctctggtgatttgagaaactactctagcttgaaattctgacctgaggctatctccaaattcatatccgaatgacctactttttagttagtgtcctagtgagcaaagtaaatcaagatccaccagtagtaatagaaggcttcctacattccatagacactgagacaattctccacagtctatagtccaaacaagccctgaattccagtttttgtcaatttatgggagcttcctgcatctatttatggagtgctttctgctgcagtccttagataaacatgctgttggacttgagtagtgtactgtgttctctgtctgcctctgttcacttccctaacacattttccaggaataaaatatgtcaaaagaacctgaaccagttcgatgtccacaatctaggctggaaatggattgcactaaaacagccataacaactcattcaaacaaggcactcattttcatgggcaaatcactctcccacacggaggtttgactttggcttctttaaccagctggctggtgggctgagtgttcatcctggtttctcttggccaagctgaggttgacctttctgttcactttcattcacaccatatttgaccacttccttgcccactcaaacatacttaccctttaacatatctcttgacttttcctgtcatattgtaatctgtccagagcctcctctatttgggttttccaattggattcagatatttcagttggaaagggactgccttaagaaagaaacgttttcagtggaaaatatatgtatgagctctttaatagatgaactcctggagttcagagcccttaaaaggatgcccagtttcacaagacagccatacggtcatccttgattgtccattgctcattaatttcattctcaaaatcatgggaatgagctgagaataccattttagatcctccttaaattcccaacagtaccagaaacttgctacaggttggggcctgtaattggatatttcacacatactttccttacaaatatattctatactcaagaattgaactaaaagttattgtcctagtttctccacatcccatgtttacctaaaattcagaaatgggaccccgctcccagtctccccttctatatttatttatcaaatcgtgacaacattaccatcttcagatctttccacctgatgtttgtcctaagcttattccctggtatctgtctagcttacccaaaaattcggtttttatttttatcctgttccaagttgggaaagcctatctaccccaacaaggaacacaactccctagtaactttgagacacacacacacatacacacctactctttaaagcctaaacagtcgcacactctaaaagatagcagttaacaaaagtaacgatttgggagaacagttttaaggaatgtccccaaaataatcaatacatttagccagttaattaacttaacatttcttcaccaatctctagttttcatgactgtaggagcttaaccagtcactctcagaccacaataaaccaaaggtgaaagattctgtaacgaaagctagggcactctcccctgcatttaacctcctggccagctcactcgaagccagacaaacaggttcctctttttgtgcagagtccaggaaccattctcgaaaggactcatttgagcacatgcagagaagagtgtacacacatccagttcaccaagggaagccaacacacattgtgggttgtaggtagtaaaaggccttcctagaacacactccttaggatttaaacaaaattacatcggttaatggaaagaattctttcatatacgcaaacttacccagaggaacttttcttctgcccagatcttcacttccaatttgacccagttatacctctttagagctatttggctgagcttaaacagcacataggaaaaacaaattggtaactgtgtttatcacagaagaggaaaattaaatttagggttgggaaaggaaaataaccctatgatattacttttattctacctttacaatgagaatatatacctttgttacttctttaatttttacattatttacttatttttctttgctttcttgtttgattacaatgcattttaggggtaaaatttatgtgtggtaaaatgcacaaaaattaagtgaatttggagaaatgtctatgacctgtagccattccaatggtaaagatatagaacttatttttcccctagaaggatgcttcatgttcctttccagtcaatcttcataccccaggagcaatcataattctcaattctattaccctttggtttttgccagtttctgatagttcttattaatagaatactctttattcttttctgtcttctttcatttaaccagtgtttgtgagagttagccatgttgatgtccatctcatagctcatcttttcaattgctaagtagtaattccactgtatgaatataccacaaatttttaattctttctcttcttgatgaacatttgtgttttttcaagtttgagactattattttttaggttgctgttcacattcttggacaaatcagtttgtgtatatatattttcatttttctggggtataaaacctcagaatggaattgctgtgtcataaggtaagcatgtatctaagtttataagaaaccgcccaacagtttttcaaagtggttataccattctactctctttccagcgatgcatgagagatatacatcatttgcaacgtttgactttgggatagtatctcgttaggtttttaattcgcatttgtcaaataacaaatgttgagcagcttttcatatacttggtcttttgcctgtcttctttgggctagtatctgttaaaagcactgagttatttgtccttttgttattgctggatatgagttctttatacattctgtatacatttcctttgtcagatagatgtattgcatctattttctattctgaagtttgccattttattttcttactggtgcgttttaataagcaagagtttttttttattttgatggagtctaatatatcatttattttcttttatatgtagtgctttttgtatccttgctaagataactttgcctactcccaaagttgggaagatattttctcatgttttcttttaaatgttctacagttttagcctttatatttagtttttttaattattattatactttaagttctagggtacatgtgcacaacgtgtaggtttgttacatatgtatacatgtgccatgttggtgtgctgcactgattaactcgtcatttacattaggtatatctcctaatgctatccctccccgctccttccacctatgacaggccctggtgtgtgatgttccccttcctgtgtccaagtgctcttatcgttcaattcccatctatgagtgagaacatgcagtgtttgattttttgtccttgtgatagtttgctgagaatgatggtttccagcttcatccatgtccctataaaggacatgaactcatccttttttatggctgcatagtattccatggtgtatatgtgccacattttcttaatccagtctatcattgatggacatttggcttggttccaagtctttgctattgtgaatagtgctgcaataatcgtacatgtgcatgtgtctttatagcagcatgatttatactcctttgggtatatacccagtaatgggatggctgggtcaaatagtatttctagctctggatccttgaggactcgccacactgtcttccacaatggttgaactagtttacagtcccaccaacagtgtaaaagtgttcctatttctccacattccctccagcaccttttgtttcctgactttttaatgatcaccattctaactggtgtgagatggtatgtcattgtggttttgatttgcatttctctgatggccattgatggctaatatccagaatctacaatgaactcaaacaaatttacaagaaaaaaacaaacaaccccatcaaaaagtgggcaaaggatatgaacagacacttctcaaaagaagacatttatgcagccaaaagacacatgaaaaaatgctcatcatcaatggccatcagagaaacgcaaatcaaattgcgtttatttgtttctcttgtcttatgcattggctaaaacctcctgtacaccactgaatagaaatggtgaaagtggatattcctgtcgtgtcctggtcttagggaaacaattcatgttcacaatttcagcattaaatatgatattaactataggcttttgtaaatgctctttatcagattgaggaagtgtctttctatttcttatttgctgtgagtttttgacatgaatagatgcattcatgttattaaattatgctttgaatgcatcgattgattataaccaggttatttatgtcttctagtctgttaacatggcaaattatattgattaatttttgaatctttaacctgctttggtttccctgagatgtgccctactttataattatgtattaaaattagtgtgttagtattttcttgtgaaagtttgcttatacatttttgagggatatttgtctatcaacttcttttctctaatattttggccaggtttgggtaccaggattaagctagcttcaaaaaataggttgagaagggtcattcctcttccagtttctaaaataatttgtgtcagattgacactatttctttccttatacatttgatagaatttaccagaatataaccatcaggcatagagttttctttggggggaagtttattgataataagtttaatttctttgagagaaatataactattgaaatattccatttctatgtgggtcagatttactaatttgtgtttataaaaacattttcattacatctaagttattatatacattaaaatagcatttaaaatttccttattatacttttaacatctgcatgttctatagtgatatctcctcttacattccagatattagtaatttatatattttgttttcttaaccactcttgttagggttcaccagccaaaattacctatgaaaatccgttacgttacccatcaagtatatgtgatattatgtatataaccctttatactatgttatcattttctttaacactttttttaatcaatattttttacagctcttatttcttacatatattcctatggaacatcaaaaaaagcaattactttttaatctaaacaaagtatttgtttttcagtgatcaattataaaaatatagaaatttcccataattttataaatatgtcttgactatttcaggttcaattgcatctaattctaagtaaatcatcactaagtatcatagcagcagaaagccataagattttaattcattatctctcattcctgaacatgcctccactcacccacccacatacctatgaacagagttaaagtcaaacatacatcaatgtgcatatgatactattccactgcatacaggaactcctacctgaatcaagacatatcccctttttattcctacagtggggccctcgtggaggtaaagtgcctgaatttcaggaaactacaagagatatatttcatcgagacaaagaaattcttactgattggaaagagcaatatatgtgtgaaggttggagaaaagagtctaacctgcaaaaaaatagacctaaccactataggtaagaagttgtatataaaagtatggttgtcacttttgggctacctgaaaacactgtgtctggacattctgtaggttaaaagtagacaaatagtggaaacaactggcaatagataatagctaattccctactgtaaatttttataataaatgaaaagcttgaaatttatactttcctgcagtgaaagaattctgaggatcttcaaacccaggtgtgaaagatagtgtttgtgcaaacctacatgaagtggctaactggagctgggcttcctgtcatccatcacaggtgtcctttccttccttatctgtcctttccttccttacctgtccttctcccaaattccttgtggtcttctccccaaatccccacaacattctgagtaagtttagctaacttatcaagttattttaaaaagcatatatgccttctctattagtcagagttttctacaaaaaaaaaagggaatcaataggaggatagatagatagatgattgataggagagatttctattaagaaattgacttttgtggttgtgggaactggcaatcgcaaaaatccataaggcaagccagtaggctagaaattcaggaaagagtgcagtattgagcctaaattccgcagggcaagaaactcaagcagattttctgtattgtactcttgagacagacttgcttcttcttcagggaacctctgtctttgctctagaggccttctactgatgaggtgatgcccaccacatcacggaaggcaatctactttactcaaagtttactgatttaaatgttaaccatgtcttaaaaatacttttagcattccctattcgctcccccttcaaccctcaaaaagaaaattaaaggtaagagagcaatactcattagagataagaaagagtaagaaacctagctcagctttgtctcagttttgtttcattaagatgattaaatagagagttaaagcagaagttccatgtgtgaacaattaacttgtgaaaaggcaaatgtagtagaaaagagacattaggcagatggctgtgcatgttggccacacagaagcagcattggccatgaccagtgtgggtcctggttaggggaagagaactgggtttgacaacaacagggtatctctgaggttataaaaagttgggttctgatcatttggagatgaggtccctatggatagggcaccatatctaaaggttcaccatttacattgcaaatatacattcagttctctgagagtgagcagagaaggcagaggttctcagtcttctgacaaggtcctggagcatcaggggagagcccattcttacaaaactccacaccagcatgcaagcccttacatgcacataagcactcacaacacaccaagagcctccaggtgacatctgccacctccaaatccccatatcccacatgctcaatgcacttgcagtctccatcccccagcagactgcaaatctgacatgcctcatccgaacggcaagggggagaggtacgtatggtacacacactgctgatggcataggcccctttggaaggggtagtgtgagtctcttggggctatggcaagcacccctggacaagcaggaagagaggtggtggaggcatgtctcacggtagcatctccttctaggtcctaatgggacacttcattaatggaactaccatttaagtgagtttaaactggatgcttctgattgagccccagagccagtgctccactgccaccacctgcaccctcacttccccttgtttaagcatcttccaacccagtaaggctgaagagggaagcttcctgccttcccacttctcttagcagagtagattgatatgattattcagattgtacaagaatctattccctctgaagtattgcttgatgaatgagcccctttttctaatttgctcaaagaaatcatttgagcttgaggaaaactgtccagagggcacgaggaccagccgttgtgatatgtaacaaggtagagaaacaaaagctaaatgaagaagagtgagcctcagaatcaaagaactggatttggatccctttaaaccattttacaggggcctgaatgtaattaacttctctgaaattcagtttccttatcaatatgctggtgataagtgactattgtttgaagacagcataagcaaagcatgcagtacttaggagatgtgttcttccttcaattcctctattattaaaagatgggcacagggcaggggcttcagctcagaaggccttgttgagaatagaatggagagcaggaacaagagagaggggcaaaggcattgccagcattctctgttcggctgttctccacccactgcctttcctcctgcttccctctaagtccagggcattttcccttttgataaacttccccttttacaacccatccaagggtgaaaaacaaagtcattacttttttttcagtacctctaaggcaaagcagcagaaacaggcagtcaccactacgaataagtgactacaacaagagctaggccaaactctgccatgtgggctgcattttattgggccggcaagtaactttaaatcccagctcacactctactgagtgaaagtctgatgaacccgcatcttcttgtgaacaactgcgcctgagatcagtcatgcaagaagtagcacccccacccccagacaactaacttcccaggctgtgaccaacaagcagccaagaggccaggacagggaagtctcaggacctttctaggaaatcaatacctttctctgggtttgttctgcctgaaataataccaatctccctccaacagcttagcatgtgtggagcatttgatactaacagcaaccctgcaaggcaggaaggcagtagggagaggcccaagaggaattcagcattaaggcagtgagactgacagaggggaccccctgaggacattctggaaggtcttagccagggccaggatgcagacccttcatgtcactgtagctgagacgaggtgcaaggttcacagcatataacctaattttattacaagaatgaagactcagagtttaaatactcctgctttggggctcattagtaacaagttctccaatattcaaaaggcaaagtggatgtgttttagtgtaaaattaacactagctgctgtaacaaataagcccccaaacatatgatatctcaaacaccgtaggtttatttctcactcacatcagagtcaaaatggatgtttctaacctgcagctggggcttctcccagcagtattcggggcactttccatcttgtggctccaccgtctgtaatgcaggactccaagtggtggaagaggacggagcagaggagtcacacatgggtgtgtgtctggcccagggtggaagtggatgtgcatttcttctgcccacctcactcacaaggccacaccccactgcaagagaggctggagaatgcggactggatttaaacccaagaagaagaaatggttttctgaatagttggccatttactgacacaaaaagggtcaaagtgacttgcagaggagatgaattttaaatactataattatttccttggctgccctttagacagaatttatttctttttcttttccagttaaacctgaggctccttttgacctgagtgtcgtctatcgggaaggagccaatgactttgtggtgacatttaatacatcacacttgcaaaagaagtatgtaaaagttttaatgcacgatgtagcttaccgccaggaaaaggatgaaaacaaatggacggtatgtagttcaactacattaataaaataaaaacttatgaatgttttctattttgttggcctagtagtgcatttcccctgggagggcccaacaattttgctttcaaaatctaccttctactgaaagaatctcccaatattggccccatgaaaacctggatcttccctgatgcatactcttctagctctggttgttttcttctgctctaattttggtcttcagaatgtttctacattagtgagttggataacaatatagattgaggccaaattaatcctctgtattcaggggcctcaaaaagtgtcatgtctagtgccactttcataggcaaatcaggcaaaatgtatatctgcttatgatcaccaagtcgtagccacattctggcttatgagattcatgggaccagcatgaggtaaagaaaagaggcataatgtttgcctttgttttgtttttattttaaagcccaaggtctttgtttttgaagtaacagcttaatttttacccttcataatcaggagagttacttagatgctctcttcatgatttgttgaggttggaatgatttggcagtccctgaaatttattttggggaggaggtggcagaagagtggagtgtaccaggttatgagatttctcttaacccaccaacctaacttctgttctttctgcacctcagagatgaagaagagatgatgatttctcttcctcaagtccttcttattcttgctgtcctgttttttcaggccaagattggccttgtttgtttgcagtgtgatgcaagatgccacttgcataaatgtaacaactgccccaaaccacctgctccctccttctactcacccaccccacccttgatcctgccatctttcattatacatctgaaaattgcaccaattgaaaagcaacttagtggagaaaggaaggattatgaataaatgctgccaggacaattagttaactaaaaagaaaaatagataaattcaataaatacatgaatttttttgagatggagtcttgctcagtcatccaggttggagtgcaatggcgccatcttggctcactgcaacctccgcctcccgggttcaagcaattctcccatctcagcctcccaagtacctgtgattacaggcacccgccatcatgcccggctaatttttgtatttttgtagagctggggtttcaccatgttggccaggctggtcttgaactcctcacctcaggtgatctgcccacctcagcctcccaaagtgctgggattacaggcataagccaacacgccagccaaaaattgttttaattaaaaaaaattaaactaaatgcctagccaccttcatataacaacaacaaaataccagatgatttaaggaaattatataaaagtgaaactctaaacaaattagaaaaattatagccaaatgtttacataatcttgacatgaagaagaacattctaagcatcaaagctgtagaagaaaagaaaggattgagacatgcaactacataaaaagtggaggtttatatatgtcaacacacacaataatcaaaaatcaaaaatgcaaatttaaaagtaagcttaaattgccacataaacagctgatagatggttagtatcattaatagataaaggactcttataaatcattaaaaaaacaaatatcacaatagaaaaatgagcaaaaaaattgggaaaaatctcataaagtatggaatagataaattcaataaatatatgaaaatgaactaattatcaaataaatacagatataaatagcaatggacttctttttatctgtcaaattgatagagtggtttttttttaatcttaaagataatacgctgtgtggtggagacttttgtctctttatcactattcacaatgtaaaatggcgtctttctggagagaaatgattcctgctcactaacctaacctaacctttcatctccccttaatatgtgaaaggatagagagaaaagaagaagatattgaagtgtggaaagggagatcctgggcagtgcctaactcacctgaataagacccatcatttcactctcctccttgaccactcacaacatcctttataagctcagattctgtccctaattttgctgttgactcctttacgtatcagagctccttattctaacaaatacgagacaacttcagagaatgcttatgggactaaaggaatcccaattgaaatgatttgggagatttaggcaacacctcttttcccatcctaagaatgtaactgcactctactctctagcatgtgaatttatccagcacaaagctgacactcctgcagagaaagctccaaccggcagcaatgtatgagattaaagttcgatccatccctgatcactattttaaaggcttctggagtgaatggagtccaagttattacttcagaactccagagatcaataatagctcaggtaaggaatggtggtagagtttttgttccctcagagtgctttgcatgtcaaagtgtgggagcaagtgagaggaagattgttgaaactaacctgcaaaataggacacccttggagggcactcttacactttctttggagaatgacttgcctgctgtctttgcgccttttgtgaagaacaaggaagcagagggagtggggtccttattagctgagaattagtacaagccatctgtattcctggaagctgccatacattttgaacaaaatccccacccactacgtccagttaaccaatttagcctgggaccccaatggctgctgtctctaaggcccctttaagaagcacctttattggtgtcaggtatgcaggcaagtgcggctgtcctatgtctccttttccagaaggatgaagatgtctttgggactggaactgagaatgtgtaggaactgagacatctcctccctaaaatttgcaacaggggtgaacatccctctcatcatctcctgctctggcttcttttccttggtagaaagtcaagaagggaagagagcattggtacctttgatgctagatcacgtttacatttcaagtggcagatgctctgggcctggtcacccaagtcaatgccttttaaaccaaaatccctccataaagctgtcaaatatgtctcttaactgaaaagcaactttcaggaaataataagtgggcccacattactaagtaaatgcaaagcaccctgagaccctacccccactgcatggctactgaatgctcaccacaatctattcttgctttccaggggagatggatcctatcttactaaccatcagcattttgagttttttctctgtcgctctgttggtcatcttggcctgtgtgttatggaaaaaaaggtgaccttcttcaactaataaagagggtgattgtgtgggatcacggacagtcagagcttaagccccatttattgatgagaaaaccacaaaggggattaaggcatttcacgaatttagtgcccagtatccctatctatcctcagcgaatttccacagttaatttcataagaggcaaaaagatattaactggacattaggcaaacgctgtccccaaagtaagaattccgtaatgcaatgtttcccaagcttttcttccagtatctcctaaaggttgcagaagccatcattcatggcaaatgcacaatgtacttgaagtcttgactttaagcatataaattcatgggattttttatactaatccatgctaaggctatgtttgtttcatcataaaaatgatgttttaaacatgcacttgttaaattacttactattctaggagaatgcccttggcagaaggctacatatccccaggattacaaataccctaatttgaaaagtactgcctggaaagtactaagcaatttccctgggtaatttgaaaatattcccccacttccaccaaaattagctgccagagttgctgtcagtaaagagaggaaataaaaagacaacacttaaattgggagtaaacaacggggttaaatttacttccatagctgcaccaaaattacctccttgcaagccttggtgttccttccctctagggctttttcccagaggtatattattgtcatgtcttgttcacagaatggattgatatctgtggtctctggtccaacccctccttgaattgatagggccccgaggcccagagaaagccagtctcttgaccatggtcacccacctaattgtgttagagccaagactagaaatctgttcttctgattccaagctcagaataagtgggaagactcagtgtgcctgtgccctctgccattcacttcatctatcaatgttctctgatttcaggattaagcctatcgtatggcccagtctccccgatcataagaagactctggaacatctttgtaagaaaccaagaaaagtgagtgtttttggtgcttaaaaagtgttgtgttggcaacatcccagtggccaagaatgatattccaggacaaggaacagttgaacctcaccttttggtatttgattcatcctgtaactagggtccctcctaagaccctagctgcagtagggaactgaaataagatacacatctcagaacttctgggctccctggggctggagggcacagccagtggtcacttcaagtcttgaagtgtctcagaagctccagaagcaaagagtccattgaggaacatgctggcaattctgtgacattccctgtcagaaaactctatagacctactcctgaactgaacatttgatggtgtgtctctctggtgccatcttaataccctttctcctttttctgtgcagaatttaaatgtgagtttcaatcctgaaagtttcctggactgccagattcatagggtggatgacattcaagctagagatgaagtggaaggttttctgcaagatacgtttcctcagcaactagaagaatctgagaagcagaggcttggaggggatgtgcagagccccaactgcccatctgaggatgtagtcatcactccagaaagctttggaagagattcatccctcacatgcctggctgggaatgtcagtgcatgtgacgcccctattctctcctcttccaggtccctagactgcagggagagtggcaagaatgggcctcatgtgtaccaggacctcctgcttagccttgggactacaaacagcacgctgccccctccattttctctccaatctggaatcctgacattgaacccagttgctcagggtcagcccattcttacttccctgggatcaaatcaagaagaagcatatgtcaccatgtccagcttctaccaaaaccagtgaagtgtaagaaacccagactgaacttaccgtgagcgacaaagatgatttaaaagggaagtctagagttcctagtctccctcacagcacagagaagacaaaattagcaaaaccccactacacagtctgcaagattctgaaacattgctttgaccactcttcctgagttcagtggcactcaacatgagtcaagagcatcctgcttctaccatgtggatttggtcacaaggtttaaggtgacccaatgattcagctatttaaaaaaaaaagaggaaagaatgaaagagtaaaggaaatgattgaggagtgaggaaggcaggaagagagcatgagaggaaagaaagaaaggaaaataaaaaatgatagttgccattattaggatttaatatatatccagtgctttgcaagtgctctgcgcaccttgtctcactccatcctgacaataatcctgggaggtgtgtgcaattactacgactactctcttttttatagatcattaaattcagaactaaggagttaagtaacttgtccaagttgttcacacagtgaagggaggggccaagatatgatggctgggagtctaattgcagttccctgagccatgtgcctttctcttcactgaggactgccccattcttgagtgccaaacgtcactagtaacagggtgtgcctagataatttatgatccaaactgagtcagtttggaaagtgaaagggaaacttacatataatccctccgggacaatgagcaaaaactaggactgtccccagacaaatgtgaacatacatatcatcacttaaattaaaatggctatgagaaagaaagagggggagaaacagtcttgcgggtgtgaagtcccatgaccagccatgtcaaaagaaggtaaagaagtcaagaaaaagccatgaagcccatttggtttcatttttctgaaaataggctcaagagggaataaattagaaactcacaatttctcttgtttgttaccaagacagtgattctcttgctgctaccacccaactgcatccgtccatgatctcagaggaaactgtcgctgaccctggacatgggtacgtttgacgagtgagaggaggcatgacccctcccatgtgtatagacactaccccaacctaaattcatccctaaattgtcccaagttctccagcaatagaggctgccacaaacttcagggagaaagagttacaagtacatgcaatgagtgaactgactgtggctacaatcttgaagatatacggaagagacgtattattaatgcttgacatatatcatcttgcctttcttggtctagactgacttctaatgactaactcaaagtcaaggcaactgagtaatgtcagctcagcaaagtgcagcaaacccatctcccacaggcctccaaaccctggctgttcacagaaccacaaagggcagatgctgcacagaaaactagagaaggggtcataggttcatggttttgtttgagatttgttgctactgtttttctgttttgaattttcttctttgttctgtttttactttatttagggggactaggtgtttctgatattttagttttcttgtttgttttgttttgtgttgtctgtgaatggggttttaactgtggatgaatggaccttatctgttggcttaaaggactggtaaaatcagaccatcttattcttcaggtgaatgttttactttccaaagtgctctcctctgcaccagcagtaataaatacaatgccataatcccttaggtttgcctagtgcttttgcaattttcaaagcacttccataagcattccttccacctccttgataggcatttatggaaagcctgctacatgtcaatcatactgttaggcacaggggacctaaagacacataaaaggatggcattctgcctcataaattgcaaaacctaatgaaagtgactgcttggtaaacaaattattattatattataaaatgctataaaagagccatattgaaagtgccctgttggagacagggcaaatgccacaaaaatgatgtaaatttacatggaggaaaagtagaatctgcctggtttgtaggcagcagaagacatttttcatcagtgggcaggtgttctttaccttttgtagaaatgggagtcaagtctcaaataggaggctccacaaaatctcatgccaggtctctgataccttattcacagaagttctttgaagtatttattgttattttctttgacttatgggaaaactgggacacaggaagacaggtaaattacccaacctcacacgttaagtcagaactgggagccataattttgtatccctggtataaatagacaatctctcgaagaaatgaagagatgaccatagaaaaacatcgagatatctccagctctaaaatcctttgtttcaatgttgtttggcatatgttatctttggaatttagtgtctgagcctctgtctgttactgtagtatttaaaatgcatgtattataatcatataatcataactgctgttaattcttgattatatacctagggacaatgtgtaatgtaagattactaattggttctgcccaatctcctttcagattttattaggaaaaaaaaataaacctcctgatcggagacaatgtattaatcagaagtgtaaactgccagttctatatagcatgaaatgaaaagacagctaatttggtccaacaaacatgactgggtctagggcacccaggctgattcagctgatttcctaccagcctttgcctcttccttcaatgtggtttccatgggaatttgcttcagaaaagccaagtatgggctgttcagaggtgcacacctgcattttcttagctcttctagaggggctaagagacttggtacgggccaggaagaatatgtggcagagctcctggaaatgatgcagattaggtggcatttttgtcagctctgtggtttattgttgggactattctttaaaatatccattgttcactacagtgaagatctctgatttaaccgtgtgctatccacatgcattacaaacatttcgcagagctgcttagtatataagcgtacaatgtatgtaataaccatctcatatttaattaaatggtatagaagaacactttgtggcatgcctgtcttctctggaaactgtggttagacggattcccagaatggaccacacatctcttcagctcctgaaaactcacctccccatgagtccatggaaaaaattgtcttccacaaaaccagtccctggtcccaaaaagtttgagaaccactgcactagaagacagcctactagtggttaagtctcaatgtgtcaatgtatttaacagagagaacagagagtgttgcttcactcaacaggtggttcagtggaagccctgcatggacacctatttcacttgatatacctagtccctgcagtctgcagagtagtggctggaaattaggcttggcagaattggtgggggccaatgattaagcatttggcatgccagcctaagaagttgtcatctattttgcagaaaatagaggggcttggcaggattttaatcaggaatgtgatgtgaaatatatattttctgtgcatgtgtgtatcaggttttaggaaggaatcttaattcagtaggatataaatataaaataattctgacatttctttaattacttatctccaaagatgctccactgaaaatccctttctgaagtagattcctttaagtgaccaaagcttaattcatctagttttaagatgcagtcttatattctaactaaagccacacacaccctatcataaccttgtggtgaggggaacttggaaagaaaggaagataatagcttctgttctcttgactcctcccccttcttggcctcttcctcctctcttcttcctcctctttccctttcccctcccccttcctactttttcttgttcttgttcttcctcttcttccttctttctttttctaacagcttaaaacaccacacatttcctatctcacaacctctgcgggtcagaagtctgggcatggcttagctgagtcctcagcaaggctgcaatcaaaatgttggcccaggcttgcttctcttccagaggctccattggcaatgggtccgtttccaaacttacttaggttatagtagaatttattttcttgtgcttgtaaaactgagtgctccagcttcctgatagctctcactctcggctcctaaagttcacccacagcctcttgtcatatgaccctcttcataagcttttgtgtttttttttgtttgtttgtttgtttgttttgacagagtcttgctctgttgcccaggctgctggaatgcagtggcaccatctcagctcactgcaacctctgccttccaggttcaggagatgccctgcctcagtctcccaagtacctggaattacaggtgcacaccaccatgcccagctaatttttgtattttttgtaatggagatggggtttcgccatgttggccaggctggtctcaaactcctgacctcaggtgatccacccgccttggcctcccaaagtgcggggattacaggcgtgagccaccgtgcctggcccataagctctctttcaacaaaagcttgcttcttcaaagccagcaagggagagtgagtctaccagcaaaatggtgtcttatatatgtgatatgaccacaggcgtgacattccatcatcttgccatattcttttggttagaagcaagtcagaagtcccatccatactcaagaggaggggattatataaagacaagattttcaggagttggcgatcgcaggggccacattaaagcctgtttgacacacaagctaactcagtcatgccgtttttagttcagtctcttattaaatctttagtcaaattcagatttcttctcctcccattctcctgagagttttagatacacggtgctatgaattgagttgtgtccccccaaaattcatatgttgaattcttaacatgcaatagctcagaatgtgactttatttggagatagtttctttaaataggtaatcaatttaaaatgtcattagggtgcagcataatccagtatgactggtgttcttataaaaaaaaaaaggaaaatttagagacagacatgcacatagggaaaacatcatgtgaaaaatgaaggcagagatcaggggtgatatttttaaaagataataagtatcaaagattgatagaaaatcatcagtagctaagaaagaggcatgggacagattctcccccacagctctcaaaaggaatcaaccctgctggcaccttgatctcaaacttctaggctccagaacggtgagacaataaatctcttgtttaagccactcagtctgtggtgctttgctatgacagccctagaaaatgaatgcacatggtactgggagaaggaatctggggccatgtgacttctttggactcccctgagctctagccttcctgtcttgtctgtggatggtatcccgtgttgtgtctactgctaatgtgtcagggcccatcatgttcctttgaatgtggatgatccacatcctgtctattaactgggtctctatgtgttgtccaggaagcttctttcagcctctagacttctctgcctcttcaagcatgggaagtagttggatcaaatttcctctttagaatgatccccctggtgaaggaagagaataggtcatatgacagctagactagagccgggacagatggacttttgtgacctctatgcccgcttaggggatgccacatcaggtccaaggtgagcctgaggctaaggccaagttggtctttgtgccacctttatctccttgtcagaaaagctcttccttcttttctgccacccttccatctaccagtacttactagttactaaatatctgaatatctgtttcattccaacaagaacatagatagtagaacttgtggggctccagggaaatccctaggccctggaaagagaagcttgcagttaatagctttctgggtgtcttcttactgattggctgagagttagataagctagagcttgagtgaagggcttttatccttttcctccacctccacaacatcttataatatggaatcagccagcctgcctgtcccaaggcctttgctcttgccgctctctccatctgaaacgtggtttctctggatctttgtgtggctggctccttcttattatccaggtcctagcttctacgtaacctccacagaagtggtcattctaatgaaaacaagaccctcctcctgatagtctctatcatgcctccctgtttatttcctccaaaactccttcctcaatattaactaccaattattaatcactaattcattactaattattaataatttatttttgatgattgttcttattgcctctctctgattctaaaattcaagttccatgcaagttccacttcctatattattcttggaataaaacaaatatttagtaagtactggtagatggaagggaggaagaaaaggaagagctattctgacagagaaagatggcacaaagaaccacttggtcttagtctcagactcacctttgacctggttgtggtgtcccctaagtgtgtacagcagtcacaaaagtccatctgaccctgccctagtctggctgtcatatgacctatcccccacccccactgggagtatctttctaaagaggaaatctgatcaagctacctccctaactaaaatcccttagtggctttccagcatggcacgtgacatagcttggattcttgtccccatccaaatctcatgataaaatgtaatccccagtattggaggtggaccctggtgagagcaccatccccttggtgctgtcctctcaagagtgagtgagatctcacaagacctggttgttttaaaagtgtgtggcacctcctcccacccttgctcctgctttcaccatgtgatgtgcctgctccccctttgcattccaccatgattgtaagtttcctgaggcctcctcagaagccaagcagatcttagcaccatgcttcctgtaagccctgcagaaccatgatccaactaagcctcttttctttataaattatccagtcccaggcatttatttatagtaatgcaagaacgaactaacacagcatggaaggctcttgatgatctagtgtattactttcttgtggctcctgtaataaattatcacaaacttagtggcttaaaacaatacaaattcatttattctcctgcagatcaggcatcagaagtccaaaatcagtcttctggggcaaaaatccaggtgtcaacagggctgtgatacttctgaagactgcagggagaatccgttttccagcttttttcatccaccagaggccacctgtattccctatcccacaaccctagccccttcctctatctttgaagtggactatttcatcccctgtttctatcatgacagtgccttctctcatattgaccctcttgccttataagattccttgtgattacactgggtccacctgcataatcaaggctaatctctccatctggagatcttaatataatcacatctacaaagtccctttggccattgaagtaacatatttatatgttttcattattaggatgtgggacactttgtcagggacagggatttttcagcctaccttttttcttcaccttttgccaccactctcagcctgtggtctcaattgccagcctttacacttgctacccccattgtctgggtagttcataccagtccctcaagactagcctcaggcattgcctcttctgggaatacatcctcttacaggccaggatatgactcatgggtgcattcctaatagcacttcacttatttctactgtcaccacactgatctgtaattacttgatttgtctgactcttctgggggcttgtaagcattctggcacagagaactatgacttactggggcttacatctcttgctaaacacagtacctaaaatttagtaggcattccctcataaacatgaatgaatgaatcaaagaatgaataaacatttaggaaatgatgttgtgttggtcaacttctttcctcatcactgttaaagataaaagaatgccaagccaggttgttcagacagaagcaagcaccacatccctgagagagcagcacatctgggcagccatgtgtgagaagtcggttgcattccccatacacagttgtctttgcagctgtactcttaaccactgtaaccacagaagtggggaaacaatagggtggggtgaagtgaaaagaaaattttccaaaacttcatttatctaataaatacagatatttaattgtgttttttcagttatttaattttagattcatatgaaattctaccctaatttctgaattttaatggcttgtggcatttgtgtgggcatttgtgtgtagcttgcaatgacacagctgttcagacaaagaaagtgtgatgcacaaaacctatgaggtccaaggaacacattcatgctcctcaagactcaggtaaaagtagtgaagcaaacaatatgcaaagcccctgaggattgaaaaataaggcttacatactgaattgtgctgaaacacttgagttcatctggagggcctctcaatggtaaattgttagaaccaatttgcctttaccctaagtaaagatttttcatcaagaagaggtggaaaacttacagagactgaaaaggaccctctttttatgataaattagttcctgcaaagtatgaactgcactagtcatgacacaaaaactatgcagaataatcagaaaacattttattattaagcttatccactgatagactgaaatattacttttagagcctaagaaagcattaatttaattagagcttcagtaaatgctatagtgtcagactgataaacctgtttgctacataattataaactttcatgaatttcacagtgtgaagttcaagtgtgaagttgccagtgtagaactgaatgatgcttaaagctttattttctcaaataaaaaattttaataaaataagagcagataagctagggtcatgctcagtggtgaaattttaaaagtactccattatattgaaggataagacaaaagaaattctattgtcacttcatttaacatggttctagaaattctaagaaattcaattaaacaagaaaacacagtaaaaagcataaatattgaataggagaaaattaaatcgtcattattggcagataaaattattgtatatatggaaaacacaagagaatcaagtagaaaacacactacaagacacagatactttattaaggtctccgcttacaatattctcatgtttattttttttaattcttatggaatctttacaactaaactattatttggttgtgtcctcaaattaaaaaaagatagacatgtaatgtatcaagttgaagatgtcactttctaatcacactcttcaggaatagtcacatttaataagtgacatttaggcttccagatgctcttctgtgcatacactattattctaaatatcttgcagagaaataaatgttggagaatagcctgcacaattccagagaagaaaagaattgtgaagcaactaaccattcacgtggttttaaaatttgattcagcaggaattcacagaactatcaatggtataaaacagagaatctgcaagtccagatctatgtaattacaaaaaattcatccatttctaatcagtagggttaaagtggattatttagcaaataagattggaataacacactagccatttgcaaatgaagaaaggtaactgacttcttatttcaaaataaattccacataactcaaagatataaataatttttaaaataaaaacaaatgctagaatacatggatcaatcatttcatattttttggatgcaaaaagcgtttctagataaaacgtaaaacctaaaagccataaaaggaaaagattgatatgtttgactagataaaatttagaatgctggtaatttctttactaaattttaaaaagtcacaaccaaaagaaagataaaaatagactggagaaagacagtaacactatgacaagcaaacttctgttatccttataagaccccagagtcttacaagtcagcaagcaaaagatgaagagcccaagaaggaaatgaacacagcacattaacagaaggctcacaggagaaataaaacaaactttaaaaataggaaaatgtgcgtaatctcattctgaataaacaatgctgataaaatgaatgagataaatgctt

SEQ ID NO: 65 - DNA, 1658 bp, Homo sapiens
ctctctctctatctctctcagaatgacaattctaggtacaacttttggcatggttttttctttacttcaagtcgtttctggagaaagtggctatgctcaaaatggagacttggaagatgcagaactggatgactactcattctcatgctatagccagttggaagtgaatggatcgcagcactcactgacctgtgcttttgaggacccagatgtcaacatcaccaatctggaatttgaaatatgtggggccctcgtggaggtaaagtgcctgaatttcaggaaactacaagagatatatttcatcgagacaaagaaattcttactgattggaaagagcaatatatgtgtgaaggttggagaaaagagtctaacctgcaaaaaaatagacctaaccactatagttaaacctgaggctccttttgacctgagtgtcgtctatcgggaaggagccaatgactttgtggtgacatttaatacatcacacttgcaaaagaagtatgtaaaagttttaatgcacgatgtagcttaccgccaggaaaaggatgaaaacaaatggacgcatgtgaatttatccagcacaaagctgacactcctgcagagaaagctccaaccggcagcaatgtatgagattaaagttcgatccatccctgatcactattttaaaggcttctggagtgaatggagtccaagttattacttcagaactccagagatcaataatagctcaggggagatggatcctatcttactaaccatcagcattttgagttttttctctgtcgctctgttggtcatcttggcctgtgtgttatggaaaaaaaggattaagcctatcgtatggcccagtctccccgatcataagaagactctggaacatctttgtaagaaaccaagaaaaaatttaaatgtgagtttcaatcctgaaagtttcctggactgccagattcatagggtggatgacattcaagctagagatgaagtggaaggttttctgcaagatacgtttcctcagcaactagaagaatctgagaagcagaggcttggaggggatgtgcagagccccaactgcccatctgaggatgtagtcatcactccagaaagctttggaagagattcatccctcacatgcctggctgggaatgtcagtgcatgtgacgcccctattctctcctcttccaggtccctagactgcagggagagtggcaagaatgggcctcatgtgtaccaggacctcctgcttagccttgggactacaaacagcacgctgccccctccattttctctccaatctggaatcctgacattgaacccagttgctcagggtcagcccattcttacttccctgggatcaaatcaagaagaagcatatgtcaccatgtccagcttctaccaaaaccagtgaagtgtaagaaacccagactgaacttaccgtgagcgacaaagatgatttaaaagggaagtctagagttcctagtctccctcacagcacagagaagacaaaattagcaaaaccccactacacagtctgcaagattctgaaacattgctttgaccactcttcctgagttcagtggcactcaacatgagtcaagagcatcctgcttctaccatgtggatttggtcacaaggtttaaggtgacccaatgattcagctattt

SEQ ID NO: 66 - protein, 459 aa, Homo sapiens
MTILGTTFGMVFSLLQVVSGESGYAQNGDLEDAELDDYSFSCYSQLEVNGSQHSLTCAFEDPDVNITNLEFEICGALVEVKCLNFRKLQEIYFIETKKFLLIGKSNICVKVGEKSLTCKKIDLTTIVKPEAPFDLSVVYREGANDFVVTFNTSHLQKKYVKVLMHDVAYRQEKDENKWTHVNLSSTKLTLLQRKLQPAAMYEIKVRSIPDHYFKGFWSEWSPSYYFRTPEINNSSGEMDPILLTISILSFFSVALLVILACVLWKKRIKPIVWPSLPDHKKTLEHLCKKPRKNLNVSFNPESFLDCQIHRVDDIQARDEVEGFLQDTFPQQLEESEKQRLGGDVQSPNCPSEDVVITPESFGRDSSLTCLAGNVSACDAPILSSSRSLDCRESGKNGPHVYQDLLLSLGTTNSTLPPPFSLQSGILTLNPVAQGQPILTSLGSNQEEAYVTMSSFYQNQ

(The sequence listing continues in the following parts.)
